United States Patent Application Publication US 2026/0256945 A1, published September 3, 2026 (application 19/165,506).

The application's sequence listing, which the Patent Office published only in electronic form, follows.

SEQUENCE LISTING (8374 sequences)

SEQ ID NO: 1 - protein, 2133 aa, synthetic construct
MPAAKRVKLDGGDKKYSIGLDIGTNSVGWAVITDEYKVPSKKFKVLGNTDRHSIKKNLIGALLFDSGETAEATRLKRTARRRYTRRKNRICYLQEIFSNEMAKVDDSFFHRLEESFLVEEDKKHERHPIFGNIVDEVAYHEKYPTIYHLRKKLVDSTDKADLRLIYLALAHMIKFRGHFLIEGDLNPDNSDVDKLFIQLVQTYNQLFEENPINASGVDAKAILSARLSKSRRLENLIAQLPGEKKNGLFGNLIALSLGLTPNFKSNFDLAEDAKLQLSKDTYDDDLDNLLAQIGDQYADLFLAAKNLSDAILLSDILRVNTEITKAPLSASMIKRYDEHHQDLTLLKALVRQQLPEKYKEIFFDQSKNGYAGYIDGGASQEEFYKFIKPILEKMDGTEELLVKLNREDLLRKQRTFDNGSIPHQIHLGELHAILRRQEDFYPFLKDNREKIEKILTFRIPYYVGPLARGNSRFAWMTRKSEETITPWNFEEVVDKGASAQSFIERMTNFDKNLPNEKVLPKHSLLYEYFTVYNELTKVKYVTEGMRKPAFLSGEQKKAIVDLLFKTNRKVTVKQLKEDYFKKIECFDSVEISGVEDRFNASLGTYHDLLKIIKDKDFLDNEENEDILEDIVLTLTLFEDREMIEERLKTYAHLFDDKVMKQLKRRRYTGWGRLSRKLINGIRDKQSGKTILDFLKSDGFANRNFMQLIHDDSLTFKEDIQKAQVSGQGDSLHEHIANLAGSPAIKKGILQTVKVVDELVKVMGRHKPENIVIEMARENQTTQKGQKNSRERMKRIEEGIKELGSQILKEHPVENTQLQNEKLYLYYLQNGRDMYVDQELDINRLSDYDVDHIVPQSFLKDDSIDNKVLTRSDKARGKSDNVPSEEVVKKMKNYWRQLLNAKLITQRKFDNLTKAERGGLSELDKAGFIKRQLVETRQITKHVAQILDSRMNTKYDENDKLIREVKVITLKSKLVSDFRKDFQFYKVREINNYHHAHDAYLNAVVGTALIKKYPKLESEFVYGDYKVYDVRKMIAKSEQEIGKATAKYFFYSNIMNFFKTEITLANGEIRKRPLIETNGETGEIVWDKGRDFATVRKVLSMPQVNIVKKTEVQTGGFSKESILPKRNSDKLIARKKDWDPKKYGGFDSPTVAYSVLVVAKVEKGKSKKLKSVKELLGITIMERSSFEKNPIDFLEAKGYKEVKKDLIIKLPKYSLFELENGRKRMLASAGELQKGNELALPSKYVNFLYLASHYEKLKGSPEDNEQKQLFVEQHKHYLDEIIEQISEFSKRVILADANLDKVLSAYNKHRDKPIREQAENIIHLFTLTNLGAPAAFKYFDTTIDRKRYTSTKEVLDATLIHQSITGLYETRIDLSQLGGDGGAEAAAKEAAAKEAAAKEAAAKALEAEAAAKEAAAKEAAAKEAAAKAGGTAPLEEEYRLFLEAPIQNVTLLEQWKREIPKVWAEINPPGLASTQAPIHVQLLSTALPVRVRQYPITLEAKRSLRETIRKFRAAGILRPVHSPWNTPLLPVRKSGTSEYRMVQDLREVNKRVETIHPTVPNPYTLLSLLPPDRIWYSVLDLKDAFFCIPLAPESQLIFAFEWADAEEGESGQLTWTRLPQGFKNSPTLFDEALNRDLQGFRLDHPSVSLLQYVDDLLIAADTQAACLSATRDLLMTLAELGYRVSGKKAQLCQEEVTYLGFKIHKGSRSLSNSRTQAILQIPVPKTKRQVREFLGTIGYCRLWIPGFAELAQPLYAATRGGNDPLVWGEKEEEAFQSLKLALTQPPALALPSLDKPFQLFVEETSGAAKGVLTQALGPWKRPVAYLSKRLDPVAAGWPRCLRAIAAAALLTREASKLTFGQDIEITSSHNLESLLRSPPDKWLTNARITQYQVLLLDPPRVRFKQTAALNPATLLPETDDTLPIHHCLDTLDSLTSTRPDLTDQPLAQAEATLFTDGSSYIRDGKRYAGAAVVTLDSVIWAEPLPIGTSAQKAELIALTKALEWSKDKSVNIYTDSRYAFATLHVHGMIYRERGLLTAGGKAIKNAPEILALLTAVWLPKRVAVMHCKGHQKDDAPTSTGNRRADEVAREVAIRPLSTQATISAGKRTADGSEFEKRTADGSEFESPKKKAKVE

SEQ ID NO: 2 - protein, 2112 aa, synthetic construct
MPAAKRVKLDGGDKKYSIGLDIGTNSVGWAVITDEYKVPSKKFKVLGNTDRHSIKKNLIGALLFDSGETAEATRLKRTARRRYTRRKNRICYLQEIFSNEMAKVDDSFFHRLEESFLVEEDKKHERHPIFGNIVDEVAYHEKYPTIYHLRKKLVDSTDKADLRLIYLALAHMIKFRGHFLIEGDLNPDNSDVDKLFIQLVQTYNQLFEENPINASGVDAKAILSARLSKSRRLENLIAQLPGEKKNGLFGNLIALSLGLTPNFKSNFDLAEDAKLQLSKDTYDDDLDNLLAQIGDQYADLFLAAKNLSDAILLSDILRVNTEITKAPLSASMIKRYDEHHQDLTLLKALVRQQLPEKYKEIFFDQSKNGYAGYIDGGASQEEFYKFIKPILEKMDGTEELLVKLNREDLLRKQRTFDNGSIPHQIHLGELHAILRRQEDFYPFLKDNREKIEKILTFRIPYYVGPLARGNSRFAWMTRKSEETITPWNFEEVVDKGASAQSFIERMTNFDKNLPNEKVLPKHSLLYEYFTVYNELTKVKYVTEGMRKPAFLSGEQKKAIVDLLFKTNRKVTVKQLKEDYFKKIECFDSVEISGVEDRFNASLGTYHDLLKIIKDKDFLDNEENEDILEDIVLTLTLFEDREMIEERLKTYAHLFDDKVMKQLKRRRYTGWGRLSRKLINGIRDKQSGKTILDFLKSDGFANRNFMQLIHDDSLTFKEDIQKAQVSGQGDSLHEHIANLAGSPAIKKGILQTVKVVDELVKVMGRHKPENIVIEMARENQTTQKGQKNSRERMKRIEEGIKELGSQILKEHPVENTQLQNEKLYLYYLQNGRDMYVDQELDINRLSDYDVDHIVPQSFLKDDSIDNKVLTRSDKARGKSDNVPSEEVVKKMKNYWRQLLNAKLITQRKFDNLTKAERGGLSELDKAGFIKRQLVETRQITKHVAQILDSRMNTKYDENDKLIREVKVITLKSKLVSDFRKDFQFYKVREINNYHHAHDAYLNAVVGTALIKKYPKLESEFVYGDYKVYDVRKMIAKSEQEIGKATAKYFFYSNIMNFFKTEITLANGEIRKRPLIETNGETGEIVWDKGRDFATVRKVLSMPQVNIVKKTEVQTGGFSKESILPKRNSDKLIARKKDWDPKKYGGFDSPTVAYSVLVVAKVEKGKSKKLKSVKELLGITIMERSSFEKNPIDFLEAKGYKEVKKDLIIKLPKYSLFELENGRKRMLASAGELQKGNELALPSKYVNFLYLASHYEKLKGSPEDNEQKQLFVEQHKHYLDEIIEQISEFSKRVILADANLDKVLSAYNKHRDKPIREQAENIIHLFTLTNLGAPAAFKYFDTTIDRKRYTSTKEVLDATLIHQSITGLYETRIDLSQLGGDGGGGGGSGGGGSGGGGSGGGGSGGGGSGGTAPLEEEYRLFLEAPIQNVTLLEQWKREIPKVWAEINPPGLASTQAPIHVQLLSTALPVRVRQYPITLEAKRSLRETIRKFRAAGILRPVHSPWNTPLLPVRKSGTSEYRMVQDLREVNKRVETIHPTVPNPYTLLSLLPPDRIWYSVLDLKDAFFCIPLAPESQLIFAFEWADAEEGESGQLTWTRLPQGFKNSPTLFDEALNRDLQGFRLDHPSVSLLQYVDDLLIAADTQAACLSATRDLLMTLAELGYRVSGKKAQLCQEEVTYLGFKIHKGSRSLSNSRTQAILQIPVPKTKRQVREFLGTIGYCRLWIPGFAELAQPLYAATRGGNDPLVWGEKEEEAFQSLKLALTQPPALALPSLDKPFQLFVEETSGAAKGVLTQALGPWKRPVAYLSKRLDPVAAGWPRCLRAIAAAALLTREASKLTFGQDIEITSSHNLESLLRSPPDKWLTNARITQYQVLLLDPPRVRFKQTAALNPATLLPETDDTLPIHHCLDTLDSLTSTRPDLTDQPLAQAEATLFTDGSSYIRDGKRYAGAAVVTLDSVIWAEPLPIGTSAQKAELIALTKALEWSKDKSVNIYTDSRYAFATLHVHGMIYRERGLLTAGGKAIKNAPEILALLTAVWLPKRVAVMHCKGHQKDDAPTSTGNRRADEVAREVAIRPLSTQATISAGKRTADGSEFEKRTADGSEFESPKKKAKVE

SEQ ID NO: 3 - protein, 2098 aa, synthetic construct
MPAAKRVKLDGGDKKYSIGLDIGTNSVGWAVITDEYKVPSKKFKVLGNTDRHSIKKNLIGALLFDSGETAEATRLKRTARRRYTRRKNRICYLQEIFSNEMAKVDDSFFHRLEESFLVEEDKKHERHPIFGNIVDEVAYHEKYPTIYHLRKKLVDSTDKADLRLIYLALAHMIKFRGHFLIEGDLNPDNSDVDKLFIQLVQTYNQLFEENPINASGVDAKAILSARLSKSRRLENLIAQLPGEKKNGLFGNLIALSLGLTPNFKSNFDLAEDAKLQLSKDTYDDDLDNLLAQIGDQYADLFLAAKNLSDAILLSDILRVNTEITKAPLSASMIKRYDEHHQDLTLLKALVRQQLPEKYKEIFFDQSKNGYAGYIDGGASQEEFYKFIKPILEKMDGTEELLVKLNREDLLRKQRTFDNGSIPHQIHLGELHAILRRQEDFYPFLKDNREKIEKILTFRIPYYVGPLARGNSRFAWMTRKSEETITPWNFEEVVDKGASAQSFIERMTNFDKNLPNEKVLPKHSLLYEYFTVYNELTKVKYVTEGMRKPAFLSGEQKKAIVDLLFKTNRKVTVKQLKEDYFKKIECFDSVEISGVEDRFNASLGTYHDLLKIIKDKDFLDNEENEDILEDIVLTLTLFEDREMIEERLKTYAHLFDDKVMKQLKRRRYTGWGRLSRKLINGIRDKQSGKTILDFLKSDGFANRNFMQLIHDDSLTFKEDIQKAQVSGQGDSLHEHIANLAGSPAIKKGILQTVKVVDELVKVMGRHKPENIVIEMARENQTTQKGQKNSRERMKRIEEGIKELGSQILKEHPVENTQLQNEKLYLYYLQNGRDMYVDQELDINRLSDYDVDHIVPQSFLKDDSIDNKVLTRSDKARGKSDNVPSEEVVKKMKNYWRQLLNAKLITQRKFDNLTKAERGGLSELDKAGFIKRQLVETRQITKHVAQILDSRMNTKYDENDKLIREVKVITLKSKLVSDFRKDFQFYKVREINNYHHAHDAYLNAVVGTALIKKYPKLESEFVYGDYKVYDVRKMIAKSEQEIGKATAKYFFYSNIMNFFKTEITLANGEIRKRPLIETNGETGEIVWDKGRDFATVRKVLSMPQVNIVKKTEVQTGGFSKESILPKRNSDKLIARKKDWDPKKYGGFDSPTVAYSVLVVAKVEKGKSKKLKSVKELLGITIMERSSFEKNPIDFLEAKGYKEVKKDLIIKLPKYSLFELENGRKRMLASAGELQKGNELALPSKYVNFLYLASHYEKLKGSPEDNEQKQLFVEQHKHYLDEIIEQISEFSKRVILADANLDKVLSAYNKHRDKPIREQAENIIHLFTLTNLGAPAAFKYFDTTIDRKRYTSTKEVLDATLIHQSITGLYETRIDLSQLGGDGGPAPEAAAKGGGGGTAPLEEEYRLFLEAPIQNVTLLEQWKREIPKVWAEINPPGLASTQAPIHVQLLSTALPVRVRQYPITLEAKRSLRETIRKFRAAGILRPVHSPWNTPLLPVRKSGTSEYRMVQDLREVNKRVETIHPTVPNPYTLLSLLPPDRIWYSVLDLKDAFFCIPLAPESQLIFAFEWADAEEGESGQLTWTRLPQGFKNSPTLFDEALNRDLQGFRLDHPSVSLLQYVDDLLIAADTQAACLSATRDLLMTLAELGYRVSGKKAQLCQEEVTYLGFKIHKGSRSLSNSRTQAILQIPVPKTKRQVREFLGTIGYCRLWIPGFAELAQPLYAATRGGNDPLVWGEKEEEAFQSLKLALTQPPALALPSLDKPFQLFVEETSGAAKGVLTQALGPWKRPVAYLSKRLDPVAAGWPRCLRAIAAAALLTREASKLTFGQDIEITSSHNLESLLRSPPDKWLTNARITQYQVLLLDPPRVRFKQTAALNPATLLPETDDTLPIHHCLDTLDSLTSTRPDLTDQPLAQAEATLFTDGSSYIRDGKRYAGAAVVTLDSVIWAEPLPIGTSAQKAELIALTKALEWSKDKSVNIYTDSRYAFATLHVHGMIYRERGLLTAGGKAIKNAPEILALLTAVWLPKRVAVMHCKGHQKDDAPTSTGNRRADEVAREVAIRPLSTQATISAGKRTADGSEFEKRTADGSEFESPKKKAKVE

SEQ ID NO: 4 - protein, 2090 aa, synthetic construct
MPAAKRVKLDGGDKKYSIGLDIGTNSVGWAVITDEYKVPSKKFKVLGNTDRHSIKKNLIGALLFDSGETAEATRLKRTARRRYTRRKNRICYLQEIFSNEMAKVDDSFFHRLEESFLVEEDKKHERHPIFGNIVDEVAYHEKYPTIYHLRKKLVDSTDKADLRLIYLALAHMIKFRGHFLIEGDLNPDNSDVDKLFIQLVQTYNQLFEENPINASGVDAKAILSARLSKSRRLENLIAQLPGEKKNGLFGNLIALSLGLTPNFKSNFDLAEDAKLQLSKDTYDDDLDNLLAQIGDQYADLFLAAKNLSDAILLSDILRVNTEITKAPLSASMIKRYDEHHQDLTLLKALVRQQLPEKYKEIFFDQSKNGYAGYIDGGASQEEFYKFIKPILEKMDGTEELLVKLNREDLLRKQRTFDNGSIPHQIHLGELHAILRRQEDFYPFLKDNREKIEKILTFRIPYYVGPLARGNSRFAWMTRKSEETITPWNFEEVVDKGASAQSFIERMTNFDKNLPNEKVLPKHSLLYEYFTVYNELTKVKYVTEGMRKPAFLSGEQKKAIVDLLFKTNRKVTVKQLKEDYFKKIECFDSVEISGVEDRFNASLGTYHDLLKIIKDKDFLDNEENEDILEDIVLTLTLFEDREMIEERLKTYAHLFDDKVMKQLKRRRYTGWGRLSRKLINGIRDKQSGKTILDFLKSDGFANRNFMQLIHDDSLTFKEDIQKAQVSGQGDSLHEHIANLAGSPAIKKGILQTVKVVDELVKVMGRHKPENIVIEMARENQTTQKGQKNSRERMKRIEEGIKELGSQILKEHPVENTQLQNEKLYLYYLQNGRDMYVDQELDINRLSDYDVDHIVPQSFLKDDSIDNKVLTRSDKARGKSDNVPSEEVVKKMKNYWRQLLNAKLITQRKFDNLTKAERGGLSELDKAGFIKRQLVETRQITKHVAQILDSRMNTKYDENDKLIREVKVITLKSKLVSDFRKDFQFYKVREINNYHHAHDAYLNAVVGTALIKKYPKLESEFVYGDYKVYDVRKMIAKSEQEIGKATAKYFFYSNIMNFFKTEITLANGEIRKRPLIETNGETGEIVWDKGRDFATVRKVLSMPQVNIVKKTEVQTGGFSKESILPKRNSDKLIARKKDWDPKKYGGFDSPTVAYSVLVVAKVEKGKSKKLKSVKELLGITIMERSSFEKNPIDFLEAKGYKEVKKDLIIKLPKYSLFELENGRKRMLASAGELQKGNELALPSKYVNFLYLASHYEKLKGSPEDNEQKQLFVEQHKHYLDEIIEQISEFSKRVILADANLDKVLSAYNKHRDKPIREQAENIIHLFTLTNLGAPAAFKYFDTTIDRKRYTSTKEVLDATLIHQSITGLYETRIDLSQLGGDGGGGGGGTAPLEEEYRLFLEAPIQNVTLLEQWKREIPKVWAEINPPGLASTQAPIHVQLLSTALPVRVRQYPITLEAKRSLRETIRKFRAAGILRPVHSPWNTPLLPVRKSGTSEYRMVQDLREVNKRVETIHPTVPNPYTLLSLLPPDRIWYSVLDLKDAFFCIPLAPESQLIFAFEWADAEEGESGQLTWTRLPQGFKNSPTLFDEALNRDLQGFRLDHPSVSLLQYVDDLLIAADTQAACLSATRDLLMTLAELGYRVSGKKAQLCQEEVTYLGFKIHKGSRSLSNSRTQAILQIPVPKTKRQVREFLGTIGYCRLWIPGFAELAQPLYAATRGGNDPLVWGEKEEEAFQSLKLALTQPPALALPSLDKPFQLFVEETSGAAKGVLTQALGPWKRPVAYLSKRLDPVAAGWPRCLRAIAAAALLTREASKLTFGQDIEITSSHNLESLLRSPPDKWLTNARITQYQVLLLDPPRVRFKQTAALNPATLLPETDDTLPIHHCLDTLDSLTSTRPDLTDQPLAQAEATLFTDGSSYIRDGKRYAGAAVVTLDSVIWAEPLPIGTSAQKAELIALTKALEWSKDKSVNIYTDSRYAFATLHVHGMIYRERGLLTAGGKAIKNAPEILALLTAVWLPKRVAVMHCKGHQKDDAPTSTGNRRADEVAREVAIRPLSTQATISAGKRTADGSEFEKRTADGSEFESPKKKAKVE

SEQ ID NO: 5 - protein, 2098 aa, synthetic construct
MPAAKRVKLDGGDKKYSIGLDIGTNSVGWAVITDEYKVPSKKFKVLGNTDRHSIKKNLIGALLFDSGETAEATRLKRTARRRYTRRKNRICYLQEIFSNEMAKVDDSFFHRLEESFLVEEDKKHERHPIFGNIVDEVAYHEKYPTIYHLRKKLVDSTDKADLRLIYLALAHMIKFRGHFLIEGDLNPDNSDVDKLFIQLVQTYNQLFEENPINASGVDAKAILSARLSKSRRLENLIAQLPGEKKNGLFGNLIALSLGLTPNFKSNFDLAEDAKLQLSKDTYDDDLDNLLAQIGDQYADLFLAAKNLSDAILLSDILRVNTEITKAPLSASMIKRYDEHHQDLTLLKALVRQQLPEKYKEIFFDQSKNGYAGYIDGGASQEEFYKFIKPILEKMDGTEELLVKLNREDLLRKQRTFDNGSIPHQIHLGELHAILRRQEDFYPFLKDNREKIEKILTFRIPYYVGPLARGNSRFAWMTRKSEETITPWNFEEVVDKGASAQSFIERMTNFDKNLPNEKVLPKHSLLYEYFTVYNELTKVKYVTEGMRKPAFLSGEQKKAIVDLLFKTNRKVTVKQLKEDYFKKIECFDSVEISGVEDRFNASLGTYHDLLKIIKDKDFLDNEENEDILEDIVLTLTLFEDREMIEERLKTYAHLFDDKVMKQLKRRRYTGWGRLSRKLINGIRDKQSGKTILDFLKSDGFANRNFMQLIHDDSLTFKEDIQKAQVSGQGDSLHEHIANLAGSPAIKKGILQTVKVVDELVKVMGRHKPENIVIEMARENQTTQKGQKNSRERMKRIEEGIKELGSQILKEHPVENTQLQNEKLYLYYLQNGRDMYVDQELDINRLSDYDVDHIVPQSFLKDDSIDNKVLTRSDKARGKSDNVPSEEVVKKMKNYWRQLLNAKLITQRKFDNLTKAERGGLSELDKAGFIKRQLVETRQITKHVAQILDSRMNTKYDENDKLIREVKVITLKSKLVSDFRKDFQFYKVREINNYHHAHDAYLNAVVGTALIKKYPKLESEFVYGDYKVYDVRKMIAKSEQEIGKATAKYFFYSNIMNFFKTEITLANGEIRKRPLIETNGETGEIVWDKGRDFATVRKVLSMPQVNIVKKTEVQTGGFSKESILPKRNSDKLIARKKDWDPKKYGGFDSPTVAYSVLVVAKVEKGKSKKLKSVKELLGITIMERSSFEKNPIDFLEAKGYKEVKKDLIIKLPKYSLFELENGRKRMLASAGELQKGNELALPSKYVNFLYLASHYEKLKGSPEDNEQKQLFVEQHKHYLDEIIEQISEFSKRVILADANLDKVLSAYNKHRDKPIREQAENIIHLFTLTNLGAPAAFKYFDTTIDRKRYTSTKEVLDATLIHQSITGLYETRIDLSQLGGDGGGGGGSSEAAAKGGTAPLEEEYRLFLEAPIQNVTLLEQWKREIPKVWAEINPPGLASTQAPIHVQLLSTALPVRVRQYPITLEAKRSLRETIRKFRAAGILRPVHSPWNTPLLPVRKSGTSEYRMVQDLREVNKRVETIHPTVPNPYTLLSLLPPDRIWYSVLDLKDAFFCIPLAPESQLIFAFEWADAEEGESGQLTWTRLPQGFKNSPTLFDEALNRDLQGFRLDHPSVSLLQYVDDLLIAADTQAACLSATRDLLMTLAELGYRVSGKKAQLCQEEVTYLGFKIHKGSRSLSNSRTQAILQIPVPKTKRQVREFLGTIGYCRLWIPGFAELAQPLYAATRGGNDPLVWGEKEEEAFQSLKLALTQPPALALPSLDKPFQLFVEETSGAAKGVLTQALGPWKRPVAYLSKRLDPVAAGWPRCLRAIAAAALLTREASKLTFGQDIEITSSHNLESLLRSPPDKWLTNARITQYQVLLLDPPRVRFKQTAALNPATLLPETDDTLPIHHCLDTLDSLTSTRPDLTDQPLAQAEATLFTDGSSYIRDGKRYAGAAVVTLDSVIWAEPLPIGTSAQKAELIALTKALEWSKDKSVNIYTDSRYAFATLHVHGMIYRERGLLTAGGKAIKNAPEILALLTAVWLPKRVAVMHCKGHQKDDAPTSTGNRRADEVAREVAIRPLSTQATISAGKRTADGSEFEKRTADGSEFESPKKKAKVE

SEQ ID NO: 6 - protein, 2098 aa, synthetic construct
MPAAKRVKLDGGDKKYSIGLDIGTNSVGWAVITDEYKVPSKKFKVLGNTDRHSIKKNLIGALLFDSGETAEATRLKRTARRRYTRRKNRICYLQEIFSNEMAKVDDSFFHRLEESFLVEEDKKHERHPIFGNIVDEVAYHEKYPTIYHLRKKLVDSTDKADLRLIYLALAHMIKFRGHFLIEGDLNPDNSDVDKLFIQLVQTYNQLFEENPINASGVDAKAILSARLSKSRRLENLIAQLPGEKKNGLFGNLIALSLGLTPNFKSNFDLAEDAKLQLSKDTYDDDLDNLLAQIGDQYADLFLAAKNLSDAILLSDILRVNTEITKAPLSASMIKRYDEHHQDLTLLKALVRQQLPEKYKEIFFDQSKNGYAGYIDGGASQEEFYKFIKPILEKMDGTEELLVKLNREDLLRKQRTFDNGSIPHQIHLGELHAILRRQEDFYPFLKDNREKIEKILTFRIPYYVGPLARGNSRFAWMTRKSEETITPWNFEEVVDKGASAQSFIERMTNFDKNLPNEKVLPKHSLLYEYFTVYNELTKVKYVTEGMRKPAFLSGEQKKAIVDLLFKTNRKVTVKQLKEDYFKKIECFDSVEISGVEDRFNASLGTYHDLLKIIKDKDFLDNEENEDILEDIVLTLTLFEDREMIEERLKTYAHLFDDKVMKQLKRRRYTGWGRLSRKLINGIRDKQSGKTILDFLKSDGFANRNFMQLIHDDSLTFKEDIQKAQVSGQGDSLHEHIANLAGSPAIKKGILQTVKVVDELVKVMGRHKPENIVIEMARENQTTQKGQKNSRERMKRIEEGIKELGSQILKEHPVENTQLQNEKLYLYYLQNGRDMYVDQELDINRLSDYDVDHIVPQSFLKDDSIDNKVLTRSDKARGKSDNVPSEEVVKKMKNYWRQLLNAKLITQRKFDNLTKAERGGLSELDKAGFIKRQLVETRQITKHVAQILDSRMNTKYDENDKLIREVKVITLKSKLVSDFRKDFQFYKVREINNYHHAHDAYLNAVVGTALIKKYPKLESEFVYGDYKVYDVRKMIAKSEQEIGKATAKYFFYSNIMNFFKTEITLANGEIRKRPLIETNGETGEIVWDKGRDFATVRKVLSMPQVNIVKKTEVQTGGFSKESILPKRNSDKLIARKKDWDPKKYGGFDSPTVAYSVLVVAKVEKGKSKKLKSVKELLGITIMERSSFEKNPIDFLEAKGYKEVKKDLIIKLPKYSLFELENGRKRMLASAGELQKGNELALPSKYVNFLYLASHYEKLKGSPEDNEQKQLFVEQHKHYLDEIIEQISEFSKRVILADANLDKVLSAYNKHRDKPIREQAENIIHLFTLTNLGAPAAFKYFDTTIDRKRYTSTKEVLDATLIHQSITGLYETRIDLSQLGGDGGGGSEAAAKGGGGGTAPLEEEYRLFLEAPIQNVTLLEQWKREIPKVWAEINPPGLASTQAPIHVQLLSTALPVRVRQYPITLEAKRSLRETIRKFRAAGILRPVHSPWNTPLLPVRKSGTSEYRMVQDLREVNKRVETIHPTVPNPYTLLSLLPPDRIWYSVLDLKDAFFCIPLAPESQLIFAFEWADAEEGESGQLTWTRLPQGFKNSPTLFDEALNRDLQGFRLDHPSVSLLQYVDDLLIAADTQAACLSATRDLLMTLAELGYRVSGKKAQLCQEEVTYLGFKIHKGSRSLSNSRTQAILQIPVPKTKRQVREFLGTIGYCRLWIPGFAELAQPLYAATRGGNDPLVWGEKEEEAFQSLKLALTQPPALALPSLDKPFQLFVEETSGAAKGVLTQALGPWKRPVAYLSKRLDPVAAGWPRCLRAIAAAALLTREASKLTFGQDIEITSSHNLESLLRSPPDKWLTNARITQYQVLLLDPPRVRFKQTAALNPATLLPETDDTLPIHHCLDTLDSLTSTRPDLTDQPLAQAEATLFTDGSSYIRDGKRYAGAAVVTLDSVIWAEPLPIGTSAQKAELIALTKALEWSKDKSVNIYTDSRYAFATLHVHGMIYRERGLLTAGGKAIKNAPEILALLTAVWLPKRVAVMHCKGHQKDDAPTSTGNRRADEVAREVAIRPLSTQATISAGKRTADGSEFEKRTADGSEFESPKKKAKVE

SEQ ID NO: 7 - protein, 2093 aa, synthetic construct
MPAAKRVKLDGGDKKYSIGLDIGTNSVGWAVITDEYKVPSKKFKVLGNTDRHSIKKNLIGALLFDSGETAEATRLKRTARRRYTRRKNRICYLQEIFSNEMAKVDDSFFHRLEESFLVEEDKKHERHPIFGNIVDEVAYHEKYPTIYHLRKKLVDSTDKADLRLIYLALAHMIKFRGHFLIEGDLNPDNSDVDKLFIQLVQTYNQLFEENPINASGVDAKAILSARLSKSRRLENLIAQLPGEKKNGLFGNLIALSLGLTPNFKSNFDLAEDAKLQLSKDTYDDDLDNLLAQIGDQYADLFLAAKNLSDAILLSDILRVNTEITKAPLSASMIKRYDEHHQDLTLLKALVRQQLPEKYKEIFFDQSKNGYAGYIDGGASQEEFYKFIKPILEKMDGTEELLVKLNREDLLRKQRTFDNGSIPHQIHLGELHAILRRQEDFYPFLKDNREKIEKILTFRIPYYVGPLARGNSRFAWMTRKSEETITPWNFEEVVDKGASAQSFIERMTNFDKNLPNEKVLPKHSLLYEYFTVYNELTKVKYVTEGMRKPAFLSGEQKKAIVDLLFKTNRKVTVKQLKEDYFKKIECFDSVEISGVEDRFNASLGTYHDLLKIIKDKDFLDNEENEDILEDIVLTLTLFEDREMIEERLKTYAHLFDDKVMKQLKRRRYTGWGRLSRKLINGIRDKQSGKTILDFLKSDGFANRNFMQLIHDDSLTFKEDIQKAQVSGQGDSLHEHIANLAGSPAIKKGILQTVKVVDELVKVMGRHKPENIVIEMARENQTTQKGQKNSRERMKRIEEGIKELGSQILKEHPVENTQLQNEKLYLYYLQNGRDMYVDQELDINRLSDYDVDHIVPQSFLKDDSIDNKVLTRSDKARGKSDNVPSEEVVKKMKNYWRQLLNAKLITQRKFDNLTKAERGGLSELDKAGFIKRQLVETRQITKHVAQILDSRMNTKYDENDKLIREVKVITLKSKLVSDFRKDFQFYKVREINNYHHAHDAYLNAVVGTALIKKYPKLESEFVYGDYKVYDVRKMIAKSEQEIGKATAKYFFYSNIMNFFKTEITLANGEIRKRPLIETNGETGEIVWDKGRDFATVRKVLSMPQVNIVKKTEVQTGGFSKESILPKRNSDKLIARKKDWDPKKYGGFDSPTVAYSVLVVAKVEKGKSKKLKSVKELLGITIMERSSFEKNPIDFLEAKGYKEVKKDLIIKLPKYSLFELENGRKRMLASAGELQKGNELALPSKYVNFLYLASHYEKLKGSPEDNEQKQLFVEQHKHYLDEIIEQISEFSKRVILADANLDKVLSAYNKHRDKPIREQAENIIHLFTLTNLGAPAAFKYFDTTIDRKRYTSTKEVLDATLIHQSITGLYETRIDLSQLGGDGGGGSGSSGGTAPLEEEYRLFLEAPIQNVTLLEQWKREIPKVWAEINPPGLASTQAPIHVQLLSTALPVRVRQYPITLEAKRSLRETIRKFRAAGILRPVHSPWNTPLLPVRKSGTSEYRMVQDLREVNKRVETIHPTVPNPYTLLSLLPPDRIWYSVLDLKDAFFCIPLAPESQLIFAFEWADAEEGESGQLTWTRLPQGFKNSPTLFDEALNRDLQGFRLDHPSVSLLQYVDDLLIAADTQAACLSATRDLLMTLAELGYRVSGKKAQLCQEEVTYLGFKIHKGSRSLSNSRTQAILQIPVPKTKRQVREFLGTIGYCRLWIPGFAELAQPLYAATRGGNDPLVWGEKEEEAFQSLKLALTQPPALALPSLDKPFQLFVEETSGAAKGVLTQALGPWKRPVAYLSKRLDPVAAGWPRCLRAIAAAALLTREASKLTFGQDIEITSSHNLESLLRSPPDKWLTNARITQYQVLLLDPPRVRFKQTAALNPATLLPETDDTLPIHHCLDTLDSLTSTRPDLTDQPLAQAEATLFTDGSSYIRDGKRYAGAAVVTLDSVIWAEPLPIGTSAQKAELIALTKALEWSKDKSVNIYTDSRYAFATLHVHGMIYRERGLLTAGGKAIKNAPEILALLTAVWLPKRVAVMHCKGHQKDDAPTSTGNRRADEVAREVAIRPLSTQATISAGKRTADGSEFEKRTADGSEFESPKKKAKVE

SEQ ID NO: 8 - protein, 2093 aa, synthetic construct
MPAAKRVKLDGGDKKYSIGLDIGTNSVGWAVITDEYKVPSKKFKVLGNTDRHSIKKNLIGALLFDSGETAEATRLKRTARRRYTRRKNRICYLQEIFSNEMAKVDDSFFHRLEESFLVEEDKKHERHPIFGNIVDEVAYHEKYPTIYHLRKKLVDSTDKADLRLIYLALAHMIKFRGHFLIEGDLNPDNSDVDKLFIQLVQTYNQLFEENPINASGVDAKAILSARLSKSRRLENLIAQLPGEKKNGLFGNLIALSLGLTPNFKSNFDLAEDAKLQLSKDTYDDDLDNLLAQIGDQYADLFLAAKNLSDAILLSDILRVNTEITKAPLSASMIKRYDEHHQDLTLLKALVRQQLPEKYKEIFFDQSKNGYAGYIDGGASQEEFYKFIKPILEKMDGTEELLVKLNREDLLRKQRTFDNGSIPHQIHLGELHAILRRQEDFYPFLKDNREKIEKILTFRIPYYVGPLARGNSRFAWMTRKSEETITPWNFEEVVDKGASAQSFIERMTNFDKNLPNEKVLPKHSLLYEYFTVYNELTKVKYVTEGMRKPAFLSGEQKKAIVDLLFKTNRKVTVKQLKEDYFKKIECFDSVEISGVEDRFNASLGTYHDLLKIIKDKDFLDNEENEDILEDIVLTLTLFEDREMIEERLKTYAHLFDDKVMKQLKRRRYTGWGRLSRKLINGIRDKQSGKTILDFLKSDGFANRNFMQLIHDDSLTFKEDIQKAQVSGQGDSLHEHIANLAGSPAIKKGILQTVKVVDELVKVMGRHKPENIVIEMARENQTTQKGQKNSRERMKRIEEGIKELGSQILKEHPVENTQLQNEKLYLYYLQNGRDMYVDQELDINRLSDYDVDHIVPQSFLKDDSIDNKVLTRSDKARGKSDNVPSEEVVKKMKNYWRQLLNAKLITQRKFDNLTKAERGGLSELDKAGFIKRQLVETRQITKHVAQILDSRMNTKYDENDKLIREVKVITLKSKLVSDFRKDFQFYKVREINNYHHAHDAYLNAVVGTALIKKYPKLESEFVYGDYKVYDVRKMIAKSEQEIGKATAKYFFYSNIMNFFKTEITLANGEIRKRPLIETNGETGEIVWDKGRDFATVRKVLSMPQVNIVKKTEVQTGGFSKESILPKRNSDKLIARKKDWDPKKYGGFDSPTVAYSVLVVAKVEKGKSKKLKSVKELLGITIMERSSFEKNPIDFLEAKGYKEVKKDLIIKLPKYSLFELENGRKRMLASAGELQKGNELALPSKYVNFLYLASHYEKLKGSPEDNEQKQLFVEQHKHYLDEIIEQISEFSKRVILADANLDKVLSAYNKHRDKPIREQAENIIHLFTLTNLGAPAAFKYFDTTIDRKRYTSTKEVLDATLIHQSITGLYETRIDLSQLGGDGGGGSPAPGGTAPLEEEYRLFLEAPIQNVTLLEQWKREIPKVWAEINPPGLASTQAPIHVQLLSTALPVRVRQYPITLEAKRSLRETIRKFRAAGILRPVHSPWNTPLLPVRKSGTSEYRMVQDLREVNKRVETIHPTVPNPYTLLSLLPPDRIWYSVLDLKDAFFCIPLAPESQLIFAFEWADAEEGESGQLTWTRLPQGFKNSPTLFDEALNRDLQGFRLDHPSVSLLQYVDDLLIAADTQAACLSATRDLLMTLAELGYRVSGKKAQLCQEEVTYLGFKIHKGSRSLSNSRTQAILQIPVPKTKRQVREFLGTIGYCRLWIPGFAELAQPLYAATRGGNDPLVWGEKEEEAFQSLKLALTQPPALALPSLDKPFQLFVEETSGAAKGVLTQALGPWKRPVAYLSKRLDPVAAGWPRCLRAIAAAALLTREASKLTFGQDIEITSSHNLESLLRSPPDKWLTNARITQYQVLLLDPPRVRFKQTAALNPATLLPETDDTLPIHHCLDTLDSLTSTRPDLTDQPLAQAEATLFTDGSSYIRDGKRYAGAAVVTLDSVIWAEPLPIGTSAQKAELIALTKALEWSKDKSVNIYTDSRYAFATLHVHGMIYRERGLLTAGGKAIKNAPEILALLTAVWLPKRVAVMHCKGHQKDDAPTSTGNRRADEVAREVAIRPLSTQATISAGKRTADGSEFEKRTADGSEFESPKKKAKVE

SEQ ID NO: 9 - protein, 2097 aa, synthetic construct
MPAAKRVKLDGGDKKYSIGLDIGTNSVGWAVITDEYKVPSKKFKVLGNTDRHSIKKNLIGALLFDSGETAEATRLKRTARRRYTRRKNRICYLQEIFSNEMAKVDDSFFHRLEESFLVEEDKKHERHPIFGNIVDEVAYHEKYPTIYHLRKKLVDSTDKADLRLIYLALAHMIKFRGHFLIEGDLNPDNSDVDKLFIQLVQTYNQLFEENPINASGVDAKAILSARLSKSRRLENLIAQLPGEKKNGLFGNLIALSLGLTPNFKSNFDLAEDAKLQLSKDTYDDDLDNLLAQIGDQYADLFLAAKNLSDAILLSDILRVNTEITKAPLSASMIKRYDEHHQDLTLLKALVRQQLPEKYKEIFFDQSKNGYAGYIDGGASQEEFYKFIKPILEKMDGTEELLVKLNREDLLRKQRTFDNGSIPHQIHLGELHAILRRQEDFYPFLKDNREKIEKILTFRIPYYVGPLARGNSRFAWMTRKSEETITPWNFEEVVDKGASAQSFIERMTNFDKNLPNEKVLPKHSLLYEYFTVYNELTKVKYVTEGMRKPAFLSGEQKKAIVDLLFKTNRKVTVKQLKEDYFKKIECFDSVEISGVEDRFNASLGTYHDLLKIIKDKDFLDNEENEDILEDIVLTLTLFEDREMIEERLKTYAHLFDDKVMKQLKRRRYTGWGRLSRKLINGIRDKQSGKTILDFLKSDGFANRNFMQLIHDDSLTFKEDIQKAQVSGQGDSLHEHIANLAGSPAIKKGILQTVKVVDELVKVMGRHKPENIVIEMARENQTTQKGQKNSRERMKRIEEGIKELGSQILKEHPVENTQLQNEKLYLYYLQNGRDMYVDQELDINRLSDYDVDHIVPQSFLKDDSIDNKVLTRSDKARGKSDNVPSEEVVKKMKNYWRQLLNAKLITQRKFDNLTKAERGGLSELDKAGFIKRQLVETRQITKHVAQILDSRMNTKYDENDKLIREVKVITLKSKLVSDFRKDFQFYKVREINNYHHAHDAYLNAVVGTALIKKYPKLESEFVYGDYKVYDVRKMIAKSEQEIGKATAKYFFYSNIMNFFKTEITLANGEIRKRPLIETNGETGEIVWDKGRDFATVRKVLSMPQVNIVKKTEVQTGGFSKESILPKRNSDKLIARKKDWDPKKYGGFDSPTVAYSVLVVAKVEKGKSKKLKSVKELLGITIMERSSFEKNPIDFLEAKGYKEVKKDLIIKLPKYSLFELENGRKRMLASAGELQKGNELALPSKYVNFLYLASHYEKLKGSPEDNEQKQLFVEQHKHYLDEIIEQISEFSKRVILADANLDKVLSAYNKHRDKPIREQAENIIHLFTLTNLGAPAAFKYFDTTIDRKRYTSTKEVLDATLIHQSITGLYETRIDLSQLGGDGGGGGGSGGGGSGGTAPLEEEYRLFLEAPIQNVTLLEQWKREIPKVWAEINPPGLASTQAPIHVQLLSTALPVRVRQYPITLEAKRSLRETIRKFRAAGILRPVHSPWNTPLLPVRKSGTSEYRMVQDLREVNKRVETIHPTVPNPYTLLSLLPPDRIWYSVLDLKDAFFCIPLAPESQLIFAFEWADAEEGESGQLTWTRLPQGFKNSPTLFDEALNRDLQGFRLDHPSVSLLQYVDDLLIAADTQAACLSATRDLLMTLAELGYRVSGKKAQLCQEEVTYLGFKIHKGSRSLSNSRTQAILQIPVPKTKRQVREFLGTIGYCRLWIPGFAELAQPLYAATRGGNDPLVWGEKEEEAFQSLKLALTQPPALALPSLDKPFQLFVEETSGAAKGVLTQALGPWKRPVAYLSKRLDPVAAGWPRCLRAIAAAALLTREASKLTFGQDIEITSSHNLESLLRSPPDKWLTNARITQYQVLLLDPPRVRFKQTAALNPATLLPETDDTLPIHHCLDTLDSLTSTRPDLTDQPLAQAEATLFTDGSSYIRDGKRYAGAAVVTLDSVIWAEPLPIGTSAQKAELIALTKALEWSKDKSVNIYTDSRYAFATLHVHGMIYRERGLLTAGGKAIKNAPEILALLTAVWLPKRVAVMHCKGHQKDDAPTSTGNRRADEVAREVAIRPLSTQATISAGKRTADGSEFEKRTADGSEFESPKKKAKVE

SEQ ID NO: 10 - protein, 2097 aa, synthetic construct
MPAAKRVKLDGGDKKYSIGLDIGTNSVGWAVITDEYKVPSKKFKVLGNTDRHSIKKNLIGALLFDSGETAEATRLKRTARRRYTRRKNRICYLQEIFSNEMAKVDDSFFHRLEESFLVEEDKKHERHPIFGNIVDEVAYHEKYPTIYHLRKKLVDSTDKADLRLIYLALAHMIKFRGHFLIEGDLNPDNSDVDKLFIQLVQTYNQLFEENPINASGVDAKAILSARLSKSRRLENLIAQLPGEKKNGLFGNLIALSLGLTPNFKSNFDLAEDAKLQLSKDTYDDDLDNLLAQIGDQYADLFLAAKNLSDAILLSDILRVNTEITKAPLSASMIKRYDEHHQDLTLLKALVRQQLPEKYKEIFFDQSKNGYAGYIDGGASQEEFYKFIKPILEKMDGTEELLVKLNREDLLRKQRTFDNGSIPHQIHLGELHAILRRQEDFYPFLKDNREKIEKILTFRIPYYVGPLARGNSRFAWMTRKSEETITPWNFEEVVDKGASAQSFIERMTNFDKNLPNEKVLPKHSLLYEYFTVYNELTKVKYVTEGMRKPAFLSGEQKKAIVDLLFKTNRKVTVKQLKEDYFKKIECFDSVEISGVEDRFNASLGTYHDLLKIIKDKDFLDNEENEDILEDIVLTLTLFEDREMIEERLKTYAHLFDDKVMKQLKRRRYTGWGRLSRKLINGIRDKQSGKTILDFLKSDGFANRNFMQLIHDDSLTFKEDIQKAQVSGQGDSLHEHIANLAGSPAIKKGILQTVKVVDELVKVMGRHKPENIVIEMARENQTTQKGQKNSRERMKRIEEGIKELGSQILKEHPVENTQLQNEKLYLYYLQNGRDMYVDQELDINRLSDYDVDHIVPQSFLKDDSIDNKVLTRSDKARGKSDNVPSEEVVKKMKNYWRQLLNAKLITQRKFDNLTKAERGGLSELDKAGFIKRQLVETRQITKHVAQILDSRMNTKYDENDKLIREVKVITLKSKLVSDFRKDFQFYKVREINNYHHAHDAYLNAVVGTALIKKYPKLESEFVYGDYKVYDVRKMIAKSEQEIGKATAKYFFYSNIMNFFKTEITLANGEIRKRPLIETNGETGEIVWDKGRDFATVRKVLSMPQVNIVKKTEVQTGGFSKESILPKRNSDKLIARKKDWDPKKYGGFDSPTVAYSVLVVAKVEKGKSKKLKSVKELLGITIMERSSFEKNPIDFLEAKGYKEVKKDLIIKLPKYSLFELENGRKRMLASAGELQKGNELALPSKYVNFLYLASHYEKLKGSPEDNEQKQLFVEQHKHYLDEIIEQISEFSKRVILADANLDKVLSAYNKHRDKPIREQAENIIHLFTLTNLGAPAAFKYFDTTIDRKRYTSTKEVLDATLIHQSITGLYETRIDLSQLGGDGGEAAAKEAAAKGGTAPLEEEYRLFLEAPIQNVTLLEQWKREIPKVWAEINPPGLASTQAPIHVQLLSTALPVRVRQYPITLEAKRSLRETIRKFRAAGILRPVHSPWNTPLLPVRKSGTSEYRMVQDLREVNKRVETIHPTVPNPYTLLSLLPPDRIWYSVLDLKDAFFCIPLAPESQLIFAFEWADAEEGESGQLTWTRLPQGFKNSPTLFDEALNRDLQGFRLDHPSVSLLQYVDDLLIAADTQAACLSATRDLLMTLAELGYRVSGKKAQLCQEEVTYLGFKIHKGSRSLSNSRTQAILQIPVPKTKRQVREFLGTIGYCRLWIPGFAELAQPLYAATRGGNDPLVWGEKEEEAFQSLKLALTQPPALALPSLDKPFQLFVEETSGAAKGVLTQALGPWKRPVAYLSKRLDPVAAGWPRCLRAIAAAALLTREASKLTFGQDIEITSSHNLESLLRSPPDKWLTNARITQYQVLLLDPPRVRFKQTAALNPATLLPETDDTLPIHHCLDTLDSLTSTRPDLTDQPLAQAEATLFTDGSSYIRDGKRYAGAAVVTLDSVIWAEPLPIGTSAQKAELIALTKALEWSKDKSVNIYTDSRYAFATLHVHGMIYRERGLLTAGGKAIKNAPEILALLTAVWLPKRVAVMHCKGHQKDDAPTSTGNRRADEVAREVAIRPLSTQATISAGKRTADGSEFEKRTADGSEFESPKKKAKVE

SEQ ID NO: 11 - protein, 2098 aa, synthetic construct
MPAAKRVKLDGGDKKYSIGLDIGTNSVGWAVITDEYKVPSKKFKVLGNTDRHSIKKNLIGALLFDSGETAEATRLKRTARRRYTRRKNRICYLQEIFSNEMAKVDDSFFHRLEESFLVEEDKKHERHPIFGNIVDEVAYHEKYPTIYHLRKKLVDSTDKADLRLIYLALAHMIKFRGHFLIEGDLNPDNSDVDKLFIQLVQTYNQLFEENPINASGVDAKAILSARLSKSRRLENLIAQLPGEKKNGLFGNLIALSLGLTPNFKSNFDLAEDAKLQLSKDTYDDDLDNLLAQIGDQYADLFLAAKNLSDAILLSDILRVNTEITKAPLSASMIKRYDEHHQDLTLLKALVRQQLPEKYKEIFFDQSKNGYAGYIDGGASQEEFYKFIKPILEKMDGTEELLVKLNREDLLRKQRTFDNGSIPHQIHLGELHAILRRQEDFYPFLKDNREKIEKILTFRIPYYVGPLARGNSRFAWMTRKSEETITPWNFEEVVDKGASAQSFIERMTNFDKNLPNEKVLPKHSLLYEYFTVYNELTKVKYVTEGMRKPAFLSGEQKKAIVDLLFKTNRKVTVKQLKEDYFKKIECFDSVEISGVEDRFNASLGTYHDLLKIIKDKDFLDNEENEDILEDIVLTLTLFEDREMIEERLKTYAHLFDDKVMKQLKRRRYTGWGRLSRKLINGIRDKQSGKTILDFLKSDGFANRNFMQLIHDDSLTFKEDIQKAQVSGQGDSLHEHIANLAGSPAIKKGILQTVKVVDELVKVMGRHKPENIVIEMARENQTTQKGQKNSRERMKRIEEGIKELGSQILKEHPVENTQLQNEKLYLYYLQNGRDMYVDQELDINRLSDYDVDHIVPQSFLKDDSIDNKVLTRSDKARGKSDNVPSEEVVKKMKNYWRQLLNAKLITQRKFDNLTKAERGGLSELDKAGFIKRQLVETRQITKHVAQILDSRMNTKYDENDKLIREVKVITLKSKLVSDFRKDFQFYKVREINNYHHAHDAYLNAVVGTALIKKYPKLESEFVYGDYKVYDVRKMIAKSEQEIGKATAKYFFYSNIMNFFKTEITLANGEIRKRPLIETNGETGEIVWDKGRDFATVRKVLSMPQVNIVKKTEVQTGGFSKESILPKRNSDKLIARKKDWDPKKYGGFDSPTVAYSVLVVAKVEKGKSKKLKSVKELLGITIMERSSFEKNPIDFLEAKGYKEVKKDLIIKLPKYSLFELENGRKRMLASAGELQKGNELALPSKYVNFLYLASHYEKLKGSPEDNEQKQLFVEQHKHYLDEIIEQISEFSKRVILADANLDKVLSAYNKHRDKPIREQAENIIHLFTLTNLGAPAAFKYFDTTIDRKRYTSTKEVLDATLIHQSITGLYETRIDLSQLGGDGGGGSEAAAKPAPGGTAPLEEEYRLFLEAPIQNVTLLEQWKREIPKVWAEINPPGLASTQAPIHVQLLSTALPVRVRQYPITLEAKRSLRETIRKFRAAGILRPVHSPWNTPLLPVRKSGTSEYRMVQDLREVNKRVETIHPTVPNPYTLLSLLPPDRIWYSVLDLKDAFFCIPLAPESQLIFAFEWADAEEGESGQLTWTRLPQGFKNSPTLFDEALNRDLQGFRLDHPSVSLLQYVDDLLIAADTQAACLSATRDLLMTLAELGYRVSGKKAQLCQEEVTYLGFKIHKGSRSLSNSRTQAILQIPVPKTKRQVREFLGTIGYCRLWIPGFAELAQPLYAATRGGNDPLVWGEKEEEAFQSLKLALTQPPALALPSLDKPFQLFVEETSGAAKGVLTQALGPWKRPVAYLSKRLDPVAAGWPRCLRAIAAAALLTREASKLTFGQDIEITSSHNLESLLRSPPDKWLTNARITQYQVLLLDPPRVRFKQTAALNPATLLPETDDTLPIHHCLDTLDSLTSTRPDLTDQPLAQAEATLFTDGSSYIRDGKRYAGAAVVTLDSVIWAEPLPIGTSAQKAELIALTKALEWSKDKSVNIYTDSRYAFATLHVHGMIYRERGLLTAGGKAIKNAPEILALLTAVWLPKRVAVMHCKGHQKDDAPTSTGNRRADEVAREVAIRPLSTQATISAGKRTADGSEFEKRTADGSEFESPKKKAKVE

SEQ ID NO: 12 - protein, 2093 aa, synthetic construct
MPAAKRVKLDGGDKKYSIGLDIGTNSVGWAVITDEYKVPSKKFKVLGNTDRHSIKKNLIGALLFDSGETAEATRLKRTARRRYTRRKNRICYLQEIFSNEMAKVDDSFFHRLEESFLVEEDKKHERHPIFGNIVDEVAYHEKYPTIYHLRKKLVDSTDKADLRLIYLALAHMIKFRGHFLIEGDLNPDNSDVDKLFIQLVQTYNQLFEENPINASGVDAKAILSARLSKSRRLENLIAQLPGEKKNGLFGNLIALSLGLTPNFKSNFDLAEDAKLQLSKDTYDDDLDNLLAQIGDQYADLFLAAKNLSDAILLSDILRVNTEITKAPLSASMIKRYDEHHQDLTLLKALVRQQLPEKYKEIFFDQSKNGYAGYIDGGASQEEFYKFIKPILEKMDGTEELLVKLNREDLLRKQRTFDNGSIPHQIHLGELHAILRRQEDFYPFLKDNREKIEKILTFRIPYYVGPLARGNSRFAWMTRKSEETITPWNFEEVVDKGASAQSFIERMTNFDKNLPNEKVLPKHSLLYEYFTVYNELTKVKYVTEGMRKPAFLSGEQKKAIVDLLFKTNRKVTVKQLKEDYFKKIECFDSVEISGVEDRFNASLGTYHDLLKIIKDKDFLDNEENEDILEDIVLTLTLFEDREMIEERLKTYAHLFDDKVMKQLKRRRYTGWGRLSRKLINGIRDKQSGKTILDFLKSDGFANRNFMQLIHDDSLTFKEDIQKAQVSGQGDSLHEHIANLAGSPAIKKGILQTVKVVDELVKVMGRHKPENIVIEMARENQTTQKGQKNSRERMKRIEEGIKELGSQILKEHPVENTQLQNEKLYLYYLQNGRDMYVDQELDINRLSDYDVDHIVPQSFLKDDSIDNKVLTRSDKARGKSDNVPSEEVVKKMKNYWRQLLNAKLITQRKFDNLTKAERGGLSELDKAGFIKRQLVETRQITKHVAQILDSRMNTKYDENDKLIREVKVITLKSKLVSDFRKDFQFYKVREINNYHHAHDAYLNAVVGTALIKKYPKLESEFVYGDYKVYDVRKMIAKSEQEIGKATAKYFFYSNIMNFFKTEITLANGEIRKRPLIETNGETGEIVWDKGRDFATVRKVLSMPQVNIVKKTEVQTGGFSKESILPKRNSDKLIARKKDWDPKKYGGFDSPTVAYSVLVVAKVEKGKSKKLKSVKELLGITIMERSSFEKNPIDFLEAKGYKEVKKDLIIKLPKYSLFELENGRKRMLASAGELQKGNELALPSKYVNFLYLASHYEKLKGSPEDNEQKQLFVEQHKHYLDEIIEQISEFSKRVILADANLDKVLSAYNKHRDKPIREQAENIIHLFTLTNLGAPAAFKYFDTTIDRKRYTSTKEVLDATLIHQSITGLYETRIDLSQLGGDGGGGSGGGGGTAPLEEEYRLFLEAPIQNVTLLEQWKREIPKVWAEINPPGLASTQAPIHVQLLSTALPVRVRQYPITLEAKRSLRETIRKFRAAGILRPVHSPWNTPLLPVRKSGTSEYRMVQDLREVNKRVETIHPTVPNPYTLLSLLPPDRIWYSVLDLKDAFFCIPLAPESQLIFAFEWADAEEGESGQLTWTRLPQGFKNSPTLFDEALNRDLQGFRLDHPSVSLLQYVDDLLIAADTQAACLSATRDLLMTLAELGYRVSGKKAQLCQEEVTYLGFKIHKGSRSLSNSRTQAILQIPVPKTKRQVREFLGTIGYCRLWIPGFAELAQPLYAATRGGNDPLVWGEKEEEAFQSLKLALTQPPALALPSLDKPFQLFVEETSGAAKGVLTQALGPWKRPVAYLSKRLDPVAAGWPRCLRAIAAAALLTREASKLTFGQDIEITSSHNLESLLRSPPDKWLTNARITQYQVLLLDPPRVRFKQTAALNPATLLPETDDTLPIHHCLDTLDSLTSTRPDLTDQPLAQAEATLFTDGSSYIRDGKRYAGAAVVTLDSVIWAEPLPIGTSAQKAELIALTKALEWSKDKSVNIYTDSRYAFATLHVHGMIYRERGLLTAGGKAIKNAPEILALLTAVWLPKRVAVMHCKGHQKDDAPTSTGNRRADEVAREVAIRPLSTQATISAGKRTADGSEFEKRTADGSEFESPKKKAKVE

SEQ ID NO: 13 - protein, 2103 aa, synthetic construct
MPAAKRVKLDGGDKKYSIGLDIGTNSVGWAVITDEYKVPSKKFKVLGNTDRHSIKKNLIGALLFDSGETAEATRLKRTARRRYTRRKNRICYLQEIFSNEMAKVDDSFFHRLEESFLVEEDKKHERHPIFGNIVDEVAYHEKYPTIYHLRKKLVDSTDKADLRLIYLALAHMIKFRGHFLIEGDLNPDNSDVDKLFIQLVQTYNQLFEENPINASGVDAKAILSARLSKSRRLENLIAQLPGEKKNGLFGNLIALSLGLTPNFKSNFDLAEDAKLQLSKDTYDDDLDNLLAQIGDQYADLFLAAKNLSDAILLSDILRVNTEITKAPLSASMIKRYDEHHQDLTLLKALVRQQLPEKYKEIFFDQSKNGYAGYIDGGASQEEFYKFIKPILEKMDGTEELLVKLNREDLLRKQRTFDNGSIPHQIHLGELHAILRRQEDFYPFLKDNREKIEKILTFRIPYYVGPLARGNSRFAWMTRKSEETITPWNFEEVVDKGASAQSFIERMTNFDKNLPNEKVLPKHSLLYEYFTVYNELTKVKYVTEGMRKPAFLSGEQKKAIVDLLFKTNRKVTVKQLKEDYFKKIECFDSVEISGVEDRFNASLGTYHDLLKIIKDKDFLDNEENEDILEDIVLTLTLFEDREMIEERLKTYAHLFDDKVMKQLKRRRYTGWGRLSRKLINGIRDKQSGKTILDFLKSDGFANRNFMQLIHDDSLTFKEDIQKAQVSGQGDSLHEHIANLAGSPAIKKGILQTVKVVDELVKVMGRHKPENIVIEMARENQTTQKGQKNSRERMKRIEEGIKELGSQILKEHPVENTQLQNEKLYLYYLQNGRDMYVDQELDINRLSDYDVDHIVPQSFLKDDSIDNKVLTRSDKARGKSDNVPSEEVVKKMKNYWRQLLNAKLITQRKFDNLTKAERGGLSELDKAGFIKRQLVETRQITKHVAQILDSRMNTKYDENDKLIREVKVITLKSKLVSDFRKDFQFYKVREINNYHHAHDAYLNAVVGTALIKKYPKLESEFVYGDYKVYDVRKMIAKSEQEIGKATAKYFFYSNIMNFFKTEITLANGEIRKRPLIETNGETGEIVWDKGRDFATVRKVLSMPQVNIVKKTEVQTGGFSKESILPKRNSDKLIARKKDWDPKKYGGFDSPTVAYSVLVVAKVEKGKSKKLKSVKELLGITIMERSSFEKNPIDFLEAKGYKEVKKDLIIKLPKYSLFELENGRKRMLASAGELQKGNELALPSKYVNFLYLASHYEKLKGSPEDNEQKQLFVEQHKHYLDEIIEQISEFSKRVILADANLDKVLSAYNKHRDKPIREQAENIIHLFTLTNLGAPAAFKYFDTTIDRKRYTSTKEVLDATLIHQSITGLYETRIDLSQLGGDGGSGSETPGTSESATPESGGTAPLEEEYRLFLEAPIQNVTLLEQWKREIPKVWAEINPPGLASTQAPIHVQLLSTALPVRVRQYPITLEAKRSLRETIRKFRAAGILRPVHSPWNTPLLPVRKSGTSEYRMVQDLREVNKRVETIHPTVPNPYTLLSLLPPDRIWYSVLDLKDAFFCIPLAPESQLIFAFEWADAEEGESGQLTWTRLPQGFKNSPTLFDEALNRDLQGFRLDHPSVSLLQYVDDLLIAADTQAACLSATRDLLMTLAELGYRVSGKKAQLCQEEVTYLGFKIHKGSRSLSNSRTQAILQIPVPKTKRQVREFLGTIGYCRLWIPGFAELAQPLYAATRGGNDPLVWGEKEEEAFQSLKLALTQPPALALPSLDKPFQLFVEETSGAAKGVLTQALGPWKRPVAYLSKRLDPVAAGWPRCLRAIAAAALLTREASKLTFGQDIEITSSHNLESLLRSPPDKWLTNARITQYQVLLLDPPRVRFKQTAALNPATLLPETDDTLPIHHCLDTLDSLTSTRPDLTDQPLAQAEATLFTDGSSYIRDGKRYAGAAVVTLDSVIWAEPLPIGTSAQKAELIALTKALEWSKDKSVNIYTDSRYAFATLHVHGMIYRERGLLTAGGKAIKNAPEILALLTAVWLPKRVAVMHCKGHQKDDAPTSTGNRRADEVAREVAIRPLSTQATISAGKRTADGSEFEKRTADGSEFESPKKKAKVE

SEQ ID NO: 14 - protein, 2099 aa, synthetic construct
MPAAKRVKLDGGDKKYSIGLDIGTNSVGWAVITDEYKVPSKKFKVLGNTDRHSIKKNLIGALLFDSGETAEATRLKRTARRRYTRRKNRICYLQEIFSNEMAKVDDSFFHRLEESFLVEEDKKHERHPIFGNIVDEVAYHEKYPTIYHLRKKLVDSTDKADLRLIYLALAHMIKFRGHFLIEGDLNPDNSDVDKLFIQLVQTYNQLFEENPINASGVDAKAILSARLSKSRRLENLIAQLPGEKKNGLFGNLIALSLGLTPNFKSNFDLAEDAKLQLSKDTYDDDLDNLLAQIGDQYADLFLAAKNLSDAILLSDILRVNTEITKAPLSASMIKRYDEHHQDLTLLKALVRQQLPEKYKEIFFDQSKNGYAGYIDGGASQEEFYKFIKPILEKMDGTEELLVKLNREDLLRKQRTFDNGSIPHQIHLGELHAILRRQEDFYPFLKDNREKIEKILTFRIPYYVGPLARGNSRFAWMTRKSEETITPWNFEEVVDKGASAQSFIERMTNFDKNLPNEKVLPKHSLLYEYFTVYNELTKVKYVTEGMRKPAFLSGEQKKAIVDLLFKTNRKVTVKQLKEDYFKKIECFDSVEISGVEDRFNASLGTYHDLLKIIKDKDFLDNEENEDILEDIVLTLTLFEDREMIEERLKTYAHLFDDKVMKQLKRRRYTGWGRLSRKLINGIRDKQSGKTILDFLKSDGFANRNFMQLIHDDSLTFKEDIQKAQVSGQGDSLHEHIANLAGSPAIKKGILQTVKVVDELVKVMGRHKPENIVIEMARENQTTQKGQKNSRERMKRIEEGIKELGSQILKEHPVENTQLQNEKLYLYYLQNGRDMYVDQELDINRLSDYDVDHIVPQSFLKDDSIDNKVLTRSDKARGKSDNVPSEEVVKKMKNYWRQLLNAKLITQRKFDNLTKAERGGLSELDKAGFIKRQLVETRQITKHVAQILDSRMNTKYDENDKLIREVKVITLKSKLVSDFRKDFQFYKVREINNYHHAHDAYLNAVVGTALIKKYPKLESEFVYGDYKVYDVRKMIAKSEQEIGKATAKYFFYSNIMNFFKTEITLANGEIRKRPLIETNGETGEIVWDKGRDFATVRKVLSMPQVNIVKKTEVQTGGFSKESILPKRNSDKLIARKKDWDPKKYGGFDSPTVAYSVLVVAKVEKGKSKKLKSVKELLGITIMERSSFEKNPIDFLEAKGYKEVKKDLIIKLPKYSLFELENGRKRMLASAGELQKGNELALPSKYVNFLYLASHYEKLKGSPEDNEQKQLFVEQHKHYLDEIIEQISEFSKRVILADANLDKVLSAYNKHRDKPIREQAENIIHLFTLTNLGAPAAFKYFDTTIDRKRYTSTKEVLDATLIHQSITGLYETRIDLSQLGGDGGGSAGSAAGSGEFGGTAPLEEEYRLFLEAPIQNVTLLEQWKREIPKVWAEINPPGLASTQAPIHVQLLSTALPVRVRQYPITLEAKRSLRETIRKFRAAGILRPVHSPWNTPLLPVRKSGTSEYRMVQDLREVNKRVETIHPTVPNPYTLLSLLPPDRIWYSVLDLKDAFFCIPLAPESQLIFAFEWADAEEGESGQLTWTRLPQGFKNSPTLFDEALNRDLQGFRLDHPSVSLLQYVDDLLIAADTQAACLSATRDLLMTLAELGYRVSGKKAQLCQEEVTYLGFKIHKGSRSLSNSRTQAILQIPVPKTKRQVREFLGTIGYCRLWIPGFAELAQPLYAATRGGNDPLVWGEKEEEAFQSLKLALTQPPALALPSLDKPFQLFVEETSGAAKGVLTQALGPWKRPVAYLSKRLDPVAAGWPRCLRAIAAAALLTREASKLTFGQDIEITSSHNLESLLRSPPDKWLTNARITQYQVLLLDPPRVRFKQTAALNPATLLPETDDTLPIHHCLDTLDSLTSTRPDLTDQPLAQAEATLFTDGSSYIRDGKRYAGAAVVTLDSVIWAEPLPIGTSAQKAELIALTKALEWSKDKSVNIYTDSRYAFATLHVHGMIYRERGLLTAGGKAIKNAPEILALLTAVWLPKRVAVMHCKGHQKDDAPTSTGNRRADEVAREVAIRPLSTQATISAGKRTADGSEFEKRTADGSEFESPKKKAKVE

SEQ ID NO: 15 - protein, 2096 aa, synthetic construct
MPAAKRVKLDGGDKKYSIGLDIGTNSVGWAVITDEYKVPSKKFKVLGNTDRHSIKKNLIGALLFDSGETAEATRLKRTARRRYTRRKNRICYLQEIFSNEMAKVDDSFFHRLEESFLVEEDKKHERHPIFGNIVDEVAYHEKYPTIYHLRKKLVDSTDKADLRLIYLALAHMIKFRGHFLIEGDLNPDNSDVDKLFIQLVQTYNQLFEENPINASGVDAKAILSARLSKSRRLENLIAQLPGEKKNGLFGNLIALSLGLTPNFKSNFDLAEDAKLQLSKDTYDDDLDNLLAQIGDQYADLFLAAKNLSDAILLSDILRVNTEITKAPLSASMIKRYDEHHQDLTLLKALVRQQLPEKYKEIFFDQSKNGYAGYIDGGASQEEFYKFIKPILEKMDGTEELLVKLNREDLLRKQRTFDNGSIPHQIHLGELHAILRRQEDFYPFLKDNREKIEKILTFRIPYYVGPLARGNSRFAWMTRKSEETITPWNFEEVVDKGASAQSFIERMTNFDKNLPNEKVLPKHSLLYEYFTVYNELTKVKYVTEGMRKPAFLSGEQKKAIVDLLFKTNRKVTVKQLKEDYFKKIECFDSVEISGVEDRFNASLGTYHDLLKIIKDKDFLDNEENEDILEDIVLTLTLFEDREMIEERLKTYAHLFDDKVMKQLKRRRYTGWGRLSRKLINGIRDKQSGKTILDFLKSDGFANRNFMQLIHDDSLTFKEDIQKAQVSGQGDSLHEHIANLAGSPAIKKGILQTVKVVDELVKVMGRHKPENIVIEMARENQTTQKGQKNSRERMKRIEEGIKELGSQILKEHPVENTQLQNEKLYLYYLQNGRDMYVDQELDINRLSDYDVDHIVPQSFLKDDSIDNKVLTRSDKARGKSDNVPSEEVVKKMKNYWRQLLNAKLITQRKFDNLTKAERGGLSELDKAGFIKRQLVETRQITKHVAQILDSRMNTKYDENDKLIREVKVITLKSKLVSDFRKDFQFYKVREINNYHHAHDAYLNAVVGTALIKKYPKLESEFVYGDYKVYDVRKMIAKSEQEIGKATAKYFFYSNIMNFFKTEITLANGEIRKRPLIETNGETGEIVWDKGRDFATVRKVLSMPQVNIVKKTEVQTGGFSKESILPKRNSDKLIARKKDWDPKKYGGFDSPTVAYSVLVVAKVEKGKSKKLKSVKELLGITIMERSSFEKNPIDFLEAKGYKEVKKDLIIKLPKYSLFELENGRKRMLASAGELQKGNELALPSKYVNFLYLASHYEKLKGSPEDNEQKQLFVEQHKHYLDEIIEQISEFSKRVILADANLDKVLSAYNKHRDKPIREQAENIIHLFTLTNLGAPAAFKYFDTTIDRKRYTSTKEVLDATLIHQSITGLYETRIDLSQLGGDGGGGGPAPGGSGGTAPLEEEYRLFLEAPIQNVTLLEQWKREIPKVWAEINPPGLASTQAPIHVQLLSTALPVRVRQYPITLEAKRSLRETIRKFRAAGILRPVHSPWNTPLLPVRKSGTSEYRMVQDLREVNKRVETIHPTVPNPYTLLSLLPPDRIWYSVLDLKDAFFCIPLAPESQLIFAFEWADAEEGESGQLTWTRLPQGFKNSPTLFDEALNRDLQGFRLDHPSVSLLQYVDDLLIAADTQAACLSATRDLLMTLAELGYRVSGKKAQLCQEEVTYLGFKIHKGSRSLSNSRTQAILQIPVPKTKRQVREFLGTIGYCRLWIPGFAELAQPLYAATRGGNDPLVWGEKEEEAFQSLKLALTQPPALALPSLDKPFQLFVEETSGAAKGVLTQALGPWKRPVAYLSKRLDPVAAGWPRCLRAIAAAALLTREASKLTFGQDIEITSSHNLESLLRSPPDKWLTNARITQYQVLLLDPPRVRFKQTAALNPATLLPETDDTLPIHHCLDTLDSLTSTRPDLTDQPLAQAEATLFTDGSSYIRDGKRYAGAAVVTLDSVIWAEPLPIGTSAQKAELIALTKALEWSKDKSVNIYTDSRYAFATLHVHGMIYRERGLLTAGGKAIKNAPEILALLTAVWLPKRVAVMHCKGHQKDDAPTSTGNRRADEVAREVAIRPLSTQATISAGKRTADGSEFEKRTADGSEFESPKKKAKVE

SEQ ID NO: 16 - protein, 2098 aa, synthetic construct
MPAAKRVKLDGGDKKYSIGLDIGTNSVGWAVITDEYKVPSKKFKVLGNTDRHSIKKNLIGALLFDSGETAEATRLKRTARRRYTRRKNRICYLQEIFSNEMAKVDDSFFHRLEESFLVEEDKKHERHPIFGNIVDEVAYHEKYPTIYHLRKKLVDSTDKADLRLIYLALAHMIKFRGHFLIEGDLNPDNSDVDKLFIQLVQTYNQLFEENPINASGVDAKAILSARLSKSRRLENLIAQLPGEKKNGLFGNLIALSLGLTPNFKSNFDLAEDAKLQLSKDTYDDDLDNLLAQIGDQYADLFLAAKNLSDAILLSDILRVNTEITKAPLSASMIKRYDEHHQDLTLLKALVRQQLPEKYKEIFFDQSKNGYAGYIDGGASQEEFYKFIKPILEKMDGTEELLVKLNREDLLRKQRTFDNGSIPHQIHLGELHAILRRQEDFYPFLKDNREKIEKILTFRIPYYVGPLARGNSRFAWMTRKSEETITPWNFEEVVDKGASAQSFIERMTNFDKNLPNEKVLPKHSLLYEYFTVYNELTKVKYVTEGMRKPAFLSGEQKKAIVDLLFKTNRKVTVKQLKEDYFKKIECFDSVEISGVEDRFNASLGTYHDLLKIIKDKDFLDNEENEDILEDIVLTLTLFEDREMIEERLKTYAHLFDDKVMKQLKRRRYTGWGRLSRKLINGIRDKQSGKTILDFLKSDGFANRNFMQLIHDDSLTFKEDIQKAQVSGQGDSLHEHIANLAGSPAIKKGILQTVKVVDELVKVMGRHKPENIVIEMARENQTTQKGQKNSRERMKRIEEGIKELGSQILKEHPVENTQLQNEKLYLYYLQNGRDMYVDQELDINRLSDYDVDHIVPQSFLKDDSIDNKVLTRSDKARGKSDNVPSEEVVKKMKNYWRQLLNAKLITQRKFDNLTKAERGGLSELDKAGFIKRQLVETRQITKHVAQILDSRMNTKYDENDKLIREVKVITLKSKLVSDFRKDFQFYKVREINNYHHAHDAYLNAVVGTALIKKYPKLESEFVYGDYKVYDVRKMIAKSEQEIGKATAKYFFYSNIMNFFKTEITLANGEIRKRPLIETNGETGEIVWDKGRDFATVRKVLSMPQVNIVKKTEVQTGGFSKESILPKRNSDKLIARKKDWDPKKYGGFDSPTVAYSVLVVAKVEKGKSKKLKSVKELLGITIMERSSFEKNPIDFLEAKGYKEVKKDLIIKLPKYSLFELENGRKRMLASAGELQKGNELALPSKYVNFLYLASHYEKLKGSPEDNEQKQLFVEQHKHYLDEIIEQISEFSKRVILADANLDKVLSAYNKHRDKPIREQAENIIHLFTLTNLGAPAAFKYFDTTIDRKRYTSTKEVLDATLIHQSITGLYETRIDLSQLGGDGGGSSGGGEAAAKGGTAPLEEEYRLFLEAPIQNVTLLEQWKREIPKVWAEINPPGLASTQAPIHVQLLSTALPVRVRQYPITLEAKRSLRETIRKFRAAGILRPVHSPWNTPLLPVRKSGTSEYRMVQDLREVNKRVETIHPTVPNPYTLLSLLPPDRIWYSVLDLKDAFFCIPLAPESQLIFAFEWADAEEGESGQLTWTRLPQGFKNSPTLFDEALNRDLQGFRLDHPSVSLLQYVDDLLIAADTQAACLSATRDLLMTLAELGYRVSGKKAQLCQEEVTYLGFKIHKGSRSLSNSRTQAILQIPVPKTKRQVREFLGTIGYCRLWIPGFAELAQPLYAATRGGNDPLVWGEKEEEAFQSLKLALTQPPALALPSLDKPFQLFVEETSGAAKGVLTQALGPWKRPVAYLSKRLDPVAAGWPRCLRAIAAAALLTREASKLTFGQDIEITSSHNLESLLRSPPDKWLTNARITQYQVLLLDPPRVRFKQTAALNPATLLPETDDTLPIHHCLDTLDSLTSTRPDLTDQPLAQAEATLFTDGSSYIRDGKRYAGAAVVTLDSVIWAEPLPIGTSAQKAELIALTKALEWSKDKSVNIYTDSRYAFATLHVHGMIYRERGLLTAGGKAIKNAPEILALLTAVWLPKRVAVMHCKGHQKDDAPTSTGNRRADEVAREVAIRPLSTQATISAGKRTADGSEFEKRTADGSEFESPKKKAKVE

SEQ ID NO: 17 - protein, 1998 aa, synthetic construct
MPAAKRVKLDGGDKKYSIGLDIGTNSVGWAVITDEYKVPSKKFKVLGNTDRHSIKKNLIGALLFDSGETAEATRLKRTARRRYTRRKNRICYLQEIFSNEMAKVDDSFFHRLEESFLVEEDKKHERHPIFGNIVDEVAYHEKYPTIYHLRKKLVDSTDKADLRLIYLALAHMIKFRGHFLIEGDLNPDNSDVDKLFIQLVQTYNQLFEENPINASGVDAKAILSARLSKSRRLENLIAQLPGEKKNGLFGNLIALSLGLTPNFKSNFDLAEDAKLQLSKDTYDDDLDNLLAQIGDQYADLFLAAKNLSDAILLSDILRVNTEITKAPLSASMIKRYDEHHQDLTLLKALVRQQLPEKYKEIFFDQSKNGYAGYIDGGASQEEFYKFIKPILEKMDGTEELLVKLNREDLLRKQRTFDNGSIPHQIHLGELHAILRRQEDFYPFLKDNREKIEKILTFRIPYYVGPLARGNSRFAWMTRKSEETITPWNFEEVVDKGASAQSFIERMTNFDKNLPNEKVLPKHSLLYEYFTVYNELTKVKYVTEGMRKPAFLSGEQKKAIVDLLFKTNRKVTVKQLKEDYFKKIECFDSVEISGVEDRFNASLGTYHDLLKIIKDKDFLDNEENEDILEDIVLTLTLFEDREMIEERLKTYAHLFDDKVMKQLKRRRYTGWGRLSRKLINGIRDKQSGKTILDFLKSDGFANRNFMQLIHDDSLTFKEDIQKAQVSGQGDSLHEHIANLAGSPAIKKGILQTVKVVDELVKVMGRHKPENIVIEMARENQTTQKGQKNSRERMKRIEEGIKELGSQILKEHPVENTQLQNEKLYLYYLQNGRDMYVDQELDINRLSDYDVDHIVPQSFLKDDSIDNKVLTRSDKARGKSDNVPSEEVVKKMKNYWRQLLNAKLITQRKFDNLTKAERGGLSELDKAGFIKRQLVETRQITKHVAQILDSRMNTKYDENDKLIREVKVITLKSKLVSDFRKDFQFYKVREINNYHHAHDAYLNAVVGTALIKKYPKLESEFVYGDYKVYDVRKMIAKSEQEIGKATAKYFFYSNIMNFFKTEITLANGEIRKRPLIETNGETGEIVWDKGRDFATVRKVLSMPQVNIVKKTEVQTGGFSKESILPKRNSDKLIARKKDWDPKKYGGFDSPTVAYSVLVVAKVEKGKSKKLKSVKELLGITIMERSSFEKNPIDFLEAKGYKEVKKDLIIKLPKYSLFELENGRKRMLASAGELQKGNELALPSKYVNFLYLASHYEKLKGSPEDNEQKQLFVEQHKHYLDEIIEQISEFSKRVILADANLDKVLSAYNKHRDKPIREQAENIIHLFTLTNLGAPAAFKYFDTTIDRKRYTSTKEVLDATLIHQSITGLYETRIDLSQLGGDGGPAPEAAAKGGGVLDTPPSHIGLEHLPPPPEVPQFPLNLERLQALQDLVHRSLEAGYISPWDGPGNNPVFPVRKPNGAWRFVHDLRATNALTKPIPALSPGPPDLTAIPTHPPHIICLDLKDAFFQIPVEDRFRFYLSFTLPSPGGLQPHRRFAWRVLPQGFINSPALFERALQEPLRQVSAAFSQSLLVSYMDDILYASPTEEQRSQCYQALAARLRDLGFQVASEKTSQTPSPVPFLGQMVHEQIVTYQSLPTLQISSPISLHQLQAVLGDLQWVSRGTPTTRRPLQLLYSSLKRHHDPRAIIQLSPEQLQGIAELRQALSHNARSRYNEQEPLLAYVHLTRAGSTLVLFQKGAQFPLAYFQTPLTDNQASPWGLLLLLGCQYLQTQALSSYAKPILKYYHNLPKTSLDNWIQSSEDPRVQELLQLWPQISSQGIQPPGPWKTLITRAEVFLTPQFSPDPIPAALCLFSDGATGRGAYCLWKDHLLDFQAVPAPESAQKGELAGLLAGLAAAPPEPVNIWVDSKYLYSLLRTLVLGAWLQPDPVPSYALLYKSLLRHPAIVVGHVRSHSSASHPIASLNNYVDQLAGKRTADGSEFEKRTADGSEFESPKKKAKVE

SEQ ID NO: 18 - protein, 2116 aa, synthetic construct
MPAAKRVKLDGGDKKYSIGLDIGTNSVGWAVITDEYKVPSKKFKVLGNTDRHSIKKNLIGALLFDSGETAEATRLKRTARRRYTRRKNRICYLQEIFSNEMAKVDDSFFHRLEESFLVEEDKKHERHPIFGNIVDEVAYHEKYPTIYHLRKKLVDSTDKADLRLIYLALAHMIKFRGHFLIEGDLNPDNSDVDKLFIQLVQTYNQLFEENPINASGVDAKAILSARLSKSRRLENLIAQLPGEKKNGLFGNLIALSLGLTPNFKSNFDLAEDAKLQLSKDTYDDDLDNLLAQIGDQYADLFLAAKNLSDAILLSDILRVNTEITKAPLSASMIKRYDEHHQDLTLLKALVRQQLPEKYKEIFFDQSKNGYAGYIDGGASQEEFYKFIKPILEKMDGTEELLVKLNREDLLRKQRTFDNGSIPHQIHLGELHAILRRQEDFYPFLKDNREKIEKILTFRIPYYVGPLARGNSRFAWMTRKSEETITPWNFEEVVDKGASAQSFIERMTNFDKNLPNEKVLPKHSLLYEYFTVYNELTKVKYVTEGMRKPAFLSGEQKKAIVDLLFKTNRKVTVKQLKEDYFKKIECFDSVEISGVEDRFNASLGTYHDLLKIIKDKDFLDNEENEDILEDIVLTLTLFEDREMIEERLKTYAHLFDDKVMKQLKRRRYTGWGRLSRKLINGIRDKQSGKTILDFLKSDGFANRNFMQLIHDDSLTFKEDIQKAQVSGQGDSLHEHIANLAGSPAIKKGILQTVKVVDELVKVMGRHKPENIVIEMARENQTTQKGQKNSRERMKRIEEGIKELGSQILKEHPVENTQLQNEKLYLYYLQNGRDMYVDQELDINRLSDYDVDHIVPQSFLKDDSIDNKVLTRSDKARGKSDNVPSEEVVKKMKNYWRQLLNAKLITQRKFDNLTKAERGGLSELDKAGFIKRQLVETRQITKHVAQILDSRMNTKYDENDKLIREVKVITLKSKLVSDFRKDFQFYKVREINNYHHAHDAYLNAVVGTALIKKYPKLESEFVYGDYKVYDVRKMIAKSEQEIGKATAKYFFYSNIMNFFKTEITLANGEIRKRPLIETNGETGEIVWDKGRDFATVRKVLSMPQVNIVKKTEVQTGGFSKESILPKRNSDKLIARKKDWDPKKYGGFDSPTVAYSVLVVAKVEKGKSKKLKSVKELLGITIMERSSFEKNPIDFLEAKGYKEVKKDLIIKLPKYSLFELENGRKRMLASAGELQKGNELALPSKYVNFLYLASHYEKLKGSPEDNEQKQLFVEQHKHYLDEIIEQISEFSKRVILADANLDKVLSAYNKHRDKPIREQAENIIHLFTLTNLGAPAAFKYFDTTIDRKRYTSTKEVLDATLIHQSITGLYETRIDLSQLGGDGGEAAAKPAPGGGGGWVQEISDSRPMLHIYLNGRRFLGLLNTGADKTCIAGRDWPANWPIHQTESSLQGLGMACGVARSSQPLRWQHEDKSGIIHPFVIPTLPFTLWGRDIMKDIKVRLMTDSPDDSQDLMIGAIESNLFADQISWKSDQPVWLNQWPLKQEKLQALQQLVTEQLQLGHLEESNSPWNTPVFVIKKKSGKWRLLQDLRAVNATMHDMGALQPGLPSPVAPPKGWEIIIIDLQDCFFNIKLHPEDCKRFAFSVPSPNFKRPYQRFQWKVLPQGMKNSPTLCQKFVDKAILTVRDKYQDSYIVHYMDDILLAHPSRSIVDEILTSMIQALNKHGLVVSTEKIQKYDNLKYLGTHIQGDSVSYQKLQIRTDKLRTLNDFQKLLGNINWIRPFLKLTTGELKPLFEILNPDSNPISTRKLTPEACKALQLMNERLSTARVKRLDLSQPWSLCILKTEYTPTACLWQDGVVEWIHLPHISPKVITPYDIFCTQLIIKGRHRSKELFSKDPDYIVVPYTKVQFDLLLQEKEDWPISLLGFLGEVHFHLPKDPLLTFTLQTAIIFPHMTSTTPLEKGIVIFTDGSANGRSVTYIQGREPIIKENTQNTAQQAEIVAVITAFEEVSQPFNLYTDSKYVTGLFPEIETATLSPRTKIYTELKHLQRLIHKRQEKFYIGHIRGHTGLPGPLAQGNAYADSLTRILTAGKRTADGSEFEKRTADGSEFESPKKKAKVE

SEQ ID NO: 19 - protein, 2114 aa, synthetic construct
MPAAKRVKLDGGDKKYSIGLDIGTNSVGWAVITDEYKVPSKKFKVLGNTDRHSIKKNLIGALLFDSGETAEATRLKRTARRRYTRRKNRICYLQEIFSNEMAKVDDSFFHRLEESFLVEEDKKHERHPIFGNIVDEVAYHEKYPTIYHLRKKLVDSTDKADLRLIYLALAHMIKFRGHFLIEGDLNPDNSDVDKLFIQLVQTYNQLFEENPINASGVDAKAILSARLSKSRRLENLIAQLPGEKKNGLFGNLIALSLGLTPNFKSNFDLAEDAKLQLSKDTYDDDLDNLLAQIGDQYADLFLAAKNLSDAILLSDILRVNTEITKAPLSASMIKRYDEHHQDLTLLKALVRQQLPEKYKEIFFDQSKNGYAGYIDGGASQEEFYKFIKPILEKMDGTEELLVKLNREDLLRKQRTFDNGSIPHQIHLGELHAILRRQEDFYPFLKDNREKIEKILTFRIPYYVGPLARGNSRFAWMTRKSEETITPWNFEEVVDKGASAQSFIERMTNFDKNLPNEKVLPKHSLLYEYFTVYNELTKVKYVTEGMRKPAFLSGEQKKAIVDLLFKTNRKVTVKQLKEDYFKKIECFDSVEISGVEDRFNASLGTYHDLLKIIKDKDFLDNEENEDILEDIVLTLTLFEDREMIEERLKTYAHLFDDKVMKQLKRRRYTGWGRLSRKLINGIRDKQSGKTILDFLKSDGFANRNFMQLIHDDSLTFKEDIQKAQVSGQGDSLHEHIANLAGSPAIKKGILQTVKVVDELVKVMGRHKPENIVIEMARENQTTQKGQKNSRERMKRIEEGIKELGSQILKEHPVENTQLQNEKLYLYYLQNGRDMYVDQELDINRLSDYDVDHIVPQSFLKDDSIDNKVLTRSDKARGKSDNVPSEEVVKKMKNYWRQLLNAKLITQRKFDNLTKAERGGLSELDKAGFIKRQLVETRQITKHVAQILDSRMNTKYDENDKLIREVKVITLKSKLVSDFRKDFQFYKVREINNYHHAHDAYLNAVVGTALIKKYPKLESEFVYGDYKVYDVRKMIAKSEQEIGKATAKYFFYSNIMNFFKTEITLANGEIRKRPLIETNGETGEIVWDKGRDFATVRKVLSMPQVNIVKKTEVQTGGFSKESILPKRNSDKLIARKKDWDPKKYGGFDSPTVAYSVLVVAKVEKGKSKKLKSVKELLGITIMERSSFEKNPIDFLEAKGYKEVKKDLIIKLPKYSLFELENGRKRMLASAGELQKGNELALPSKYVNFLYLASHYEKLKGSPEDNEQKQLFVEQHKHYLDEIIEQISEFSKRVILADANLDKVLSAYNKHRDKPIREQAENIIHLFTLTNLGAPAAFKYFDTTIDRKRYTSTKEVLDATLIHQSITGLYETRIDLSQLGGDGGPAPGGGGGSGGWVQEISDSRPMLHIYLNGRRFLGLLNTGADKTCIAGRDWPANWPIHQTESSLQGLGMACGVARSSQPLRWQHEDKSGIIHPFVIPTLPFTLWGRDIMKDIKVRLMTDSPDDSQDLMIGAIESNLFADQISWKSDQPVWLNQWPLKQEKLQALQQLVTEQLQLGHLEESNSPWNTPVFVIKKKSGKWRLLQDLRAVNATMHDMGALQPGLPSPVAPPKGWEIIIIDLQDCFFNIKLHPEDCKRFAFSVPSPNFKRPYQRFQWKVLPQGMKNSPTLCQKFVDKAILTVRDKYQDSYIVHYMDDILLAHPSRSIVDEILTSMIQALNKHGLVVSTEKIQKYDNLKYLGTHIQGDSVSYQKLQIRTDKLRTLNDFQKLLGNINWIRPFLKLTTGELKPLFEILNPDSNPISTRKLTPEACKALQLMNERLSTARVKRLDLSQPWSLCILKTEYTPTACLWQDGVVEWIHLPHISPKVITPYDIFCTQLIIKGRHRSKELFSKDPDYIVVPYTKVQFDLLLQEKEDWPISLLGFLGEVHFHLPKDPLLTFTLQTAIIFPHMTSTTPLEKGIVIFTDGSANGRSVTYIQGREPIIKENTQNTAQQAEIVAVITAFEEVSQPFNLYTDSKYVTGLFPEIETATLSPRTKIYTELKHLQRLIHKRQEKFYIGHIRGHTGLPGPLAQGNAYADSLTRILTAGKRTADGSEFEKRTADGSEFESPKKKAKVE

SEQ ID NO: 20 - protein, 2114 aa, synthetic construct
MPAAKRVKLDGGDKKYSIGLDIGTNSVGWAVITDEYKVPSKKFKVLGNTDRHSIKKNLIGALLFDSGETAEATRLKRTARRRYTRRKNRICYLQEIFSNEMAKVDDSFFHRLEESFLVEEDKKHERHPIFGNIVDEVAYHEKYPTIYHLRKKLVDSTDKADLRLIYLALAHMIKFRGHFLIEGDLNPDNSDVDKLFIQLVQTYNQLFEENPINASGVDAKAILSARLSKSRRLENLIAQLPGEKKNGLFGNLIALSLGLTPNFKSNFDLAEDAKLQLSKDTYDDDLDNLLAQIGDQYADLFLAAKNLSDAILLSDILRVNTEITKAPLSASMIKRYDEHHQDLTLLKALVRQQLPEKYKEIFFDQSKNGYAGYIDGGASQEEFYKFIKPILEKMDGTEELLVKLNREDLLRKQRTFDNGSIPHQIHLGELHAILRRQEDFYPFLKDNREKIEKILTFRIPYYVGPLARGNSRFAWMTRKSEETITPWNFEEVVDKGASAQSFIERMTNFDKNLPNEKVLPKHSLLYEYFTVYNELTKVKYVTEGMRKPAFLSGEQKKAIVDLLFKTNRKVTVKQLKEDYFKKIECFDSVEISGVEDRFNASLGTYHDLLKIIKDKDFLDNEENEDILEDIVLTLTLFEDREMIEERLKTYAHLFDDKVMKQLKRRRYTGWGRLSRKLINGIRDKQSGKTILDFLKSDGFANRNFMQLIHDDSLTFKEDIQKAQVSGQGDSLHEHIANLAGSPAIKKGILQTVKVVDELVKVMGRHKPENIVIEMARENQTTQKGQKNSRERMKRIEEGIKELGSQILKEHPVENTQLQNEKLYLYYLQNGRDMYVDQELDINRLSDYDVDHIVPQSFLKDDSIDNKVLTRSDKARGKSDNVPSEEVVKKMKNYWRQLLNAKLITQRKFDNLTKAERGGLSELDKAGFIKRQLVETRQITKHVAQILDSRMNTKYDENDKLIREVKVITLKSKLVSDFRKDFQFYKVREINNYHHAHDAYLNAVVGTALIKKYPKLESEFVYGDYKVYDVRKMIAKSEQEIGKATAKYFFYSNIMNFFKTEITLANGEIRKRPLIETNGETGEIVWDKGRDFATVRKVLSMPQVNIVKKTEVQTGGFSKESILPKRNSDKLIARKKDWDPKKYGGFDSPTVAYSVLVVAKVEKGKSKKLKSVKELLGITIMERSSFEKNPIDFLEAKGYKEVKKDLIIKLPKYSLFELENGRKRMLASAGELQKGNELALPSKYVNFLYLASHYEKLKGSPEDNEQKQLFVEQHKHYLDEIIEQISEFSKRVILADANLDKVLSAYNKHRDKPIREQAENIIHLFTLTNLGAPAAFKYFDTTIDRKRYTSTKEVLDATLIHQSITGLYETRIDLSQLGGDGGGGSGSSGGGGGWVQEISDSRPMLHIYLNGRRFLGLLNTGADKTCIAGRDWPANWPIHQTESSLQGLGMACGVARSSQPLRWQHEDKSGIIHPFVIPTLPFTLWGRDIMKDIKVRLMTDSPDDSQDLMIGAIESNLFADQISWKSDQPVWLNQWPLKQEKLQALQQLVTEQLQLGHLEESNSPWNTPVFVIKKKSGKWRLLQDLRAVNATMHDMGALQPGLPSPVAPPKGWEIIIIDLQDCFFNIKLHPEDCKRFAFSVPSPNFKRPYQRFQWKVLPQGMKNSPTLCQKFVDKAILTVRDKYQDSYIVHYMDDILLAHPSRSIVDEILTSMIQALNKHGLVVSTEKIQKYDNLKYLGTHIQGDSVSYQKLQIRTDKLRTLNDFQKLLGNINWIRPFLKLTTGELKPLFEILNPDSNPISTRKLTPEACKALQLMNERLSTARVKRLDLSQPWSLCILKTEYTPTACLWQDGVVEWIHLPHISPKVITPYDIFCTQLIIKGRHRSKELFSKDPDYIVVPYTKVQFDLLLQEKEDWPISLLGFLGEVHFHLPKDPLLTFTLQTAIIFPHMTSTTPLEKGIVIFTDGSANGRSVTYIQGREPIIKENTQNTAQQAEIVAVITAFEEVSQPFNLYTDSKYVTGLFPEIETATLSPRTKIYTELKHLQRLIHKRQEKFYIGHIRGHTGLPGPLAQGNAYADSLTRILTAGKRTADGSEFEKRTADGSEFESPKKKAKVE

SEQ ID NO: 21 - protein, 2116 aa, synthetic construct
MPAAKRVKLDGGDKKYSIGLDIGTNSVGWAVITDEYKVPSKKFKVLGNTDRHSIKKNLIGALLFDSGETAEATRLKRTARRRYTRRKNRICYLQEIFSNEMAKVDDSFFHRLEESFLVEEDKKHERHPIFGNIVDEVAYHEKYPTIYHLRKKLVDSTDKADLRLIYLALAHMIKFRGHFLIEGDLNPDNSDVDKLFIQLVQTYNQLFEENPINASGVDAKAILSARLSKSRRLENLIAQLPGEKKNGLFGNLIALSLGLTPNFKSNFDLAEDAKLQLSKDTYDDDLDNLLAQIGDQYADLFLAAKNLSDAILLSDILRVNTEITKAPLSASMIKRYDEHHQDLTLLKALVRQQLPEKYKEIFFDQSKNGYAGYIDGGASQEEFYKFIKPILEKMDGTEELLVKLNREDLLRKQRTFDNGSIPHQIHLGELHAILRRQEDFYPFLKDNREKIEKILTFRIPYYVGPLARGNSRFAWMTRKSEETITPWNFEEVVDKGASAQSFIERMTNFDKNLPNEKVLPKHSLLYEYFTVYNELTKVKYVTEGMRKPAFLSGEQKKAIVDLLFKTNRKVTVKQLKEDYFKKIECFDSVEISGVEDRFNASLGTYHDLLKIIKDKDFLDNEENEDILEDIVLTLTLFEDREMIEERLKTYAHLFDDKVMKQLKRRRYTGWGRLSRKLINGIRDKQSGKTILDFLKSDGFANRNFMQLIHDDSLTFKEDIQKAQVSGQGDSLHEHIANLAGSPAIKKGILQTVKVVDELVKVMGRHKPENIVIEMARENQTTQKGQKNSRERMKRIEEGIKELGSQILKEHPVENTQLQNEKLYLYYLQNGRDMYVDQELDINRLSDYDVDHIVPQSFLKDDSIDNKVLTRSDKARGKSDNVPSEEVVKKMKNYWRQLLNAKLITQRKFDNLTKAERGGLSELDKAGFIKRQLVETRQITKHVAQILDSRMNTKYDENDKLIREVKVITLKSKLVSDFRKDFQFYKVREINNYHHAHDAYLNAVVGTALIKKYPKLESEFVYGDYKVYDVRKMIAKSEQEIGKATAKYFFYSNIMNFFKTEITLANGEIRKRPLIETNGETGEIVWDKGRDFATVRKVLSMPQVNIVKKTEVQTGGFSKESILPKRNSDKLIARKKDWDPKKYGGFDSPTVAYSVLVVAKVEKGKSKKLKSVKELLGITIMERSSFEKNPIDFLEAKGYKEVKKDLIIKLPKYSLFELENGRKRMLASAGELQKGNELALPSKYVNFLYLASHYEKLKGSPEDNEQKQLFVEQHKHYLDEIIEQISEFSKRVILADANLDKVLSAYNKHRDKPIREQAENIIHLFTLTNLGAPAAFKYFDTTIDRKRYTSTKEVLDATLIHQSITGLYETRIDLSQLGGDGGPAPGGSEAAAKGGVQEISDSRPMLHIYLNGRRFLGLLDTGADKTCIAGRDWPANWPIHQTESSLQGLGMACGVARSSQPLRWQHEDKSGIIHPFVIPTLPFTLWGRDIMKDIKVRLMTDSPDDSQDLMIGAIESNLFADQISWKSDQPVWLNQWPLKQEKLQALQQLVTEQLQLGHLEESNSPWNTPVFVIKKKSGKWRLLQDLRAVNATMHDMGALQPGLPSPPAVPKGWEIIIIDLQDCFFNIKLHPEDCKRFAFSVPSPNFKRPYQRFQWKVLPQGMKNSPTLCQKFVDKAILTVRDKYQDSYIVHYMDDILLAHPSRSIVDEILTSMIQALNKHGLVVSTEKIQKYDNLKYLGTHIQGDSVSYQKLQIRTDKLRTLNDFQKLLGNINWIRPFLKLTTGELKPLFEILNPDSNPISTRKLTPEACKALQLMNERLSTARVKRLDLSQPWSLCILKTEYTPTACLWQDGVVEWIHLPHISPKVITPYDIFCTQLIIKGRHRSKELFSKDPDYIVVPYTKVQFDLLLQEKEDWPISLLGFLGEVHFHLPKDPLLTFTLQTAIIFPHMTSTTPLEKGIVIFTDGSANGRSVTYIQGREPIIKENTQNTAQQAEIVAVITAFEEVSQPFNLYTDSKYVTGLFPEIETATLSPRTKIYTELKHLQRLIHKRQEKFYIGHIRGHTGLPGPLAQGNAYADSLTRILTAAGKRTADGSEFEKRTADGSEFESPKKKAKVE

SEQ ID NO: 22 - protein, 2116 aa, synthetic construct
MPAAKRVKLDGGDKKYSIGLDIGTNSVGWAVITDEYKVPSKKFKVLGNTDRHSIKKNLIGALLFDSGETAEATRLKRTARRRYTRRKNRICYLQEIFSNEMAKVDDSFFHRLEESFLVEEDKKHERHPIFGNIVDEVAYHEKYPTIYHLRKKLVDSTDKADLRLIYLALAHMIKFRGHFLIEGDLNPDNSDVDKLFIQLVQTYNQLFEENPINASGVDAKAILSARLSKSRRLENLIAQLPGEKKNGLFGNLIALSLGLTPNFKSNFDLAEDAKLQLSKDTYDDDLDNLLAQIGDQYADLFLAAKNLSDAILLSDILRVNTEITKAPLSASMIKRYDEHHQDLTLLKALVRQQLPEKYKEIFFDQSKNGYAGYIDGGASQEEFYKFIKPILEKMDGTEELLVKLNREDLLRKQRTFDNGSIPHQIHLGELHAILRRQEDFYPFLKDNREKIEKILTFRIPYYVGPLARGNSRFAWMTRKSEETITPWNFEEVVDKGASAQSFIERMTNFDKNLPNEKVLPKHSLLYEYFTVYNELTKVKYVTEGMRKPAFLSGEQKKAIVDLLFKTNRKVTVKQLKEDYFKKIECFDSVEISGVEDRFNASLGTYHDLLKIIKDKDFLDNEENEDILEDIVLTLTLFEDREMIEERLKTYAHLFDDKVMKQLKRRRYTGWGRLSRKLINGIRDKQSGKTILDFLKSDGFANRNFMQLIHDDSLTFKEDIQKAQVSGQGDSLHEHIANLAGSPAIKKGILQTVKVVDELVKVMGRHKPENIVIEMARENQTTQKGQKNSRERMKRIEEGIKELGSQILKEHPVENTQLQNEKLYLYYLQNGRDMYVDQELDINRLSDYDVDHIVPQSFLKDDSIDNKVLTRSDKARGKSDNVPSEEVVKKMKNYWRQLLNAKLITQRKFDNLTKAERGGLSELDKAGFIKRQLVETRQITKHVAQILDSRMNTKYDENDKLIREVKVITLKSKLVSDFRKDFQFYKVREINNYHHAHDAYLNAVVGTALIKKYPKLESEFVYGDYKVYDVRKMIAKSEQEIGKATAKYFFYSNIMNFFKTEITLANGEIRKRPLIETNGETGEIVWDKGRDFATVRKVLSMPQVNIVKKTEVQTGGFSKESILPKRNSDKLIARKKDWDPKKYGGFDSPTVAYSVLVVAKVEKGKSKKLKSVKELLGITIMERSSFEKNPIDFLEAKGYKEVKKDLIIKLPKYSLFELENGRKRMLASAGELQKGNELALPSKYVNFLYLASHYEKLKGSPEDNEQKQLFVEQHKHYLDEIIEQISEFSKRVILADANLDKVLSAYNKHRDKPIREQAENIIHLFTLTNLGAPAAFKYFDTTIDRKRYTSTKEVLDATLIHQSITGLYETRIDLSQLGGDGGGGSEAAAKGGGGGVQEISDSRPMLHIYLNGRRFLGLLDTGADKTCIAGRDWPANWPIHQTESSLQGLGMACGVARSSQPLRWQHEDKSGIIHPFVIPTLPFTLWGRDIMKDIKVRLMTDSPDDSQDLMIGAIESNLFADQISWKSDQPVWLNQWPLKQEKLQALQQLVTEQLQLGHLEESNSPWNTPVFVIKKKSGKWRLLQDLRAVNATMHDMGALQPGLPSPPAVPKGWEIIIIDLQDCFFNIKLHPEDCKRFAFSVPSPNFKRPYQRFQWKVLPQGMKNSPTLCQKFVDKAILTVRDKYQDSYIVHYMDDILLAHPSRSIVDEILTSMIQALNKHGLVVSTEKIQKYDNLKYLGTHIQGDSVSYQKLQIRTDKLRTLNDFQKLLGNINWIRPFLKLTTGELKPLFEILNPDSNPISTRKLTPEACKALQLMNERLSTARVKRLDLSQPWSLCILKTEYTPTACLWQDGVVEWIHLPHISPKVITPYDIFCTQLIIKGRHRSKELFSKDPDYIVVPYTKVQFDLLLQEKEDWPISLLGFLGEVHFHLPKDPLLTFTLQTAIIFPHMTSTTPLEKGIVIFTDGSANGRSVTYIQGREPIIKENTQNTAQQAEIVAVITAFEEVSQPFNLYTDSKYVTGLFPEIETATLSPRTKIYTELKHLQRLIHKRQEKFYIGHIRGHTGLPGPLAQGNAYADSLTRILTAAGKRTADGSEFEKRTADGSEFESPKKKAKVE

SEQ ID NO: 23 - protein, 2116 aa, synthetic construct
MPAAKRVKLDGGDKKYSIGLDIGTNSVGWAVITDEYKVPSKKFKVLGNTDRHSIKKNLIGALLFDSGETAEATRLKRTARRRYTRRKNRICYLQEIFSNEMAKVDDSFFHRLEESFLVEEDKKHERHPIFGNIVDEVAYHEKYPTIYHLRKKLVDSTDKADLRLIYLALAHMIKFRGHFLIEGDLNPDNSDVDKLFIQLVQTYNQLFEENPINASGVDAKAILSARLSKSRRLENLIAQLPGEKKNGLFGNLIALSLGLTPNFKSNFDLAEDAKLQLSKDTYDDDLDNLLAQIGDQYADLFLAAKNLSDAILLSDILRVNTEITKAPLSASMIKRYDEHHQDLTLLKALVRQQLPEKYKEIFFDQSKNGYAGYIDGGASQEEFYKFIKPILEKMDGTEELLVKLNREDLLRKQRTFDNGSIPHQIHLGELHAILRRQEDFYPFLKDNREKIEKILTFRIPYYVGPLARGNSRFAWMTRKSEETITPWNFEEVVDKGASAQSFIERMTNFDKNLPNEKVLPKHSLLYEYFTVYNELTKVKYVTEGMRKPAFLSGEQKKAIVDLLFKTNRKVTVKQLKEDYFKKIECFDSVEISGVEDRFNASLGTYHDLLKIIKDKDFLDNEENEDILEDIVLTLTLFEDREMIEERLKTYAHLFDDKVMKQLKRRRYTGWGRLSRKLINGIRDKQSGKTILDFLKSDGFANRNFMQLIHDDSLTFKEDIQKAQVSGQGDSLHEHIANLAGSPAIKKGILQTVKVVDELVKVMGRHKPENIVIEMARENQTTQKGQKNSRERMKRIEEGIKELGSQILKEHPVENTQLQNEKLYLYYLQNGRDMYVDQELDINRLSDYDVDHIVPQSFLKDDSIDNKVLTRSDKARGKSDNVPSEEVVKKMKNYWRQLLNAKLITQRKFDNLTKAERGGLSELDKAGFIKRQLVETRQITKHVAQILDSRMNTKYDENDKLIREVKVITLKSKLVSDFRKDFQFYKVREINNYHHAHDAYLNAVVGTALIKKYPKLESEFVYGDYKVYDVRKMIAKSEQEIGKATAKYFFYSNIMNFFKTEITLANGEIRKRPLIETNGETGEIVWDKGRDFATVRKVLSMPQVNIVKKTEVQTGGFSKESILPKRNSDKLIARKKDWDPKKYGGFDSPTVAYSVLVVAKVEKGKSKKLKSVKELLGITIMERSSFEKNPIDFLEAKGYKEVKKDLIIKLPKYSLFELENGRKRMLASAGELQKGNELALPSKYVNFLYLASHYEKLKGSPEDNEQKQLFVEQHKHYLDEIIEQISEFSKRVILADANLDKVLSAYNKHRDKPIREQAENIIHLFTLTNLGAPAAFKYFDTTIDRKRYTSTKEVLDATLIHQSITGLYETRIDLSQLGGDGGGGGGGSEAAAKGGVQEISDSRPMLHIYLNGRRFLGLLDTGADKTCIAGRDWPANWPIHQTESSLQGLGMACGVARSSQPLRWQHEDKSGIIHPFVIPTLPFTLWGRDIMKDIKVRLMTDSPDDSQDLMIGAIESNLFADQISWKSDQPVWLNQWPLKQEKLQALQQLVTEQLQLGHLEESNSPWNTPVFVIKKKSGKWRLLQDLRAVNATMHDMGALQPGLPSPPAVPKGWEIIIIDLQDCFFNIKLHPEDCKRFAFSVPSPNFKRPYQRFQWKVLPQGMKNSPTLCQKFVDKAILTVRDKYQDSYIVHYMDDILLAHPSRSIVDEILTSMIQALNKHGLVVSTEKIQKYDNLKYLGTHIQGDSVSYQKLQIRTDKLRTLNDFQKLLGNINWIRPFLKLTTGELKPLFEILNPDSNPISTRKLTPEACKALQLMNERLSTARVKRLDLSQPWSLCILKTEYTPTACLWQDGVVEWIHLPHISPKVITPYDIFCTQLIIKGRHRSKELFSKDPDYIVVPYTKVQFDLLLQEKEDWPISLLGFLGEVHFHLPKDPLLTFTLQTAIIFPHMTSTTPLEKGIVIFTDGSANGRSVTYIQGREPIIKENTQNTAQQAEIVAVITAFEEVSQPFNLYTDSKYVTGLFPEIETATLSPRTKIYTELKHLQRLIHKRQEKFYIGHIRGHTGLPGPLAQGNAYADSLTRILTAAGKRTADGSEFEKRTADGSEFESPKKKAKVE

SEQ ID NO: 24 - protein, 2116 aa, synthetic construct
MPAAKRVKLDGGDKKYSIGLDIGTNSVGWAVITDEYKVPSKKFKVLGNTDRHSIKKNLIGALLFDSGETAEATRLKRTARRRYTRRKNRICYLQEIFSNEMAKVDDSFFHRLEESFLVEEDKKHERHPIFGNIVDEVAYHEKYPTIYHLRKKLVDSTDKADLRLIYLALAHMIKFRGHFLIEGDLNPDNSDVDKLFIQLVQTYNQLFEENPINASGVDAKAILSARLSKSRRLENLIAQLPGEKKNGLFGNLIALSLGLTPNFKSNFDLAEDAKLQLSKDTYDDDLDNLLAQIGDQYADLFLAAKNLSDAILLSDILRVNTEITKAPLSASMIKRYDEHHQDLTLLKALVRQQLPEKYKEIFFDQSKNGYAGYIDGGASQEEFYKFIKPILEKMDGTEELLVKLNREDLLRKQRTFDNGSIPHQIHLGELHAILRRQEDFYPFLKDNREKIEKILTFRIPYYVGPLARGNSRFAWMTRKSEETITPWNFEEVVDKGASAQSFIERMTNFDKNLPNEKVLPKHSLLYEYFTVYNELTKVKYVTEGMRKPAFLSGEQKKAIVDLLFKTNRKVTVKQLKEDYFKKIECFDSVEISGVEDRFNASLGTYHDLLKIIKDKDFLDNEENEDILEDIVLTLTLFEDREMIEERLKTYAHLFDDKVMKQLKRRRYTGWGRLSRKLINGIRDKQSGKTILDFLKSDGFANRNFMQLIHDDSLTFKEDIQKAQVSGQGDSLHEHIANLAGSPAIKKGILQTVKVVDELVKVMGRHKPENIVIEMARENQTTQKGQKNSRERMKRIEEGIKELGSQILKEHPVENTQLQNEKLYLYYLQNGRDMYVDQELDINRLSDYDVDHIVPQSFLKDDSIDNKVLTRSDKARGKSDNVPSEEVVKKMKNYWRQLLNAKLITQRKFDNLTKAERGGLSELDKAGFIKRQLVETRQITKHVAQILDSRMNTKYDENDKLIREVKVITLKSKLVSDFRKDFQFYKVREINNYHHAHDAYLNAVVGTALIKKYPKLESEFVYGDYKVYDVRKMIAKSEQEIGKATAKYFFYSNIMNFFKTEITLANGEIRKRPLIETNGETGEIVWDKGRDFATVRKVLSMPQVNIVKKTEVQTGGFSKESILPKRNSDKLIARKKDWDPKKYGGFDSPTVAYSVLVVAKVEKGKSKKLKSVKELLGITIMERSSFEKNPIDFLEAKGYKEVKKDLIIKLPKYSLFELENGRKRMLASAGELQKGNELALPSKYVNFLYLASHYEKLKGSPEDNEQKQLFVEQHKHYLDEIIEQISEFSKRVILADANLDKVLSAYNKHRDKPIREQAENIIHLFTLTNLGAPAAFKYFDTTIDRKRYTSTKEVLDATLIHQSITGLYETRIDLSQLGGDGGPAPEAAAKGSSGGVQEISDSRPMLHIYLNGRRFLGLLDTGADKTCIAGRDWPANWPIHQTESSLQGLGMACGVARSSQPLRWQHEDKSGIIHPFVIPTLPFTLWGRDIMKDIKVRLMTDSPDDSQDLMIGAIESNLFADQISWKSDQPVWLNQWPLKQEKLQALQQLVTEQLQLGHLEESNSPWNTPVFVIKKKSGKWRLLQDLRAVNATMHDMGALQPGLPSPPAVPKGWEIIIIDLQDCFFNIKLHPEDCKRFAFSVPSPNFKRPYQRFQWKVLPQGMKNSPTLCQKFVDKAILTVRDKYQDSYIVHYMDDILLAHPSRSIVDEILTSMIQALNKHGLVVSTEKIQKYDNLKYLGTHIQGDSVSYQKLQIRTDKLRTLNDFQKLLGNINWIRPFLKLTTGELKPLFEILNPDSNPISTRKLTPEACKALQLMNERLSTARVKRLDLSQPWSLCILKTEYTPTACLWQDGVVEWIHLPHISPKVITPYDIFCTQLIIKGRHRSKELFSKDPDYIVVPYTKVQFDLLLQEKEDWPISLLGFLGEVHFHLPKDPLLTFTLQTAIIFPHMTSTTPLEKGIVIFTDGSANGRSVTYIQGREPIIKENTQNTAQQAEIVAVITAFEEVSQPFNLYTDSKYVTGLFPEIETATLSPRTKIYTELKHLQRLIHKRQEKFYIGHIRGHTGLPGPLAQGNAYADSLTRILTAAGKRTADGSEFEKRTADGSEFESPKKKAKVE

SEQ ID NO: 25 - protein, 2116 aa, synthetic construct
MPAAKRVKLDGGDKKYSIGLDIGTNSVGWAVITDEYKVPSKKFKVLGNTDRHSIKKNLIGALLFDSGETAEATRLKRTARRRYTRRKNRICYLQEIFSNEMAKVDDSFFHRLEESFLVEEDKKHERHPIFGNIVDEVAYHEKYPTIYHLRKKLVDSTDKADLRLIYLALAHMIKFRGHFLIEGDLNPDNSDVDKLFIQLVQTYNQLFEENPINASGVDAKAILSARLSKSRRLENLIAQLPGEKKNGLFGNLIALSLGLTPNFKSNFDLAEDAKLQLSKDTYDDDLDNLLAQIGDQYADLFLAAKNLSDAILLSDILRVNTEITKAPLSASMIKRYDEHHQDLTLLKALVRQQLPEKYKEIFFDQSKNGYAGYIDGGASQEEFYKFIKPILEKMDGTEELLVKLNREDLLRKQRTFDNGSIPHQIHLGELHAILRRQEDFYPFLKDNREKIEKILTFRIPYYVGPLARGNSRFAWMTRKSEETITPWNFEEVVDKGASAQSFIERMTNFDKNLPNEKVLPKHSLLYEYFTVYNELTKVKYVTEGMRKPAFLSGEQKKAIVDLLFKTNRKVTVKQLKEDYFKKIECFDSVEISGVEDRFNASLGTYHDLLKIIKDKDFLDNEENEDILEDIVLTLTLFEDREMIEERLKTYAHLFDDKVMKQLKRRRYTGWGRLSRKLINGIRDKQSGKTILDFLKSDGFANRNFMQLIHDDSLTFKEDIQKAQVSGQGDSLHEHIANLAGSPAIKKGILQTVKVVDELVKVMGRHKPENIVIEMARENQTTQKGQKNSRERMKRIEEGIKELGSQILKEHPVENTQLQNEKLYLYYLQNGRDMYVDQELDINRLSDYDVDHIVPQSFLKDDSIDNKVLTRSDKARGKSDNVPSEEVVKKMKNYWRQLLNAKLITQRKFDNLTKAERGGLSELDKAGFIKRQLVETRQITKHVAQILDSRMNTKYDENDKLIREVKVITLKSKLVSDFRKDFQFYKVREINNYHHAHDAYLNAVVGTALIKKYPKLESEFVYGDYKVYDVRKMIAKSEQEIGKATAKYFFYSNIMNFFKTEITLANGEIRKRPLIETNGETGEIVWDKGRDFATVRKVLSMPQVNIVKKTEVQTGGFSKESILPKRNSDKLIARKKDWDPKKYGGFDSPTVAYSVLVVAKVEKGKSKKLKSVKELLGITIMERSSFEKNPIDFLEAKGYKEVKKDLIIKLPKYSLFELENGRKRMLASAGELQKGNELALPSKYVNFLYLASHYEKLKGSPEDNEQKQLFVEQHKHYLDEIIEQISEFSKRVILADANLDKVLSAYNKHRDKPIREQAENIIHLFTLTNLGAPAAFKYFDTTIDRKRYTSTKEVLDATLIHQSITGLYETRIDLSQLGGDGGGGSGSSEAAAKGGVQEISDSRPMLHIYLNGRRFLGLLDTGADKTCIAGRDWPANWPIHQTESSLQGLGMACGVARSSQPLRWQHEDKSGIIHPFVIPTLPFTLWGRDIMKDIKVRLMTDSPDDSQDLMIGAIESNLFADQISWKSDQPVWLNQWPLKQEKLQALQQLVTEQLQLGHLEESNSPWNTPVFVIKKKSGKWRLLQDLRAVNATMHDMGALQPGLPSPPAVPKGWEIIIIDLQDCFFNIKLHPEDCKRFAFSVPSPNFKRPYQRFQWKVLPQGMKNSPTLCQKFVDKAILTVRDKYQDSYIVHYMDDILLAHPSRSIVDEILTSMIQALNKHGLVVSTEKIQKYDNLKYLGTHIQGDSVSYQKLQIRTDKLRTLNDFQKLLGNINWIRPFLKLTTGELKPLFEILNPDSNPISTRKLTPEACKALQLMNERLSTARVKRLDLSQPWSLCILKTEYTPTACLWQDGVVEWIHLPHISPKVITPYDIFCTQLIIKGRHRSKELFSKDPDYIVVPYTKVQFDLLLQEKEDWPISLLGFLGEVHFHLPKDPLLTFTLQTAIIFPHMTSTTPLEKGIVIFTDGSANGRSVTYIQGREPIIKENTQNTAQQAEIVAVITAFEEVSQPFNLYTDSKYVTGLFPEIETATLSPRTKIYTELKHLQRLIHKRQEKFYIGHIRGHTGLPGPLAQGNAYADSLTRILTAAGKRTADGSEFEKRTADGSEFESPKKKAKVE

SEQ ID NO: 26 - protein, 2116 aa, synthetic construct
MPAAKRVKLDGGDKKYSIGLDIGTNSVGWAVITDEYKVPSKKFKVLGNTDRHSIKKNLIGALLFDSGETAEATRLKRTARRRYTRRKNRICYLQEIFSNEMAKVDDSFFHRLEESFLVEEDKKHERHPIFGNIVDEVAYHEKYPTIYHLRKKLVDSTDKADLRLIYLALAHMIKFRGHFLIEGDLNPDNSDVDKLFIQLVQTYNQLFEENPINASGVDAKAILSARLSKSRRLENLIAQLPGEKKNGLFGNLIALSLGLTPNFKSNFDLAEDAKLQLSKDTYDDDLDNLLAQIGDQYADLFLAAKNLSDAILLSDILRVNTEITKAPLSASMIKRYDEHHQDLTLLKALVRQQLPEKYKEIFFDQSKNGYAGYIDGGASQEEFYKFIKPILEKMDGTEELLVKLNREDLLRKQRTFDNGSIPHQIHLGELHAILRRQEDFYPFLKDNREKIEKILTFRIPYYVGPLARGNSRFAWMTRKSEETITPWNFEEVVDKGASAQSFIERMTNFDKNLPNEKVLPKHSLLYEYFTVYNELTKVKYVTEGMRKPAFLSGEQKKAIVDLLFKTNRKVTVKQLKEDYFKKIECFDSVEISGVEDRFNASLGTYHDLLKIIKDKDFLDNEENEDILEDIVLTLTLFEDREMIEERLKTYAHLFDDKVMKQLKRRRYTGWGRLSRKLINGIRDKQSGKTILDFLKSDGFANRNFMQLIHDDSLTFKEDIQKAQVSGQGDSLHEHIANLAGSPAIKKGILQTVKVVDELVKVMGRHKPENIVIEMARENQTTQKGQKNSRERMKRIEEGIKELGSQILKEHPVENTQLQNEKLYLYYLQNGRDMYVDQELDINRLSDYDVDHIVPQSFLKDDSIDNKVLTRSDKARGKSDNVPSEEVVKKMKNYWRQLLNAKLITQRKFDNLTKAERGGLSELDKAGFIKRQLVETRQITKHVAQILDSRMNTKYDENDKLIREVKVITLKSKLVSDFRKDFQFYKVREINNYHHAHDAYLNAVVGTALIKKYPKLESEFVYGDYKVYDVRKMIAKSEQEIGKATAKYFFYSNIMNFFKTEITLANGEIRKRPLIETNGETGEIVWDKGRDFATVRKVLSMPQVNIVKKTEVQTGGFSKESILPKRNSDKLIARKKDWDPKKYGGFDSPTVAYSVLVVAKVEKGKSKKLKSVKELLGITIMERSSFEKNPIDFLEAKGYKEVKKDLIIKLPKYSLFELENGRKRMLASAGELQKGNELALPSKYVNFLYLASHYEKLKGSPEDNEQKQLFVEQHKHYLDEIIEQISEFSKRVILADANLDKVLSAYNKHRDKPIREQAENIIHLFTLTNLGAPAAFKYFDTTIDRKRYTSTKEVLDATLIHQSITGLYETRIDLSQLGGDGGEAAAKGGSGSSGGVQEISDSRPMLHIYLNGRRFLGLLDTGADKTCIAGRDWPANWPIHQTESSLQGLGMACGVARSSQPLRWQHEDKSGIIHPFVIPTLPFTLWGRDIMKDIKVRLMTDSPDDSQDLMIGAIESNLFADQISWKSDQPVWLNQWPLKQEKLQALQQLVTEQLQLGHLEESNSPWNTPVFVIKKKSGKWRLLQDLRAVNATMHDMGALQPGLPSPVAVPKGWEIIIIDLQDCFFNIKLHPEDCKRFAFSVPSPNFKRPYQRFQWKVLPQGMKNSPTLCQKFVDKAILTVRDKYQDSYIVHYMDDILLAHPSRSIVDEILTSMIQALNKHGLVVSTEKIQKYDNLKYLGTHIQGDSVSYQKLQIRTDKLRTLNDFQKLLGNINWIRPFLKLTTGELKPLFEILNPDSNPISTRKLTPEACKALQLMNERLSTARVKRLDLSQPWSLCILKTEYTPTACLWQDGVVEWIHLPHISPKVITPYDIFCTQLIIKGRHRSKELFSKDPDYIVVPYTKVQFDLLLQEKEDWPISLLGFLGEVHFHLPKDPLLTFTLQTAIIFPHMTSTTPLEKGIVIFTDGSANGRSVTYIQGREPIIKENTQNTAQQAEIVAVITAFEEVSQPFNLYTDSKYVTGLFPEIETATLSPRTKIYTELKHLQRLIHKRQEKFYIGHIRGHTGLPGPLAQGNAYADSLTRILTAAGKRTADGSEFEKRTADGSEFESPKKKAKVE

SEQ ID NO: 27 - protein, 2116 aa, synthetic construct
MPAAKRVKLDGGDKKYSIGLDIGTNSVGWAVITDEYKVPSKKFKVLGNTDRHSIKKNLIGALLFDSGETAEATRLKRTARRRYTRRKNRICYLQEIFSNEMAKVDDSFFHRLEESFLVEEDKKHERHPIFGNIVDEVAYHEKYPTIYHLRKKLVDSTDKADLRLIYLALAHMIKFRGHFLIEGDLNPDNSDVDKLFIQLVQTYNQLFEENPINASGVDAKAILSARLSKSRRLENLIAQLPGEKKNGLFGNLIALSLGLTPNFKSNFDLAEDAKLQLSKDTYDDDLDNLLAQIGDQYADLFLAAKNLSDAILLSDILRVNTEITKAPLSASMIKRYDEHHQDLTLLKALVRQQLPEKYKEIFFDQSKNGYAGYIDGGASQEEFYKFIKPILEKMDGTEELLVKLNREDLLRKQRTFDNGSIPHQIHLGELHAILRRQEDFYPFLKDNREKIEKILTFRIPYYVGPLARGNSRFAWMTRKSEETITPWNFEEVVDKGASAQSFIERMTNFDKNLPNEKVLPKHSLLYEYFTVYNELTKVKYVTEGMRKPAFLSGEQKKAIVDLLFKTNRKVTVKQLKEDYFKKIECFDSVEISGVEDRFNASLGTYHDLLKIIKDKDFLDNEENEDILEDIVLTLTLFEDREMIEERLKTYAHLFDDKVMKQLKRRRYTGWGRLSRKLINGIRDKQSGKTILDFLKSDGFANRNFMQLIHDDSLTFKEDIQKAQVSGQGDSLHEHIANLAGSPAIKKGILQTVKVVDELVKVMGRHKPENIVIEMARENQTTQKGQKNSRERMKRIEEGIKELGSQILKEHPVENTQLQNEKLYLYYLQNGRDMYVDQELDINRLSDYDVDHIVPQSFLKDDSIDNKVLTRSDKARGKSDNVPSEEVVKKMKNYWRQLLNAKLITQRKFDNLTKAERGGLSELDKAGFIKRQLVETRQITKHVAQILDSRMNTKYDENDKLIREVKVITLKSKLVSDFRKDFQFYKVREINNYHHAHDAYLNAVVGTALIKKYPKLESEFVYGDYKVYDVRKMIAKSEQEIGKATAKYFFYSNIMNFFKTEITLANGEIRKRPLIETNGETGEIVWDKGRDFATVRKVLSMPQVNIVKKTEVQTGGFSKESILPKRNSDKLIARKKDWDPKKYGGFDSPTVAYSVLVVAKVEKGKSKKLKSVKELLGITIMERSSFEKNPIDFLEAKGYKEVKKDLIIKLPKYSLFELENGRKRMLASAGELQKGNELALPSKYVNFLYLASHYEKLKGSPEDNEQKQLFVEQHKHYLDEIIEQISEFSKRVILADANLDKVLSAYNKHRDKPIREQAENIIHLFTLTNLGAPAAFKYFDTTIDRKRYTSTKEVLDATLIHQSITGLYETRIDLSQLGGDGGEAAAKGGGGGSGGVQEISDSRPMLHIYLNGRRFLGLLDTGADKTCIAGRDWPANWPIHQTESSLQGLGMACGVARSSQPLRWQHEDKSGIIHPFVIPTLPFTLWGRDIMKDIKVRLMTDSPDDSQDLMIGAIESNLFADQISWKSDQPVWLNQWPLKQEKLQALQQLVTEQLQLGHLEESNSPWNTPVFVIKKKSGKWRLLQDLRAVNATMHDMGALQPGLPSPVAVPKGWEIIIIDLQDCFFNIKLHPEDCKRFAFSVPSPNFKRPYQRFQWKVLPQGMKNSPTLCQKFVDKAILTVRDKYQDSYIVHYMDDILLAHPSRSIVDEILTSMIQALNKHGLVVSTEKIQKYDNLKYLGTHIQGDSVSYQKLQIRTDKLRTLNDFQKLLGNINWIRPFLKLTTGELKPLFEILNPDSNPISTRKLTPEACKALQLMNERLSTARVKRLDLSQPWSLCILKTEYTPTACLWQDGVVEWIHLPHISPKVITPYDIFCTQLIIKGRHRSKELFSKDPDYIVVPYTKVQFDLLLQEKEDWPISLLGFLGEVHFHLPKDPLLTFTLQTAIIFPHMTSTTPLEKGIVIFTDGSANGRSVTYIQGREPIIKENTQNTAQQAEIVAVITAFEEVSQPFNLYTDSKYVTGLFPEIETATLSPRTKIYTELKHLQRLIHKRQEKFYIGHIRGHTGLPGPLAQGNAYADSLTRILTAAGKRTADGSEFEKRTADGSEFESPKKKAKVE

SEQ ID NO: 28 - protein, 2116 aa, synthetic construct
MPAAKRVKLDGGDKKYSIGLDIGTNSVGWAVITDEYKVPSKKFKVLGNTDRHSIKKNLIGALLFDSGETAEATRLKRTARRRYTRRKNRICYLQEIFSNEMAKVDDSFFHRLEESFLVEEDKKHERHPIFGNIVDEVAYHEKYPTIYHLRKKLVDSTDKADLRLIYLALAHMIKFRGHFLIEGDLNPDNSDVDKLFIQLVQTYNQLFEENPINASGVDAKAILSARLSKSRRLENLIAQLPGEKKNGLFGNLIALSLGLTPNFKSNFDLAEDAKLQLSKDTYDDDLDNLLAQIGDQYADLFLAAKNLSDAILLSDILRVNTEITKAPLSASMIKRYDEHHQDLTLLKALVRQQLPEKYKEIFFDQSKNGYAGYIDGGASQEEFYKFIKPILEKMDGTEELLVKLNREDLLRKQRTFDNGSIPHQIHLGELHAILRRQEDFYPFLKDNREKIEKILTFRIPYYVGPLARGNSRFAWMTRKSEETITPWNFEEVVDKGASAQSFIERMTNFDKNLPNEKVLPKHSLLYEYFTVYNELTKVKYVTEGMRKPAFLSGEQKKAIVDLLFKTNRKVTVKQLKEDYFKKIECFDSVEISGVEDRFNASLGTYHDLLKIIKDKDFLDNEENEDILEDIVLTLTLFEDREMIEERLKTYAHLFDDKVMKQLKRRRYTGWGRLSRKLINGIRDKQSGKTILDFLKSDGFANRNFMQLIHDDSLTFKEDIQKAQVSGQGDSLHEHIANLAGSPAIKKGILQTVKVVDELVKVMGRHKPENIVIEMARENQTTQKGQKNSRERMKRIEEGIKELGSQILKEHPVENTQLQNEKLYLYYLQNGRDMYVDQELDINRLSDYDVDHIVPQSFLKDDSIDNKVLTRSDKARGKSDNVPSEEVVKKMKNYWRQLLNAKLITQRKFDNLTKAERGGLSELDKAGFIKRQLVETRQITKHVAQILDSRMNTKYDENDKLIREVKVITLKSKLVSDFRKDFQFYKVREINNYHHAHDAYLNAVVGTALIKKYPKLESEFVYGDYKVYDVRKMIAKSEQEIGKATAKYFFYSNIMNFFKTEITLANGEIRKRPLIETNGETGEIVWDKGRDFATVRKVLSMPQVNIVKKTEVQTGGFSKESILPKRNSDKLIARKKDWDPKKYGGFDSPTVAYSVLVVAKVEKGKSKKLKSVKELLGITIMERSSFEKNPIDFLEAKGYKEVKKDLIIKLPKYSLFELENGRKRMLASAGELQKGNELALPSKYVNFLYLASHYEKLKGSPEDNEQKQLFVEQHKHYLDEIIEQISEFSKRVILADANLDKVLSAYNKHRDKPIREQAENIIHLFTLTNLGAPAAFKYFDTTIDRKRYTSTKEVLDATLIHQSITGLYETRIDLSQLGGDGGEAAAKPAPGGSGGVQEISDSRPMLHIYLNGRRFLGLLDTGADKTCIAGRDWPANWPIHQTESSLQGLGMACGVARSSQPLRWQHEDKSGIIHPFVIPTLPFTLWGRDIMKDIKVRLMTDSPDDSQDLMIGAIESNLFADQISWKSDQPVWLNQWPLKQEKLQALQQLVTEQLQLGHLEESNSPWNTPVFVIKKKSGKWRLLQDLRAVNATMHDMGALQPGLPSPVAVPKGWEIIIIDLQDCFFNIKLHPEDCKRFAFSVPSPNFKRPYQRFQWKVLPQGMKNSPTLCQKFVDKAILTVRDKYQDSYIVHYMDDILLAHPSRSIVDEILTSMIQALNKHGLVVSTEKIQKYDNLKYLGTHIQGDSVSYQKLQIRTDKLRTLNDFQKLLGNINWIRPFLKLTTGELKPLFEILNPDSNPISTRKLTPEACKALQLMNERLSTARVKRLDLSQPWSLCILKTEYTPTACLWQDGVVEWIHLPHISPKVITPYDIFCTQLIIKGRHRSKELFSKDPDYIVVPYTKVQFDLLLQEKEDWPISLLGFLGEVHFHLPKDPLLTFTLQTAIIFPHMTSTTPLEKGIVIFTDGSANGRSVTYIQGREPIIKENTQNTAQQAEIVAVITAFEEVSQPFNLYTDSKYVTGLFPEIETATLSPRTKIYTELKHLQRLIHKRQEKFYIGHIRGHTGLPGPLAQGNAYADSLTRILTAAGKRTADGSEFEKRTADGSEFESPKKKAKVE

SEQ ID NO: 29 - protein, 2113 aa, synthetic construct
MPAAKRVKLDGGDKKYSIGLDIGTNSVGWAVITDEYKVPSKKFKVLGNTDRHSIKKNLIGALLFDSGETAEATRLKRTARRRYTRRKNRICYLQEIFSNEMAKVDDSFFHRLEESFLVEEDKKHERHPIFGNIVDEVAYHEKYPTIYHLRKKLVDSTDKADLRLIYLALAHMIKFRGHFLIEGDLNPDNSDVDKLFIQLVQTYNQLFEENPINASGVDAKAILSARLSKSRRLENLIAQLPGEKKNGLFGNLIALSLGLTPNFKSNFDLAEDAKLQLSKDTYDDDLDNLLAQIGDQYADLFLAAKNLSDAILLSDILRVNTEITKAPLSASMIKRYDEHHQDLTLLKALVRQQLPEKYKEIFFDQSKNGYAGYIDGGASQEEFYKFIKPILEKMDGTEELLVKLNREDLLRKQRTFDNGSIPHQIHLGELHAILRRQEDFYPFLKDNREKIEKILTFRIPYYVGPLARGNSRFAWMTRKSEETITPWNFEEVVDKGASAQSFIERMTNFDKNLPNEKVLPKHSLLYEYFTVYNELTKVKYVTEGMRKPAFLSGEQKKAIVDLLFKTNRKVTVKQLKEDYFKKIECFDSVEISGVEDRFNASLGTYHDLLKIIKDKDFLDNEENEDILEDIVLTLTLFEDREMIEERLKTYAHLFDDKVMKQLKRRRYTGWGRLSRKLINGIRDKQSGKTILDFLKSDGFANRNFMQLIHDDSLTFKEDIQKAQVSGQGDSLHEHIANLAGSPAIKKGILQTVKVVDELVKVMGRHKPENIVIEMARENQTTQKGQKNSRERMKRIEEGIKELGSQILKEHPVENTQLQNEKLYLYYLQNGRDMYVDQELDINRLSDYDVDHIVPQSFLKDDSIDNKVLTRSDKARGKSDNVPSEEVVKKMKNYWRQLLNAKLITQRKFDNLTKAERGGLSELDKAGFIKRQLVETRQITKHVAQILDSRMNTKYDENDKLIREVKVITLKSKLVSDFRKDFQFYKVREINNYHHAHDAYLNAVVGTALIKKYPKLESEFVYGDYKVYDVRKMIAKSEQEIGKATAKYFFYSNIMNFFKTEITLANGEIRKRPLIETNGETGEIVWDKGRDFATVRKVLSMPQVNIVKKTEVQTGGFSKESILPKRNSDKLIARKKDWDPKKYGGFDSPTVAYSVLVVAKVEKGKSKKLKSVKELLGITIMERSSFEKNPIDFLEAKGYKEVKKDLIIKLPKYSLFELENGRKRMLASAGELQKGNELALPSKYVNFLYLASHYEKLKGSPEDNEQKQLFVEQHKHYLDEIIEQISEFSKRVILADANLDKVLSAYNKHRDKPIREQAENIIHLFTLTNLGAPAAFKYFDTTIDRKRYTSTKEVLDATLIHQSITGLYETRIDLSQLGGDGGGGSEAAAKGGVQEISDSRPMLHIYLNGRRFLGLLDTGADKTCIAGRDWPANWPIHQTESSLQGLGMACGVARSSQPLRWQHEDKSGIIHPFVIPTLPFTLWGRDIMKDIKVRLMTDSPDDSQDLMIGAIESNLFADQISWKSDQPVWLNQWPLKQEKLQALQQLVTEQLQLGHLEESNSPWNTPVFVIKKKSGKWRLLQDLRAVNATMHDMGALQPGLPSPVAVPKGWEIIIIDLQDCFFNIKLHPEDCKRFAFSVPSPNFKRPYQRFQWKVLPQGMKNSPTLCQKFVDKAILTVRDKYQDSYIVHYMDDILLAHPSRSIVDEILTSMIQALNKHGLVVSTEKIQKYDNLKYLGTHIQGDSVSYQKLQIRTDKLRTLNDFQKLLGNINWIRPFLKLTTGELKPLFEILNPDSNPISTRKLTPEACKALQLMNERLSTARVKRLDLSQPWSLCILKTEYTPTACLWQDGVVEWIHLPHISPKVITPYDIFCTQLIIKGRHRSKELFSKDPDYIVVPYTKVQFDLLLQEKEDWPISLLGFLGEVHFHLPKDPLLTFTLQTAIIFPHMTSTTPLEKGIVIFTDGSANGRSVTYIQGREPIIKENTQNTAQQAEIVAVITAFEEVSQPFNLYTDSKYVTGLFPEIETATLSPRTKIYTELKHLQRLIHKRQEKFYIGHIRGHTGLPGPLAQGNAYADSLTRILTAAGKRTADGSEFEKRTADGSEFESPKKKAKVE

SEQ ID NO: 30 - protein, 2111 aa, synthetic construct
MPAAKRVKLDGGDKKYSIGLDIGTNSVGWAVITDEYKVPSKKFKVLGNTDRHSIKKNLIGALLFDSGETAEATRLKRTARRRYTRRKNRICYLQEIFSNEMAKVDDSFFHRLEESFLVEEDKKHERHPIFGNIVDEVAYHEKYPTIYHLRKKLVDSTDKADLRLIYLALAHMIKFRGHFLIEGDLNPDNSDVDKLFIQLVQTYNQLFEENPINASGVDAKAILSARLSKSRRLENLIAQLPGEKKNGLFGNLIALSLGLTPNFKSNFDLAEDAKLQLSKDTYDDDLDNLLAQIGDQYADLFLAAKNLSDAILLSDILRVNTEITKAPLSASMIKRYDEHHQDLTLLKALVRQQLPEKYKEIFFDQSKNGYAGYIDGGASQEEFYKFIKPILEKMDGTEELLVKLNREDLLRKQRTFDNGSIPHQIHLGELHAILRRQEDFYPFLKDNREKIEKILTFRIPYYVGPLARGNSRFAWMTRKSEETITPWNFEEVVDKGASAQSFIERMTNFDKNLPNEKVLPKHSLLYEYFTVYNELTKVKYVTEGMRKPAFLSGEQKKAIVDLLFKTNRKVTVKQLKEDYFKKIECFDSVEISGVEDRFNASLGTYHDLLKIIKDKDFLDNEENEDILEDIVLTLTLFEDREMIEERLKTYAHLFDDKVMKQLKRRRYTGWGRLSRKLINGIRDKQSGKTILDFLKSDGFANRNFMQLIHDDSLTFKEDIQKAQVSGQGDSLHEHIANLAGSPAIKKGILQTVKVVDELVKVMGRHKPENIVIEMARENQTTQKGQKNSRERMKRIEEGIKELGSQILKEHPVENTQLQNEKLYLYYLQNGRDMYVDQELDINRLSDYDVDHIVPQSFLKDDSIDNKVLTRSDKARGKSDNVPSEEVVKKMKNYWRQLLNAKLITQRKFDNLTKAERGGLSELDKAGFIKRQLVETRQITKHVAQILDSRMNTKYDENDKLIREVKVITLKSKLVSDFRKDFQFYKVREINNYHHAHDAYLNAVVGTALIKKYPKLESEFVYGDYKVYDVRKMIAKSEQEIGKATAKYFFYSNIMNFFKTEITLANGEIRKRPLIETNGETGEIVWDKGRDFATVRKVLSMPQVNIVKKTEVQTGGFSKESILPKRNSDKLIARKKDWDPKKYGGFDSPTVAYSVLVVAKVEKGKSKKLKSVKELLGITIMERSSFEKNPIDFLEAKGYKEVKKDLIIKLPKYSLFELENGRKRMLASAGELQKGNELALPSKYVNFLYLASHYEKLKGSPEDNEQKQLFVEQHKHYLDEIIEQISEFSKRVILADANLDKVLSAYNKHRDKPIREQAENIIHLFTLTNLGAPAAFKYFDTTIDRKRYTSTKEVLDATLIHQSITGLYETRIDLSQLGGDGGGSSGGGGGVQEISDSRPMLHIYLNGRRFLGLLDTGADKTCIAGRDWPANWPIHQTESSLQGLGMACGVARSSQPLRWQHEDKSGIIHPFVIPTLPFTLWGRDIMKDIKVRLMTDSPDDSQDLMIGAIESNLFADQISWKSDQPVWLNQWPLKQEKLQALQQLVTEQLQLGHLEESNSPWNTPVFVIKKKSGKWRLLQDLRAVNATMHDMGALQPGLPSPVAVPKGWEIIIIDLQDCFFNIKLHPEDCKRFAFSVPSPNFKRPYQRFQWKVLPQGMKNSPTLCQKFVDKAILTVRDKYQDSYIVHYMDDILLAHPSRSIVDEILTSMIQALNKHGLVVSTEKIQKYDNLKYLGTHIQGDSVSYQKLQIRTDKLRTLNDFQKLLGNINWIRPFLKLTTGELKPLFEILNPDSNPISTRKLTPEACKALQLMNERLSTARVKRLDLSQPWSLCILKTEYTPTACLWQDGVVEWIHLPHISPKVITPYDIFCTQLIIKGRHRSKELFSKDPDYIVVPYTKVQFDLLLQEKEDWPISLLGFLGEVHFHLPKDPLLTFTLQTAIIFPHMTSTTPLEKGIVIFTDGSANGRSVTYIQGREPIIKENTQNTAQQAEIVAVITAFEEVSQPFNLYTDSKYVTGLFPEIETATLSPRTKIYTELKHLQRLIHKRQEKFYIGHIRGHTGLPGPLAQGNAYADSLTRILTAAGKRTADGSEFEKRTADGSEFESPKKKAKVE

SEQ ID NO: 31 - protein, 2114 aa, synthetic construct
MPAAKRVKLDGGDKKYSIGLDIGTNSVGWAVITDEYKVPSKKFKVLGNTDRHSIKKNLIGALLFDSGETAEATRLKRTARRRYTRRKNRICYLQEIFSNEMAKVDDSFFHRLEESFLVEEDKKHERHPIFGNIVDEVAYHEKYPTIYHLRKKLVDSTDKADLRLIYLALAHMIKFRGHFLIEGDLNPDNSDVDKLFIQLVQTYNQLFEENPINASGVDAKAILSARLSKSRRLENLIAQLPGEKKNGLFGNLIALSLGLTPNFKSNFDLAEDAKLQLSKDTYDDDLDNLLAQIGDQYADLFLAAKNLSDAILLSDILRVNTEITKAPLSASMIKRYDEHHQDLTLLKALVRQQLPEKYKEIFFDQSKNGYAGYIDGGASQEEFYKFIKPILEKMDGTEELLVKLNREDLLRKQRTFDNGSIPHQIHLGELHAILRRQEDFYPFLKDNREKIEKILTFRIPYYVGPLARGNSRFAWMTRKSEETITPWNFEEVVDKGASAQSFIERMTNFDKNLPNEKVLPKHSLLYEYFTVYNELTKVKYVTEGMRKPAFLSGEQKKAIVDLLFKTNRKVTVKQLKEDYFKKIECFDSVEISGVEDRFNASLGTYHDLLKIIKDKDFLDNEENEDILEDIVLTLTLFEDREMIEERLKTYAHLFDDKVMKQLKRRRYTGWGRLSRKLINGIRDKQSGKTILDFLKSDGFANRNFMQLIHDDSLTFKEDIQKAQVSGQGDSLHEHIANLAGSPAIKKGILQTVKVVDELVKVMGRHKPENIVIEMARENQTTQKGQKNSRERMKRIEEGIKELGSQILKEHPVENTQLQNEKLYLYYLQNGRDMYVDQELDINRLSDYDVDHIVPQSFLKDDSIDNKVLTRSDKARGKSDNVPSEEVVKKMKNYWRQLLNAKLITQRKFDNLTKAERGGLSELDKAGFIKRQLVETRQITKHVAQILDSRMNTKYDENDKLIREVKVITLKSKLVSDFRKDFQFYKVREINNYHHAHDAYLNAVVGTALIKKYPKLESEFVYGDYKVYDVRKMIAKSEQEIGKATAKYFFYSNIMNFFKTEITLANGEIRKRPLIETNGETGEIVWDKGRDFATVRKVLSMPQVNIVKKTEVQTGGFSKESILPKRNSDKLIARKKDWDPKKYGGFDSPTVAYSVLVVAKVEKGKSKKLKSVKELLGITIMERSSFEKNPIDFLEAKGYKEVKKDLIIKLPKYSLFELENGRKRMLASAGELQKGNELALPSKYVNFLYLASHYEKLKGSPEDNEQKQLFVEQHKHYLDEIIEQISEFSKRVILADANLDKVLSAYNKHRDKPIREQAENIIHLFTLTNLGAPAAFKYFDTTIDRKRYTSTKEVLDATLIHQSITGLYETRIDLSQLGGDGGGGGPAPGSSGGVQEISDSRPMLHIYLNGRRFLGLLDTGADKTCIAGRDWPANWPIHQTESSLQGLGMACGVARSSQPLRWQHEDKSGIIHPFVIPTLPFTLWGRDIMKDIKVRLMTDSPDDSQDLMIGAIESNLFADQISWKSDQPVWLNQWPLKQEKLQALQQLVTEQLQLGHLEESNSPWNTPVFVIKKKSGKWRLLQDLRAVNATMHDMGALQPGLPSPVAVPKGWEIIIIDLQDCFFNIKLHPEDCKRFAFSVPSPNFKRPYQRFQWKVLPQGMKNSPTLCQKFVDKAILTVRDKYQDSYIVHYMDDILLAHPSRSIVDEILTSMIQALNKHGLVVSTEKIQKYDNLKYLGTHIQGDSVSYQKLQIRTDKLRTLNDFQKLLGNINWIRPFLKLTTGELKPLFEILNPDSNPISTRKLTPEACKALQLMNERLSTARVKRLDLSQPWSLCILKTEYTPTACLWQDGVVEWIHLPHISPKVITPYDIFCTQLIIKGRHRSKELFSKDPDYIVVPYTKVQFDLLLQEKEDWPISLLGFLGEVHFHLPKDPLLTFTLQTAIIFPHMTSTTPLEKGIVIFTDGSANGRSVTYIQGREPIIKENTQNTAQQAEIVAVITAFEEVSQPFNLYTDSKYVTGLFPEIETATLSPRTKIYTELKHLQRLIHKRQEKFYIGHIRGHTGLPGPLAQGNAYADSLTRILTAAGKRTADGSEFEKRTADGSEFESPKKKAKVE

SEQ ID NO: 32 - protein, 2010 aa, synthetic construct
MPAAKRVKLDGGDKKYSIGLDIGTNSVGWAVITDEYKVPSKKFKVLGNTDRHSIKKNLIGALLFDSGETAEATRLKRTARRRYTRRKNRICYLQEIFSNEMAKVDDSFFHRLEESFLVEEDKKHERHPIFGNIVDEVAYHEKYPTIYHLRKKLVDSTDKADLRLIYLALAHMIKFRGHFLIEGDLNPDNSDVDKLFIQLVQTYNQLFEENPINASGVDAKAILSARLSKSRRLENLIAQLPGEKKNGLFGNLIALSLGLTPNFKSNFDLAEDAKLQLSKDTYDDDLDNLLAQIGDQYADLFLAAKNLSDAILLSDILRVNTEITKAPLSASMIKRYDEHHQDLTLLKALVRQQLPEKYKEIFFDQSKNGYAGYIDGGASQEEFYKFIKPILEKMDGTEELLVKLNREDLLRKQRTFDNGSIPHQIHLGELHAILRRQEDFYPFLKDNREKIEKILTFRIPYYVGPLARGNSRFAWMTRKSEETITPWNFEEVVDKGASAQSFIERMTNFDKNLPNEKVLPKHSLLYEYFTVYNELTKVKYVTEGMRKPAFLSGEQKKAIVDLLFKTNRKVTVKQLKEDYFKKIECFDSVEISGVEDRFNASLGTYHDLLKIIKDKDFLDNEENEDILEDIVLTLTLFEDREMIEERLKTYAHLFDDKVMKQLKRRRYTGWGRLSRKLINGIRDKQSGKTILDFLKSDGFANRNFMQLIHDDSLTFKEDIQKAQVSGQGDSLHEHIANLAGSPAIKKGILQTVKVVDELVKVMGRHKPENIVIEMARENQTTQKGQKNSRERMKRIEEGIKELGSQILKEHPVENTQLQNEKLYLYYLQNGRDMYVDQELDINRLSDYDVDHIVPQSFLKDDSIDNKVLTRSDKARGKSDNVPSEEVVKKMKNYWRQLLNAKLITQRKFDNLTKAERGGLSELDKAGFIKRQLVETRQITKHVAQILDSRMNTKYDENDKLIREVKVITLKSKLVSDFRKDFQFYKVREINNYHHAHDAYLNAVVGTALIKKYPKLESEFVYGDYKVYDVRKMIAKSEQEIGKATAKYFFYSNIMNFFKTEITLANGEIRKRPLIETNGETGEIVWDKGRDFATVRKVLSMPQVNIVKKTEVQTGGFSKESILPKRNSDKLIARKKDWDPKKYGGFDSPTVAYSVLVVAKVEKGKSKKLKSVKELLGITIMERSSFEKNPIDFLEAKGYKEVKKDLIIKLPKYSLFELENGRKRMLASAGELQKGNELALPSKYVNFLYLASHYEKLKGSPEDNEQKQLFVEQHKHYLDEIIEQISEFSKRVILADANLDKVLSAYNKHRDKPIREQAENIIHLFTLTNLGAPAAFKYFDTTIDRKRYTSTKEVLDATLIHQSITGLYETRIDLSQLGGDGGGGGEAAAKGSSGGLTAAIDILAPQQCAEPITWKSDEPVWVDQWPLTNDKLAAAQQLVQEQLEAGHITESSSPWNTPIFVIKKKSGKWRLLQDLRAVNATMVLMGALQPGLPSPVAIPQGYLKIIIDLKDCFFSIPLHPSDQKRFAFSLPSTNFKEPMQRFQWKVLPQGMANSPTLCQKYVATAIHKVRHAWKQMYIIHYMDDILIAGKDGQQVLQCFDQLKQELTAAGLHIAPEKVQLQDPYTYLGFELNGPKITNQKAVIRKDKLQTLNDFQKLLGDINWLRPYLKLTTGDLKPLFDTLKGDSDPNSHRSLSKEALASLEKVETAIAEQFVTHINYSLPLIFLIFNTALTPTGLFWQDNPIMWIHLPASPKKVLLPYYDAIADLIILGRDHSKKYFGIEPSTIIQPYSKSQIDWLMQNTEMWPIACASFVGILDNHYPPNKLIQFCKLHTFVFPQIISKTPLNNALLVFTDGSSTGMAAYTLTDTTIKFQTNLNSAQLVELQALIAVLSAFPNQPLNIYTDSAYLAHSIPLLETVAQIKHISETAKLFLQCQQLIYNRSIPFYIGHVRAHSGLPGPIAQGNQRADLATKIVASNINTAGKRTADGSEFEKRTADGSEFESPKKKAKVE

SEQ ID NO: 33 - protein, 2008 aa, synthetic construct
MPAAKRVKLDGGDKKYSIGLDIGTNSVGWAVITDEYKVPSKKFKVLGNTDRHSIKKNLIGALLFDSGETAEATRLKRTARRRYTRRKNRICYLQEIFSNEMAKVDDSFFHRLEESFLVEEDKKHERHPIFGNIVDEVAYHEKYPTIYHLRKKLVDSTDKADLRLIYLALAHMIKFRGHFLIEGDLNPDNSDVDKLFIQLVQTYNQLFEENPINASGVDAKAILSARLSKSRRLENLIAQLPGEKKNGLFGNLIALSLGLTPNFKSNFDLAEDAKLQLSKDTYDDDLDNLLAQIGDQYADLFLAAKNLSDAILLSDILRVNTEITKAPLSASMIKRYDEHHQDLTLLKALVRQQLPEKYKEIFFDQSKNGYAGYIDGGASQEEFYKFIKPILEKMDGTEELLVKLNREDLLRKQRTFDNGSIPHQIHLGELHAILRRQEDFYPFLKDNREKIEKILTFRIPYYVGPLARGNSRFAWMTRKSEETITPWNFEEVVDKGASAQSFIERMTNFDKNLPNEKVLPKHSLLYEYFTVYNELTKVKYVTEGMRKPAFLSGEQKKAIVDLLFKTNRKVTVKQLKEDYFKKIECFDSVEISGVEDRFNASLGTYHDLLKIIKDKDFLDNEENEDILEDIVLTLTLFEDREMIEERLKTYAHLFDDKVMKQLKRRRYTGWGRLSRKLINGIRDKQSGKTILDFLKSDGFANRNFMQLIHDDSLTFKEDIQKAQVSGQGDSLHEHIANLAGSPAIKKGILQTVKVVDELVKVMGRHKPENIVIEMARENQTTQKGQKNSRERMKRIEEGIKELGSQILKEHPVENTQLQNEKLYLYYLQNGRDMYVDQELDINRLSDYDVDHIVPQSFLKDDSIDNKVLTRSDKARGKSDNVPSEEVVKKMKNYWRQLLNAKLITQRKFDNLTKAERGGLSELDKAGFIKRQLVETRQITKHVAQILDSRMNTKYDENDKLIREVKVITLKSKLVSDFRKDFQFYKVREINNYHHAHDAYLNAVVGTALIKKYPKLESEFVYGDYKVYDVRKMIAKSEQEIGKATAKYFFYSNIMNFFKTEITLANGEIRKRPLIETNGETGEIVWDKGRDFATVRKVLSMPQVNIVKKTEVQTGGFSKESILPKRNSDKLIARKKDWDPKKYGGFDSPTVAYSVLVVAKVEKGKSKKLKSVKELLGITIMERSSFEKNPIDFLEAKGYKEVKKDLIIKLPKYSLFELENGRKRMLASAGELQKGNELALPSKYVNFLYLASHYEKLKGSPEDNEQKQLFVEQHKHYLDEIIEQISEFSKRVILADANLDKVLSAYNKHRDKPIREQAENIIHLFTLTNLGAPAAFKYFDTTIDRKRYTSTKEVLDATLIHQSITGLYETRIDLSQLGGDGGGSSPAPGGGGGLTAAIDILAPQQCAEPITWKSDEPVWVDQWPLTNDKLAAAQQLVQEQLEAGHITESSSPWNTPIFVIKKKSGKWRLLQDLRAVNATMVLMGALQPGLPSPVAPPQGYLKIIIDLKDCFFSIPLHPSDQKRFAFSLPSTNFKEPMQRFQWKVLPQGMANSPTLCQKYVATAIHKVRHAWKQMYIIHYMDDILIAGKDGQQVLQCFDQLKQELTAAGLHIAPEKVQLQDPYTYLGFELNGPKITNQKAVIRKDKLQTLNDFQKLLGDINWLRPYLKLTTGDLKPLFDTLKPDSDPNSHRSLSKEALASLEKVETAIAEQFVTHINYSLPLIFLIFNTALTPTGLFWQDNPIMWIHLPASPKKVLLPYYDAIADLIILGRDHSKKYFGIEPSTIIQPYSKSQIDWLMQNTEMWPIACASFVGILDNHYPPNKLIQFCKLHTFVFPQIISKTPLNNALLVFTDGSSTGMAAYTLTDTTIKFQTNLNSAQLVELQALIAVLSAFPNQPLNIYTDSAYLAHSIPLLETVAQIKHISETAKLFLQCQQLIYNRSIPFYIGHVRAHSGLPGPIAQGNQRADLATKIVASNINTAGKRTADGSEFEKRTADGSEFESPKKKAKVE

SEQ ID NO: 34 - protein, 2085 aa, synthetic construct
MPAAKRVKLDGGDKKYSIGLDIGTNSVGWAVITDEYKVPSKKFKVLGNTDRHSIKKNLIGALLFDSGETAEATRLKRTARRRYTRRKNRICYLQEIFSNEMAKVDDSFFHRLEESFLVEEDKKHERHPIFGNIVDEVAYHEKYPTIYHLRKKLVDSTDKADLRLIYLALAHMIKFRGHFLIEGDLNPDNSDVDKLFIQLVQTYNQLFEENPINASGVDAKAILSARLSKSRRLENLIAQLPGEKKNGLFGNLIALSLGLTPNFKSNFDLAEDAKLQLSKDTYDDDLDNLLAQIGDQYADLFLAAKNLSDAILLSDILRVNTEITKAPLSASMIKRYDEHHQDLTLLKALVRQQLPEKYKEIFFDQSKNGYAGYIDGGASQEEFYKFIKPILEKMDGTEELLVKLNREDLLRKQRTFDNGSIPHQIHLGELHAILRRQEDFYPFLKDNREKIEKILTFRIPYYVGPLARGNSRFAWMTRKSEETITPWNFEEVVDKGASAQSFIERMTNFDKNLPNEKVLPKHSLLYEYFTVYNELTKVKYVTEGMRKPAFLSGEQKKAIVDLLFKTNRKVTVKQLKEDYFKKIECFDSVEISGVEDRFNASLGTYHDLLKIIKDKDFLDNEENEDILEDIVLTLTLFEDREMIEERLKTYAHLFDDKVMKQLKRRRYTGWGRLSRKLINGIRDKQSGKTILDFLKSDGFANRNFMQLIHDDSLTFKEDIQKAQVSGQGDSLHEHIANLAGSPAIKKGILQTVKVVDELVKVMGRHKPENIVIEMARENQTTQKGQKNSRERMKRIEEGIKELGSQILKEHPVENTQLQNEKLYLYYLQNGRDMYVDQELDINRLSDYDVDHIVPQSFLKDDSIDNKVLTRSDKARGKSDNVPSEEVVKKMKNYWRQLLNAKLITQRKFDNLTKAERGGLSELDKAGFIKRQLVETRQITKHVAQILDSRMNTKYDENDKLIREVKVITLKSKLVSDFRKDFQFYKVREINNYHHAHDAYLNAVVGTALIKKYPKLESEFVYGDYKVYDVRKMIAKSEQEIGKATAKYFFYSNIMNFFKTEITLANGEIRKRPLIETNGETGEIVWDKGRDFATVRKVLSMPQVNIVKKTEVQTGGFSKESILPKRNSDKLIARKKDWDPKKYGGFDSPTVAYSVLVVAKVEKGKSKKLKSVKELLGITIMERSSFEKNPIDFLEAKGYKEVKKDLIIKLPKYSLFELENGRKRMLASAGELQKGNELALPSKYVNFLYLASHYEKLKGSPEDNEQKQLFVEQHKHYLDEIIEQISEFSKRVILADANLDKVLSAYNKHRDKPIREQAENIIHLFTLTNLGAPAAFKYFDTTIDRKRYTSTKEVLDATLIHQSITGLYETRIDLSQLGGDGGEAAAKGSSGGLDDEYRLYSPLVKPDQNIQFWLEQFPQAWAETAGMGLAKQVPPQVIQLKASATPVSVRQYPLSKEAQEGIRPHVQRLIQQGILVPVQSPWNTPLLPVRKPGTNDYRPVQDLREVNKRVQDIHPTVPNPYNLLCALPPQRSWYTVLDLKDAFFCLRLHPTSQPLFAFEWRDPGTGRTGQLTWTRLPQGFKNSPTIFNEALHRDLANFRIQHPQVTLLQYVDDLLLAGATKQDCLEGTKALLLELSDLGYRASAKKAQICRREVTYLGYSLRDGQRWLTEARKKTVVQIPAPTTAKQVREFLGKAGFCRLFIPGFATLAAPLYPLTKPKGEFSWAPEHQKAFDAIKKALLSAPALALPDVTKPFTLYVDERKGVARGVLTQTLGPWRRPVAYLSKKLDPVASGWPVCLKAIAAVAILVKDADKLTLGQNITVIAPHALENIVRQPPDRWMTNARMTHYQSLLLTERVTFAPPAALNPATLLPEETDEPVTHDCHQLLIEETGVRKDLTDIPLTGEVLTWFTDGSSYVVEGKRMAGAAVVDGTRTIWASSLPEGTSAQKAELMALTQALRLAEGKSINIYTDSRYAFATAHVHGAIYKQRGWLTSAGREIKNKEEILSLLEALHLPKRLAIIHCPGHQKAKDPISRGNQMADRVAKQAAQGVNLLPAGKRTADGSEFEKRTADGSEFESPKKKAKVE

SEQ ID NO: 35 - protein, 2088 aa, synthetic construct
MPAAKRVKLDGGDKKYSIGLDIGTNSVGWAVITDEYKVPSKKFKVLGNTDRHSIKKNLIGALLFDSGETAEATRLKRTARRRYTRRKNRICYLQEIFSNEMAKVDDSFFHRLEESFLVEEDKKHERHPIFGNIVDEVAYHEKYPTIYHLRKKLVDSTDKADLRLIYLALAHMIKFRGHFLIEGDLNPDNSDVDKLFIQLVQTYNQLFEENPINASGVDAKAILSARLSKSRRLENLIAQLPGEKKNGLFGNLIALSLGLTPNFKSNFDLAEDAKLQLSKDTYDDDLDNLLAQIGDQYADLFLAAKNLSDAILLSDILRVNTEITKAPLSASMIKRYDEHHQDLTLLKALVRQQLPEKYKEIFFDQSKNGYAGYIDGGASQEEFYKFIKPILEKMDGTEELLVKLNREDLLRKQRTFDNGSIPHQIHLGELHAILRRQEDFYPFLKDNREKIEKILTFRIPYYVGPLARGNSRFAWMTRKSEETITPWNFEEVVDKGASAQSFIERMTNFDKNLPNEKVLPKHSLLYEYFTVYNELTKVKYVTEGMRKPAFLSGEQKKAIVDLLFKTNRKVTVKQLKEDYFKKIECFDSVEISGVEDRFNASLGTYHDLLKIIKDKDFLDNEENEDILEDIVLTLTLFEDREMIEERLKTYAHLFDDKVMKQLKRRRYTGWGRLSRKLINGIRDKQSGKTILDFLKSDGFANRNFMQLIHDDSLTFKEDIQKAQVSGQGDSLHEHIANLAGSPAIKKGILQTVKVVDELVKVMGRHKPENIVIEMARENQTTQKGQKNSRERMKRIEEGIKELGSQILKEHPVENTQLQNEKLYLYYLQNGRDMYVDQELDINRLSDYDVDHIVPQSFLKDDSIDNKVLTRSDKARGKSDNVPSEEVVKKMKNYWRQLLNAKLITQRKFDNLTKAERGGLSELDKAGFIKRQLVETRQITKHVAQILDSRMNTKYDENDKLIREVKVITLKSKLVSDFRKDFQFYKVREINNYHHAHDAYLNAVVGTALIKKYPKLESEFVYGDYKVYDVRKMIAKSEQEIGKATAKYFFYSNIMNFFKTEITLANGEIRKRPLIETNGETGEIVWDKGRDFATVRKVLSMPQVNIVKKTEVQTGGFSKESILPKRNSDKLIARKKDWDPKKYGGFDSPTVAYSVLVVAKVEKGKSKKLKSVKELLGITIMERSSFEKNPIDFLEAKGYKEVKKDLIIKLPKYSLFELENGRKRMLASAGELQKGNELALPSKYVNFLYLASHYEKLKGSPEDNEQKQLFVEQHKHYLDEIIEQISEFSKRVILADANLDKVLSAYNKHRDKPIREQAENIIHLFTLTNLGAPAAFKYFDTTIDRKRYTSTKEVLDATLIHQSITGLYETRIDLSQLGGDGGEAAAKGGSPAPGGLDDEYRLYSPLVKPDQNIQFWLEQFPQAWAETAGMGLAKQVPPQVIQLKASATPVSVRQYPLSKEAQEGIRPHVQRLIQQGILVPVQSPWNTPLLPVRKPGTNDYRPVQDLREVNKRVQDIHPTVPNPYNLLCALPPQRSWYTVLDLKDAFFCLRLHPTSQPLFAFEWRDPGTGRTGQLTWTRLPQGFKNSPTIFNEALHRDLANFRIQHPQVTLLQYVDDLLLAGATKQDCLEGTKALLLELSDLGYRASAKKAQICRREVTYLGYSLRDGQRWLTEARKKTVVQIPAPTTAKQVREFLGKAGFCRLFIPGFATLAAPLYPLTKPKGEFSWAPEHQKAFDAIKKALLSAPALALPDVTKPFTLYVDERKGVARGVLTQTLGPWRRPVAYLSKKLDPVASGWPVCLKAIAAVAILVKDADKLTLGQNITVIAPHALENIVRQPPDRWMTNARMTHYQSLLLTERVTFAPPAALNPATLLPEETDEPVTHDCHQLLIEETGVRKDLTDIPLTGEVLTWFTDGSSYVVEGKRMAGAAVVDGTRTIWASSLPEGTSAQKAELMALTQALRLAEGKSINIYTDSRYAFATAHVHGAIYKQRGWLTSAGREIKNKEEILSLLEALHLPKRLAIIHCPGHQKAKDPISRGNQMADRVAKQAAQGVNLLPAGKRTADGSEFEKRTADGSEFESPKKKAKVE

SEQ ID NO: 36 - protein, 2123 aa, synthetic construct
MPAAKRVKLDGGDKKYSIGLDIGTNSVGWAVITDEYKVPSKKFKVLGNTDRHSIKKNLIGALLFDSGETAEATRLKRTARRRYTRRKNRICYLQEIFSNEMAKVDDSFFHRLEESFLVEEDKKHERHPIFGNIVDEVAYHEKYPTIYHLRKKLVDSTDKADLRLIYLALAHMIKFRGHFLIEGDLNPDNSDVDKLFIQLVQTYNQLFEENPINASGVDAKAILSARLSKSRRLENLIAQLPGEKKNGLFGNLIALSLGLTPNFKSNFDLAEDAKLQLSKDTYDDDLDNLLAQIGDQYADLFLAAKNLSDAILLSDILRVNTEITKAPLSASMIKRYDEHHQDLTLLKALVRQQLPEKYKEIFFDQSKNGYAGYIDGGASQEEFYKFIKPILEKMDGTEELLVKLNREDLLRKQRTFDNGSIPHQIHLGELHAILRRQEDFYPFLKDNREKIEKILTFRIPYYVGPLARGNSRFAWMTRKSEETITPWNFEEVVDKGASAQSFIERMTNFDKNLPNEKVLPKHSLLYEYFTVYNELTKVKYVTEGMRKPAFLSGEQKKAIVDLLFKTNRKVTVKQLKEDYFKKIECFDSVEISGVEDRFNASLGTYHDLLKIIKDKDFLDNEENEDILEDIVLTLTLFEDREMIEERLKTYAHLFDDKVMKQLKRRRYTGWGRLSRKLINGIRDKQSGKTILDFLKSDGFANRNFMQLIHDDSLTFKEDIQKAQVSGQGDSLHEHIANLAGSPAIKKGILQTVKVVDELVKVMGRHKPENIVIEMARENQTTQKGQKNSRERMKRIEEGIKELGSQILKEHPVENTQLQNEKLYLYYLQNGRDMYVDQELDINRLSDYDVDHIVPQSFLKDDSIDNKVLTRSDKARGKSDNVPSEEVVKKMKNYWRQLLNAKLITQRKFDNLTKAERGGLSELDKAGFIKRQLVETRQITKHVAQILDSRMNTKYDENDKLIREVKVITLKSKLVSDFRKDFQFYKVREINNYHHAHDAYLNAVVGTALIKKYPKLESEFVYGDYKVYDVRKMIAKSEQEIGKATAKYFFYSNIMNFFKTEITLANGEIRKRPLIETNGETGEIVWDKGRDFATVRKVLSMPQVNIVKKTEVQTGGFSKESILPKRNSDKLIARKKDWDPKKYGGFDSPTVAYSVLVVAKVEKGKSKKLKSVKELLGITIMERSSFEKNPIDFLEAKGYKEVKKDLIIKLPKYSLFELENGRKRMLASAGELQKGNELALPSKYVNFLYLASHYEKLKGSPEDNEQKQLFVEQHKHYLDEIIEQISEFSKRVILADANLDKVLSAYNKHRDKPIREQAENIIHLFTLTNLGAPAAFKYFDTTIDRKRYTSTKEVLDATLIHQSITGLYETRIDLSQLGGDGGAEAAAKEAAAKEAAAKEAAAKALEAEAAAKEAAAKEAAAKEAAAKAGGLDDEYRLYSPLVKPDQNIQFWLEQFPQAWAETAGMGLAKQVPPQVIQLKASATPVSVRQYPLSKEAQEGIRPHVQRLIQQGILVPVQSPWNTPLLPVRKPGTNDYRPVQDLREVNKRVQDIHPTVPNPYNLLCALPPQRSWYTVLDLKDAFFCLRLHPTSQPLFAFEWRDPGTGRTGQLTWTRLPQGFKNSPTIFNEALHRDLANFRIQHPQVTLLQYVDDLLLAGATKQDCLEGTKALLLELSDLGYRASAKKAQICRREVTYLGYSLRDGQRWLTEARKKTVVQIPAPTTAKQVREFLGKAGFCRLFIPGFATLAAPLYPLTKPKGEFSWAPEHQKAFDAIKKALLSAPALALPDVTKPFTLYVDERKGVARGVLTQTLGPWRRPVAYLSKKLDPVASGWPVCLKAIAAVAILVKDADKLTLGQNITVIAPHALENIVRQPPDRWMTNARMTHYQSLLLTERVTFAPPAALNPATLLPEETDEPVTHDCHQLLIEETGVRKDLTDIPLTGEVLTWFTDGSSYVVEGKRMAGAAVVDGTRTIWASSLPEGTSAQKAELMALTQALRLAEGKSINIYTDSRYAFATAHVHGAIYKQRGWLTSAGREIKNKEEILSLLEALHLPKRLAIIHCPGHQKAKDPISRGNQMADRVAKQAAQGVNLLPAGKRTADGSEFEKRTADGSEFESPKKKAKVE

SEQ ID NO: 37 - protein, 2092 aa, synthetic construct
MPAAKRVKLDGGDKKYSIGLDIGTNSVGWAVITDEYKVPSKKFKVLGNTDRHSIKKNLIGALLFDSGETAEATRLKRTARRRYTRRKNRICYLQEIFSNEMAKVDDSFFHRLEESFLVEEDKKHERHPIFGNIVDEVAYHEKYPTIYHLRKKLVDSTDKADLRLIYLALAHMIKFRGHFLIEGDLNPDNSDVDKLFIQLVQTYNQLFEENPINASGVDAKAILSARLSKSRRLENLIAQLPGEKKNGLFGNLIALSLGLTPNFKSNFDLAEDAKLQLSKDTYDDDLDNLLAQIGDQYADLFLAAKNLSDAILLSDILRVNTEITKAPLSASMIKRYDEHHQDLTLLKALVRQQLPEKYKEIFFDQSKNGYAGYIDGGASQEEFYKFIKPILEKMDGTEELLVKLNREDLLRKQRTFDNGSIPHQIHLGELHAILRRQEDFYPFLKDNREKIEKILTFRIPYYVGPLARGNSRFAWMTRKSEETITPWNFEEVVDKGASAQSFIERMTNFDKNLPNEKVLPKHSLLYEYFTVYNELTKVKYVTEGMRKPAFLSGEQKKAIVDLLFKTNRKVTVKQLKEDYFKKIECFDSVEISGVEDRFNASLGTYHDLLKIIKDKDFLDNEENEDILEDIVLTLTLFEDREMIEERLKTYAHLFDDKVMKQLKRRRYTGWGRLSRKLINGIRDKQSGKTILDFLKSDGFANRNFMQLIHDDSLTFKEDIQKAQVSGQGDSLHEHIANLAGSPAIKKGILQTVKVVDELVKVMGRHKPENIVIEMARENQTTQKGQKNSRERMKRIEEGIKELGSQILKEHPVENTQLQNEKLYLYYLQNGRDMYVDQELDINRLSDYDVDHIVPQSFLKDDSIDNKVLTRSDKARGKSDNVPSEEVVKKMKNYWRQLLNAKLITQRKFDNLTKAERGGLSELDKAGFIKRQLVETRQITKHVAQILDSRMNTKYDENDKLIREVKVITLKSKLVSDFRKDFQFYKVREINNYHHAHDAYLNAVVGTALIKKYPKLESEFVYGDYKVYDVRKMIAKSEQEIGKATAKYFFYSNIMNFFKTEITLANGEIRKRPLIETNGETGEIVWDKGRDFATVRKVLSMPQVNIVKKTEVQTGGFSKESILPKRNSDKLIARKKDWDPKKYGGFDSPTVAYSVLVVAKVEKGKSKKLKSVKELLGITIMERSSFEKNPIDFLEAKGYKEVKKDLIIKLPKYSLFELENGRKRMLASAGELQKGNELALPSKYVNFLYLASHYEKLKGSPEDNEQKQLFVEQHKHYLDEIIEQISEFSKRVILADANLDKVLSAYNKHRDKPIREQAENIIHLFTLTNLGAPAAFKYFDTTIDRKRYTSTKEVLDATLIHQSITGLYETRIDLSQLGGDGGEAAAKEAAAKEAAAKGGLDDEYRLYSPLVKPDQNIQFWLEQFPQAWAETAGMGLAKQVPPQVIQLKASATPVSVRQYPLSKEAQEGIRPHVQRLIQQGILVPVQSPWNTPLLPVRKPGTNDYRPVQDLREVNKRVQDIHPTVPNPYNLLCALPPQRSWYTVLDLKDAFFCLRLHPTSQPLFAFEWRDPGTGRTGQLTWTRLPQGFKNSPTIFNEALHRDLANFRIQHPQVTLLQYVDDLLLAGATKQDCLEGTKALLLELSDLGYRASAKKAQICRREVTYLGYSLRDGQRWLTEARKKTVVQIPAPTTAKQVREFLGKAGFCRLFIPGFATLAAPLYPLTKPKGEFSWAPEHQKAFDAIKKALLSAPALALPDVTKPFTLYVDERKGVARGVLTQTLGPWRRPVAYLSKKLDPVASGWPVCLKAIAAVAILVKDADKLTLGQNITVIAPHALENIVRQPPDRWMTNARMTHYQSLLLTERVTFAPPAALNPATLLPEETDEPVTHDCHQLLIEETGVRKDLTDIPLTGEVLTWFTDGSSYVVEGKRMAGAAVVDGTRTIWASSLPEGTSAQKAELMALTQALRLAEGKSINIYTDSRYAFATAHVHGAIYKQRGWLTSAGREIKNKEEILSLLEALHLPKRLAIIHCPGHQKAKDPISRGNQMADRVAKQAAQGVNLLPAGKRTADGSEFEKRTADGSEFESPKKKAKVE

SEQ ID NO: 38 - protein, 2086 aa, synthetic construct
MPAAKRVKLDGGDKKYSIGLDIGTNSVGWAVITDEYKVPSKKFKVLGNTDRHSIKKNLIGALLFDSGETAEATRLKRTARRRYTRRKNRICYLQEIFSNEMAKVDDSFFHRLEESFLVEEDKKHERHPIFGNIVDEVAYHEKYPTIYHLRKKLVDSTDKADLRLIYLALAHMIKFRGHFLIEGDLNPDNSDVDKLFIQLVQTYNQLFEENPINASGVDAKAILSARLSKSRRLENLIAQLPGEKKNGLFGNLIALSLGLTPNFKSNFDLAEDAKLQLSKDTYDDDLDNLLAQIGDQYADLFLAAKNLSDAILLSDILRVNTEITKAPLSASMIKRYDEHHQDLTLLKALVRQQLPEKYKEIFFDQSKNGYAGYIDGGASQEEFYKFIKPILEKMDGTEELLVKLNREDLLRKQRTFDNGSIPHQIHLGELHAILRRQEDFYPFLKDNREKIEKILTFRIPYYVGPLARGNSRFAWMTRKSEETITPWNFEEVVDKGASAQSFIERMTNFDKNLPNEKVLPKHSLLYEYFTVYNELTKVKYVTEGMRKPAFLSGEQKKAIVDLLFKTNRKVTVKQLKEDYFKKIECFDSVEISGVEDRFNASLGTYHDLLKIIKDKDFLDNEENEDILEDIVLTLTLFEDREMIEERLKTYAHLFDDKVMKQLKRRRYTGWGRLSRKLINGIRDKQSGKTILDFLKSDGFANRNFMQLIHDDSLTFKEDIQKAQVSGQGDSLHEHIANLAGSPAIKKGILQTVKVVDELVKVMGRHKPENIVIEMARENQTTQKGQKNSRERMKRIEEGIKELGSQILKEHPVENTQLQNEKLYLYYLQNGRDMYVDQELDINRLSDYDVDHIVPQSFLKDDSIDNKVLTRSDKARGKSDNVPSEEVVKKMKNYWRQLLNAKLITQRKFDNLTKAERGGLSELDKAGFIKRQLVETRQITKHVAQILDSRMNTKYDENDKLIREVKVITLKSKLVSDFRKDFQFYKVREINNYHHAHDAYLNAVVGTALIKKYPKLESEFVYGDYKVYDVRKMIAKSEQEIGKATAKYFFYSNIMNFFKTEITLANGEIRKRPLIETNGETGEIVWDKGRDFATVRKVLSMPQVNIVKKTEVQTGGFSKESILPKRNSDKLIARKKDWDPKKYGGFDSPTVAYSVLVVAKVEKGKSKKLKSVKELLGITIMERSSFEKNPIDFLEAKGYKEVKKDLIIKLPKYSLFELENGRKRMLASAGELQKGNELALPSKYVNFLYLASHYEKLKGSPEDNEQKQLFVEQHKHYLDEIIEQISEFSKRVILADANLDKVLSAYNKHRDKPIREQAENIIHLFTLTNLGAPAAFKYFDTTIDRKRYTSTKEVLDATLIHQSITGLYETRIDLSQLGGDGGGGSGSSPAPGGLDDEYRLYSPLVKPDQNIQFWLEQFPQAWAETAGMGLAKQVPPQVIQLKASATPVSVRQYPLSKEAQEGIRPHVQRLIQQGILVPVQSPWNTPLLPVRKPGTNDYRPVQDLREVNKRVQDIHPTVPNPYNLLCALPPQRSWYTVLDLKDAFFCLRLHPTSQPLFAFEWRDPGTGRTGQLTWTRLPQGFKNSPTIFNEALHRDLANFRIQHPQVTLLQYVDDLLLAGATKQDCLEGTKALLLELSDLGYRASAKKAQICRREVTYLGYSLRDGQRWLTEARKKTVVQIPAPTTAKQVREFLGKAGFCRLFIPGFATLAAPLYPLTKPKGEFSWAPEHQKAFDAIKKALLSAPALALPDVTKPFTLYVDERKGVARGVLTQTLGPWRRPVAYLSKKLDPVASGWPVCLKAIAAVAILVKDADKLTLGQNITVIAPHALENIVRQPPDRWMTNARMTHYQSLLLTERVTFAPPAALNPATLLPEETDEPVTHDCHQLLIEETGVRKDLTDIPLTGEVLTWFTDGSSYVVEGKRMAGAAVVDGTRTIWASSLPEGTSAQKAELMALTQALRLAEGKSINIYTDSRYAFATAHVHGAIYKQRGWLTSAGREIKNKEEILSLLEALHLPKRLAIIHCPGHQKAKDPISRGNQMADRVAKQAAQGVNLLPAGKRTADGSEFEKRTADGSEFESPKKKAKVE

SEQ ID NO: 39 - protein, 2102 aa, synthetic construct
MPAAKRVKLDGGDKKYSIGLDIGTNSVGWAVITDEYKVPSKKFKVLGNTDRHSIKKNLIGALLFDSGETAEATRLKRTARRRYTRRKNRICYLQEIFSNEMAKVDDSFFHRLEESFLVEEDKKHERHPIFGNIVDEVAYHEKYPTIYHLRKKLVDSTDKADLRLIYLALAHMIKFRGHFLIEGDLNPDNSDVDKLFIQLVQTYNQLFEENPINASGVDAKAILSARLSKSRRLENLIAQLPGEKKNGLFGNLIALSLGLTPNFKSNFDLAEDAKLQLSKDTYDDDLDNLLAQIGDQYADLFLAAKNLSDAILLSDILRVNTEITKAPLSASMIKRYDEHHQDLTLLKALVRQQLPEKYKEIFFDQSKNGYAGYIDGGASQEEFYKFIKPILEKMDGTEELLVKLNREDLLRKQRTFDNGSIPHQIHLGELHAILRRQEDFYPFLKDNREKIEKILTFRIPYYVGPLARGNSRFAWMTRKSEETITPWNFEEVVDKGASAQSFIERMTNFDKNLPNEKVLPKHSLLYEYFTVYNELTKVKYVTEGMRKPAFLSGEQKKAIVDLLFKTNRKVTVKQLKEDYFKKIECFDSVEISGVEDRFNASLGTYHDLLKIIKDKDFLDNEENEDILEDIVLTLTLFEDREMIEERLKTYAHLFDDKVMKQLKRRRYTGWGRLSRKLINGIRDKQSGKTILDFLKSDGFANRNFMQLIHDDSLTFKEDIQKAQVSGQGDSLHEHIANLAGSPAIKKGILQTVKVVDELVKVMGRHKPENIVIEMARENQTTQKGQKNSRERMKRIEEGIKELGSQILKEHPVENTQLQNEKLYLYYLQNGRDMYVDQELDINRLSDYDVDHIVPQSFLKDDSIDNKVLTRSDKARGKSDNVPSEEVVKKMKNYWRQLLNAKLITQRKFDNLTKAERGGLSELDKAGFIKRQLVETRQITKHVAQILDSRMNTKYDENDKLIREVKVITLKSKLVSDFRKDFQFYKVREINNYHHAHDAYLNAVVGTALIKKYPKLESEFVYGDYKVYDVRKMIAKSEQEIGKATAKYFFYSNIMNFFKTEITLANGEIRKRPLIETNGETGEIVWDKGRDFATVRKVLSMPQVNIVKKTEVQTGGFSKESILPKRNSDKLIARKKDWDPKKYGGFDSPTVAYSVLVVAKVEKGKSKKLKSVKELLGITIMERSSFEKNPIDFLEAKGYKEVKKDLIIKLPKYSLFELENGRKRMLASAGELQKGNELALPSKYVNFLYLASHYEKLKGSPEDNEQKQLFVEQHKHYLDEIIEQISEFSKRVILADANLDKVLSAYNKHRDKPIREQAENIIHLFTLTNLGAPAAFKYFDTTIDRKRYTSTKEVLDATLIHQSITGLYETRIDLSQLGGDGGEAAAKEAAAKEAAAKEAAAKEAAAKGGLDDEYRLYSPLVKPDQNIQFWLEQFPQAWAETAGMGLAKQVPPQVIQLKASATPVSVRQYPLSKEAQEGIRPHVQRLIQQGILVPVQSPWNTPLLPVRKPGTNDYRPVQDLREVNKRVQDIHPTVPNPYNLLCALPPQRSWYTVLDLKDAFFCLRLHPTSQPLFAFEWRDPGTGRTGQLTWTRLPQGFKNSPTIFNEALHRDLANFRIQHPQVTLLQYVDDLLLAGATKQDCLEGTKALLLELSDLGYRASAKKAQICRREVTYLGYSLRDGQRWLTEARKKTVVQIPAPTTAKQVREFLGKAGFCRLFIPGFATLAAPLYPLTKPKGEFSWAPEHQKAFDAIKKALLSAPALALPDVTKPFTLYVDERKGVARGVLTQTLGPWRRPVAYLSKKLDPVASGWPVCLKAIAAVAILVKDADKLTLGQNITVIAPHALENIVRQPPDRWMTNARMTHYQSLLLTERVTFAPPAALNPATLLPEETDEPVTHDCHQLLIEETGVRKDLTDIPLTGEVLTWFTDGSSYVVEGKRMAGAAVVDGTRTIWASSLPEGTSAQKAELMALTQALRLAEGKSINIYTDSRYAFATAHVHGAIYKQRGWLTSAGREIKNKEEILSLLEALHLPKRLAIIHCPGHQKAKDPISRGNQMADRVAKQAAQGVNLLPAGKRTADGSEFEKRTADGSEFESPKKKAKVE

SEQ ID NO: 40 - protein, 2088 aa, synthetic construct
MPAAKRVKLDGGDKKYSIGLDIGTNSVGWAVITDEYKVPSKKFKVLGNTDRHSIKKNLIGALLFDSGETAEATRLKRTARRRYTRRKNRICYLQEIFSNEMAKVDDSFFHRLEESFLVEEDKKHERHPIFGNIVDEVAYHEKYPTIYHLRKKLVDSTDKADLRLIYLALAHMIKFRGHFLIEGDLNPDNSDVDKLFIQLVQTYNQLFEENPINASGVDAKAILSARLSKSRRLENLIAQLPGEKKNGLFGNLIALSLGLTPNFKSNFDLAEDAKLQLSKDTYDDDLDNLLAQIGDQYADLFLAAKNLSDAILLSDILRVNTEITKAPLSASMIKRYDEHHQDLTLLKALVRQQLPEKYKEIFFDQSKNGYAGYIDGGASQEEFYKFIKPILEKMDGTEELLVKLNREDLLRKQRTFDNGSIPHQIHLGELHAILRRQEDFYPFLKDNREKIEKILTFRIPYYVGPLARGNSRFAWMTRKSEETITPWNFEEVVDKGASAQSFIERMTNFDKNLPNEKVLPKHSLLYEYFTVYNELTKVKYVTEGMRKPAFLSGEQKKAIVDLLFKTNRKVTVKQLKEDYFKKIECFDSVEISGVEDRFNASLGTYHDLLKIIKDKDFLDNEENEDILEDIVLTLTLFEDREMIEERLKTYAHLFDDKVMKQLKRRRYTGWGRLSRKLINGIRDKQSGKTILDFLKSDGFANRNFMQLIHDDSLTFKEDIQKAQVSGQGDSLHEHIANLAGSPAIKKGILQTVKVVDELVKVMGRHKPENIVIEMARENQTTQKGQKNSRERMKRIEEGIKELGSQILKEHPVENTQLQNEKLYLYYLQNGRDMYVDQELDINRLSDYDVDHIVPQSFLKDDSIDNKVLTRSDKARGKSDNVPSEEVVKKMKNYWRQLLNAKLITQRKFDNLTKAERGGLSELDKAGFIKRQLVETRQITKHVAQILDSRMNTKYDENDKLIREVKVITLKSKLVSDFRKDFQFYKVREINNYHHAHDAYLNAVVGTALIKKYPKLESEFVYGDYKVYDVRKMIAKSEQEIGKATAKYFFYSNIMNFFKTEITLANGEIRKRPLIETNGETGEIVWDKGRDFATVRKVLSMPQVNIVKKTEVQTGGFSKESILPKRNSDKLIARKKDWDPKKYGGFDSPTVAYSVLVVAKVEKGKSKKLKSVKELLGITIMERSSFEKNPIDFLEAKGYKEVKKDLIIKLPKYSLFELENGRKRMLASAGELQKGNELALPSKYVNFLYLASHYEKLKGSPEDNEQKQLFVEQHKHYLDEIIEQISEFSKRVILADANLDKVLSAYNKHRDKPIREQAENIIHLFTLTNLGAPAAFKYFDTTIDRKRYTSTKEVLDATLIHQSITGLYETRIDLSQLGGDGGGSSGGGEAAAKGGLDDEYRLYSPLVKPDQNIQFWLEQFPQAWAETAGMGLAKQVPPQVIQLKASATPVSVRQYPLSKEAQEGIRPHVQRLIQQGILVPVQSPWNTPLLPVRKPGTNDYRPVQDLREVNKRVQDIHPTVPNPYNLLCALPPQRSWYTVLDLKDAFFCLRLHPTSQPLFAFEWRDPGTGRTGQLTWTRLPQGFKNSPTIFNEALHRDLANFRIQHPQVTLLQYVDDLLLAGATKQDCLEGTKALLLELSDLGYRASAKKAQICRREVTYLGYSLRDGQRWLTEARKKTVVQIPAPTTAKQVREFLGKAGFCRLFIPGFATLAAPLYPLTKPKGEFSWAPEHQKAFDAIKKALLSAPALALPDVTKPFTLYVDERKGVARGVLTQTLGPWRRPVAYLSKKLDPVASGWPVCLKAIAAVAILVKDADKLTLGQNITVIAPHALENIVRQPPDRWMTNARMTHYQSLLLTERVTFAPPAALNPATLLPEETDEPVTHDCHQLLIEETGVRKDLTDIPLTGEVLTWFTDGSSYVVEGKRMAGAAVVDGTRTIWASSLPEGTSAQKAELMALTQALRLAEGKSINIYTDSRYAFATAHVHGAIYKQRGWLTSAGREIKNKEEILSLLEALHLPKRLAIIHCPGHQKAKDPISRGNQMADRVAKQAAQGVNLLPAGKRTADGSEFEKRTADGSEFESPKKKAKVE

SEQ ID NO: 41 - protein, 2089 aa, synthetic construct
MPAAKRVKLDGGDKKYSIGLDIGTNSVGWAVITDEYKVPSKKFKVLGNTDRHSIKKNLIGALLFDSGETAEATRLKRTARRRYTRRKNRICYLQEIFSNEMAKVDDSFFHRLEESFLVEEDKKHERHPIFGNIVDEVAYHEKYPTIYHLRKKLVDSTDKADLRLIYLALAHMIKFRGHFLIEGDLNPDNSDVDKLFIQLVQTYNQLFEENPINASGVDAKAILSARLSKSRRLENLIAQLPGEKKNGLFGNLIALSLGLTPNFKSNFDLAEDAKLQLSKDTYDDDLDNLLAQIGDQYADLFLAAKNLSDAILLSDILRVNTEITKAPLSASMIKRYDEHHQDLTLLKALVRQQLPEKYKEIFFDQSKNGYAGYIDGGASQEEFYKFIKPILEKMDGTEELLVKLNREDLLRKQRTFDNGSIPHQIHLGELHAILRRQEDFYPFLKDNREKIEKILTFRIPYYVGPLARGNSRFAWMTRKSEETITPWNFEEVVDKGASAQSFIERMTNFDKNLPNEKVLPKHSLLYEYFTVYNELTKVKYVTEGMRKPAFLSGEQKKAIVDLLFKTNRKVTVKQLKEDYFKKIECFDSVEISGVEDRFNASLGTYHDLLKIIKDKDFLDNEENEDILEDIVLTLTLFEDREMIEERLKTYAHLFDDKVMKQLKRRRYTGWGRLSRKLINGIRDKQSGKTILDFLKSDGFANRNFMQLIHDDSLTFKEDIQKAQVSGQGDSLHEHIANLAGSPAIKKGILQTVKVVDELVKVMGRHKPENIVIEMARENQTTQKGQKNSRERMKRIEEGIKELGSQILKEHPVENTQLQNEKLYLYYLQNGRDMYVDQELDINRLSDYDVDHIVPQSFLKDDSIDNKVLTRSDKARGKSDNVPSEEVVKKMKNYWRQLLNAKLITQRKFDNLTKAERGGLSELDKAGFIKRQLVETRQITKHVAQILDSRMNTKYDENDKLIREVKVITLKSKLVSDFRKDFQFYKVREINNYHHAHDAYLNAVVGTALIKKYPKLESEFVYGDYKVYDVRKMIAKSEQEIGKATAKYFFYSNIMNFFKTEITLANGEIRKRPLIETNGETGEIVWDKGRDFATVRKVLSMPQVNIVKKTEVQTGGFSKESILPKRNSDKLIARKKDWDPKKYGGFDSPTVAYSVLVVAKVEKGKSKKLKSVKELLGITIMERSSFEKNPIDFLEAKGYKEVKKDLIIKLPKYSLFELENGRKRMLASAGELQKGNELALPSKYVNFLYLASHYEKLKGSPEDNEQKQLFVEQHKHYLDEIIEQISEFSKRVILADANLDKVLSAYNKHRDKPIREQAENIIHLFTLTNLGAPAAFKYFDTTIDRKRYTSTKEVLDATLIHQSITGLYETRIDLSQLGGDGGGSSGSSGSSGSSGGLDDEYRLYSPLVKPDQNIQFWLEQFPQAWAETAGMGLAKQVPPQVIQLKASATPVSVRQYPLSKEAQEGIRPHVQRLIQQGILVPVQSPWNTPLLPVRKPGTNDYRPVQDLREVNKRVQDIHPTVPNPYNLLCALPPQRSWYTVLDLKDAFFCLRLHPTSQPLFAFEWRDPGTGRTGQLTWTRLPQGFKNSPTIFNEALHRDLANFRIQHPQVTLLQYVDDLLLAGATKQDCLEGTKALLLELSDLGYRASAKKAQICRREVTYLGYSLRDGQRWLTEARKKTVVQIPAPTTAKQVREFLGKAGFCRLFIPGFATLAAPLYPLTKPKGEFSWAPEHQKAFDAIKKALLSAPALALPDVTKPFTLYVDERKGVARGVLTQTLGPWRRPVAYLSKKLDPVASGWPVCLKAIAAVAILVKDADKLTLGQNITVIAPHALENIVRQPPDRWMTNARMTHYQSLLLTERVTFAPPAALNPATLLPEETDEPVTHDCHQLLIEETGVRKDLTDIPLTGEVLTWFTDGSSYVVEGKRMAGAAVVDGTRTIWASSLPEGTSAQKAELMALTQALRLAEGKSINIYTDSRYAFATAHVHGAIYKQRGWLTSAGREIKNKEEILSLLEALHLPKRLAIIHCPGHQKAKDPISRGNQMADRVAKQAAQGVNLLPAGKRTADGSEFEKRTADGSEFESPKKKAKVE

SEQ ID NO: 42 - protein, 2088 aa, synthetic construct
MPAAKRVKLDGGDKKYSIGLDIGTNSVGWAVITDEYKVPSKKFKVLGNTDRHSIKKNLIGALLFDSGETAEATRLKRTARRRYTRRKNRICYLQEIFSNEMAKVDDSFFHRLEESFLVEEDKKHERHPIFGNIVDEVAYHEKYPTIYHLRKKLVDSTDKADLRLIYLALAHMIKFRGHFLIEGDLNPDNSDVDKLFIQLVQTYNQLFEENPINASGVDAKAILSARLSKSRRLENLIAQLPGEKKNGLFGNLIALSLGLTPNFKSNFDLAEDAKLQLSKDTYDDDLDNLLAQIGDQYADLFLAAKNLSDAILLSDILRVNTEITKAPLSASMIKRYDEHHQDLTLLKALVRQQLPEKYKEIFFDQSKNGYAGYIDGGASQEEFYKFIKPILEKMDGTEELLVKLNREDLLRKQRTFDNGSIPHQIHLGELHAILRRQEDFYPFLKDNREKIEKILTFRIPYYVGPLARGNSRFAWMTRKSEETITPWNFEEVVDKGASAQSFIERMTNFDKNLPNEKVLPKHSLLYEYFTVYNELTKVKYVTEGMRKPAFLSGEQKKAIVDLLFKTNRKVTVKQLKEDYFKKIECFDSVEISGVEDRFNASLGTYHDLLKIIKDKDFLDNEENEDILEDIVLTLTLFEDREMIEERLKTYAHLFDDKVMKQLKRRRYTGWGRLSRKLINGIRDKQSGKTILDFLKSDGFANRNFMQLIHDDSLTFKEDIQKAQVSGQGDSLHEHIANLAGSPAIKKGILQTVKVVDELVKVMGRHKPENIVIEMARENQTTQKGQKNSRERMKRIEEGIKELGSQILKEHPVENTQLQNEKLYLYYLQNGRDMYVDQELDINRLSDYDVDHIVPQSFLKDDSIDNKVLTRSDKARGKSDNVPSEEVVKKMKNYWRQLLNAKLITQRKFDNLTKAERGGLSELDKAGFIKRQLVETRQITKHVAQILDSRMNTKYDENDKLIREVKVITLKSKLVSDFRKDFQFYKVREINNYHHAHDAYLNAVVGTALIKKYPKLESEFVYGDYKVYDVRKMIAKSEQEIGKATAKYFFYSNIMNFFKTEITLANGEIRKRPLIETNGETGEIVWDKGRDFATVRKVLSMPQVNIVKKTEVQTGGFSKESILPKRNSDKLIARKKDWDPKKYGGFDSPTVAYSVLVVAKVEKGKSKKLKSVKELLGITIMERSSFEKNPIDFLEAKGYKEVKKDLIIKLPKYSLFELENGRKRMLASAGELQKGNELALPSKYVNFLYLASHYEKLKGSPEDNEQKQLFVEQHKHYLDEIIEQISEFSKRVILADANLDKVLSAYNKHRDKPIREQAENIIHLFTLTNLGAPAAFKYFDTTIDRKRYTSTKEVLDATLIHQSITGLYETRIDLSQLGGDGGGSSEAAAKGGGGGLDDEYRLYSPLVKPDQNIQFWLEQFPQAWAETAGMGLAKQVPPQVIQLKASATPVSVRQYPLSKEAQEGIRPHVQRLIQQGILVPVQSPWNTPLLPVRKPGTNDYRPVQDLREVNKRVQDIHPTVPNPYNLLCALPPQRSWYTVLDLKDAFFCLRLHPTSQPLFAFEWRDPGTGRTGQLTWTRLPQGFKNSPTIFNEALHRDLANFRIQHPQVTLLQYVDDLLLAGATKQDCLEGTKALLLELSDLGYRASAKKAQICRREVTYLGYSLRDGQRWLTEARKKTVVQIPAPTTAKQVREFLGKAGFCRLFIPGFATLAAPLYPLTKPKGEFSWAPEHQKAFDAIKKALLSAPALALPDVTKPFTLYVDERKGVARGVLTQTLGPWRRPVAYLSKKLDPVASGWPVCLKAIAAVAILVKDADKLTLGQNITVIAPHALENIVRQPPDRWMTNARMTHYQSLLLTERVTFAPPAALNPATLLPEETDEPVTHDCHQLLIEETGVRKDLTDIPLTGEVLTWFTDGSSYVVEGKRMAGAAVVDGTRTIWASSLPEGTSAQKAELMALTQALRLAEGKSINIYTDSRYAFATAHVHGAIYKQRGWLTSAGREIKNKEEILSLLEALHLPKRLAIIHCPGHQKAKDPISRGNQMADRVAKQAAQGVNLLPAGKRTADGSEFEKRTADGSEFESPKKKAKVE

SEQ ID NO: 43 - protein, 2086 aa, synthetic construct
MPAAKRVKLDGGDKKYSIGLDIGTNSVGWAVITDEYKVPSKKFKVLGNTDRHSIKKNLIGALLFDSGETAEATRLKRTARRRYTRRKNRICYLQEIFSNEMAKVDDSFFHRLEESFLVEEDKKHERHPIFGNIVDEVAYHEKYPTIYHLRKKLVDSTDKADLRLIYLALAHMIKFRGHFLIEGDLNPDNSDVDKLFIQLVQTYNQLFEENPINASGVDAKAILSARLSKSRRLENLIAQLPGEKKNGLFGNLIALSLGLTPNFKSNFDLAEDAKLQLSKDTYDDDLDNLLAQIGDQYADLFLAAKNLSDAILLSDILRVNTEITKAPLSASMIKRYDEHHQDLTLLKALVRQQLPEKYKEIFFDQSKNGYAGYIDGGASQEEFYKFIKPILEKMDGTEELLVKLNREDLLRKQRTFDNGSIPHQIHLGELHAILRRQEDFYPFLKDNREKIEKILTFRIPYYVGPLARGNSRFAWMTRKSEETITPWNFEEVVDKGASAQSFIERMTNFDKNLPNEKVLPKHSLLYEYFTVYNELTKVKYVTEGMRKPAFLSGEQKKAIVDLLFKTNRKVTVKQLKEDYFKKIECFDSVEISGVEDRFNASLGTYHDLLKIIKDKDFLDNEENEDILEDIVLTLTLFEDREMIEERLKTYAHLFDDKVMKQLKRRRYTGWGRLSRKLINGIRDKQSGKTILDFLKSDGFANRNFMQLIHDDSLTFKEDIQKAQVSGQGDSLHEHIANLAGSPAIKKGILQTVKVVDELVKVMGRHKPENIVIEMARENQTTQKGQKNSRERMKRIEEGIKELGSQILKEHPVENTQLQNEKLYLYYLQNGRDMYVDQELDINRLSDYDVDHIVPQSFLKDDSIDNKVLTRSDKARGKSDNVPSEEVVKKMKNYWRQLLNAKLITQRKFDNLTKAERGGLSELDKAGFIKRQLVETRQITKHVAQILDSRMNTKYDENDKLIREVKVITLKSKLVSDFRKDFQFYKVREINNYHHAHDAYLNAVVGTALIKKYPKLESEFVYGDYKVYDVRKMIAKSEQEIGKATAKYFFYSNIMNFFKTEITLANGEIRKRPLIETNGETGEIVWDKGRDFATVRKVLSMPQVNIVKKTEVQTGGFSKESILPKRNSDKLIARKKDWDPKKYGGFDSPTVAYSVLVVAKVEKGKSKKLKSVKELLGITIMERSSFEKNPIDFLEAKGYKEVKKDLIIKLPKYSLFELENGRKRMLASAGELQKGNELALPSKYVNFLYLASHYEKLKGSPEDNEQKQLFVEQHKHYLDEIIEQISEFSKRVILADANLDKVLSAYNKHRDKPIREQAENIIHLFTLTNLGAPAAFKYFDTTIDRKRYTSTKEVLDATLIHQSITGLYETRIDLSQLGGDGGGGGGSSPAPGGLDDEYRLYSPLVKPDQNIQFWLEQFPQAWAETAGMGLAKQVPPQVIQLKASATPVSVRQYPLSKEAQEGIRPHVQRLIQQGILVPVQSPWNTPLLPVRKPGTNDYRPVQDLREVNKRVQDIHPTVPNPYNLLCALPPQRSWYTVLDLKDAFFCLRLHPTSQPLFAFEWRDPGTGRTGQLTWTRLPQGFKNSPTIFNEALHRDLANFRIQHPQVTLLQYVDDLLLAGATKQDCLEGTKALLLELSDLGYRASAKKAQICRREVTYLGYSLRDGQRWLTEARKKTVVQIPAPTTAKQVREFLGKAGFCRLFIPGFATLAAPLYPLTKPKGEFSWAPEHQKAFDAIKKALLSAPALALPDVTKPFTLYVDERKGVARGVLTQTLGPWRRPVAYLSKKLDPVASGWPVCLKAIAAVAILVKDADKLTLGQNITVIAPHALENIVRQPPDRWMTNARMTHYQSLLLTERVTFAPPAALNPATLLPEETDEPVTHDCHQLLIEETGVRKDLTDIPLTGEVLTWFTDGSSYVVEGKRMAGAAVVDGTRTIWASSLPEGTSAQKAELMALTQALRLAEGKSINIYTDSRYAFATAHVHGAIYKQRGWLTSAGREIKNKEEILSLLEALHLPKRLAIIHCPGHQKAKDPISRGNQMADRVAKQAAQGVNLLPAGKRTADGSEFEKRTADGSEFESPKKKAKVE

SEQ ID NO: 44 - protein, 2086 aa, synthetic construct
MPAAKRVKLDGGDKKYSIGLDIGTNSVGWAVITDEYKVPSKKFKVLGNTDRHSIKKNLIGALLFDSGETAEATRLKRTARRRYTRRKNRICYLQEIFSNEMAKVDDSFFHRLEESFLVEEDKKHERHPIFGNIVDEVAYHEKYPTIYHLRKKLVDSTDKADLRLIYLALAHMIKFRGHFLIEGDLNPDNSDVDKLFIQLVQTYNQLFEENPINASGVDAKAILSARLSKSRRLENLIAQLPGEKKNGLFGNLIALSLGLTPNFKSNFDLAEDAKLQLSKDTYDDDLDNLLAQIGDQYADLFLAAKNLSDAILLSDILRVNTEITKAPLSASMIKRYDEHHQDLTLLKALVRQQLPEKYKEIFFDQSKNGYAGYIDGGASQEEFYKFIKPILEKMDGTEELLVKLNREDLLRKQRTFDNGSIPHQIHLGELHAILRRQEDFYPFLKDNREKIEKILTFRIPYYVGPLARGNSRFAWMTRKSEETITPWNFEEVVDKGASAQSFIERMTNFDKNLPNEKVLPKHSLLYEYFTVYNELTKVKYVTEGMRKPAFLSGEQKKAIVDLLFKTNRKVTVKQLKEDYFKKIECFDSVEISGVEDRFNASLGTYHDLLKIIKDKDFLDNEENEDILEDIVLTLTLFEDREMIEERLKTYAHLFDDKVMKQLKRRRYTGWGRLSRKLINGIRDKQSGKTILDFLKSDGFANRNFMQLIHDDSLTFKEDIQKAQVSGQGDSLHEHIANLAGSPAIKKGILQTVKVVDELVKVMGRHKPENIVIEMARENQTTQKGQKNSRERMKRIEEGIKELGSQILKEHPVENTQLQNEKLYLYYLQNGRDMYVDQELDINRLSDYDVDHIVPQSFLKDDSIDNKVLTRSDKARGKSDNVPSEEVVKKMKNYWRQLLNAKLITQRKFDNLTKAERGGLSELDKAGFIKRQLVETRQITKHVAQILDSRMNTKYDENDKLIREVKVITLKSKLVSDFRKDFQFYKVREINNYHHAHDAYLNAVVGTALIKKYPKLESEFVYGDYKVYDVRKMIAKSEQEIGKATAKYFFYSNIMNFFKTEITLANGEIRKRPLIETNGETGEIVWDKGRDFATVRKVLSMPQVNIVKKTEVQTGGFSKESILPKRNSDKLIARKKDWDPKKYGGFDSPTVAYSVLVVAKVEKGKSKKLKSVKELLGITIMERSSFEKNPIDFLEAKGYKEVKKDLIIKLPKYSLFELENGRKRMLASAGELQKGNELALPSKYVNFLYLASHYEKLKGSPEDNEQKQLFVEQHKHYLDEIIEQISEFSKRVILADANLDKVLSAYNKHRDKPIREQAENIIHLFTLTNLGAPAAFKYFDTTIDRKRYTSTKEVLDATLIHQSITGLYETRIDLSQLGGDGGPAPGGSGGGGGLDDEYRLYSPLVKPDQNIQFWLEQFPQAWAETAGMGLAKQVPPQVIQLKASATPVSVRQYPLSKEAQEGIRPHVQRLIQQGILVPVQSPWNTPLLPVRKPGTNDYRPVQDLREVNKRVQDIHPTVPNPYNLLCALPPQRSWYTVLDLKDAFFCLRLHPTSQPLFAFEWRDPGTGRTGQLTWTRLPQGFKNSPTIFNEALHRDLANFRIQHPQVTLLQYVDDLLLAGATKQDCLEGTKALLLELSDLGYRASAKKAQICRREVTYLGYSLRDGQRWLTEARKKTVVQIPAPTTAKQVREFLGKAGFCRLFIPGFATLAAPLYPLTKPKGEFSWAPEHQKAFDAIKKALLSAPALALPDVTKPFTLYVDERKGVARGVLTQTLGPWRRPVAYLSKKLDPVASGWPVCLKAIAAVAILVKDADKLTLGQNITVIAPHALENIVRQPPDRWMTNARMTHYQSLLLTERVTFAPPAALNPATLLPEETDEPVTHDCHQLLIEETGVRKDLTDIPLTGEVLTWFTDGSSYVVEGKRMAGAAVVDGTRTIWASSLPEGTSAQKAELMALTQALRLAEGKSINIYTDSRYAFATAHVHGAIYKQRGWLTSAGREIKNKEEILSLLEALHLPKRLAIIHCPGHQKAKDPISRGNQMADRVAKQAAQGVNLLPAGKRTADGSEFEKRTADGSEFESPKKKAKVE

SEQ ID NO: 45 - protein, 2084 aa, synthetic construct
MPAAKRVKLDGGDKKYSIGLDIGTNSVGWAVITDEYKVPSKKFKVLGNTDRHSIKKNLIGALLFDSGETAEATRLKRTARRRYTRRKNRICYLQEIFSNEMAKVDDSFFHRLEESFLVEEDKKHERHPIFGNIVDEVAYHEKYPTIYHLRKKLVDSTDKADLRLIYLALAHMIKFRGHFLIEGDLNPDNSDVDKLFIQLVQTYNQLFEENPINASGVDAKAILSARLSKSRRLENLIAQLPGEKKNGLFGNLIALSLGLTPNFKSNFDLAEDAKLQLSKDTYDDDLDNLLAQIGDQYADLFLAAKNLSDAILLSDILRVNTEITKAPLSASMIKRYDEHHQDLTLLKALVRQQLPEKYKEIFFDQSKNGYAGYIDGGASQEEFYKFIKPILEKMDGTEELLVKLNREDLLRKQRTFDNGSIPHQIHLGELHAILRRQEDFYPFLKDNREKIEKILTFRIPYYVGPLARGNSRFAWMTRKSEETITPWNFEEVVDKGASAQSFIERMTNFDKNLPNEKVLPKHSLLYEYFTVYNELTKVKYVTEGMRKPAFLSGEQKKAIVDLLFKTNRKVTVKQLKEDYFKKIECFDSVEISGVEDRFNASLGTYHDLLKIIKDKDFLDNEENEDILEDIVLTLTLFEDREMIEERLKTYAHLFDDKVMKQLKRRRYTGWGRLSRKLINGIRDKQSGKTILDFLKSDGFANRNFMQLIHDDSLTFKEDIQKAQVSGQGDSLHEHIANLAGSPAIKKGILQTVKVVDELVKVMGRHKPENIVIEMARENQTTQKGQKNSRERMKRIEEGIKELGSQILKEHPVENTQLQNEKLYLYYLQNGRDMYVDQELDINRLSDYDVDHIVPQSFLKDDSIDNKVLTRSDKARGKSDNVPSEEVVKKMKNYWRQLLNAKLITQRKFDNLTKAERGGLSELDKAGFIKRQLVETRQITKHVAQILDSRMNTKYDENDKLIREVKVITLKSKLVSDFRKDFQFYKVREINNYHHAHDAYLNAVVGTALIKKYPKLESEFVYGDYKVYDVRKMIAKSEQEIGKATAKYFFYSNIMNFFKTEITLANGEIRKRPLIETNGETGEIVWDKGRDFATVRKVLSMPQVNIVKKTEVQTGGFSKESILPKRNSDKLIARKKDWDPKKYGGFDSPTVAYSVLVVAKVEKGKSKKLKSVKELLGITIMERSSFEKNPIDFLEAKGYKEVKKDLIIKLPKYSLFELENGRKRMLASAGELQKGNELALPSKYVNFLYLASHYEKLKGSPEDNEQKQLFVEQHKHYLDEIIEQISEFSKRVILADANLDKVLSAYNKHRDKPIREQAENIIHLFTLTNLGAPAAFKYFDTTIDRKRYTSTKEVLDATLIHQSITGLYETRIDLSQLGGDGGPAPAPAPGGLDDEYRLYSPLVKPDQNIQFWLEQFPQAWAETAGMGLAKQVPPQVIQLKASATPVSVRQYPLSKEAQEGIRPHVQRLIQQGILVPVQSPWNTPLLPVRKPGTNDYRPVQDLREVNKRVQDIHPTVPNPYNLLCALPPQRSWYTVLDLKDAFFCLRLHPTSQPLFAFEWRDPGTGRTGQLTWTRLPQGFKNSPTIFNEALHRDLANFRIQHPQVTLLQYVDDLLLAGATKQDCLEGTKALLLELSDLGYRASAKKAQICRREVTYLGYSLRDGQRWLTEARKKTVVQIPAPTTAKQVREFLGKAGFCRLFIPGFATLAAPLYPLTKPKGEFSWAPEHQKAFDAIKKALLSAPALALPDVTKPFTLYVDERKGVARGVLTQTLGPWRRPVAYLSKKLDPVASGWPVCLKAIAAVAILVKDADKLTLGQNITVIAPHALENIVRQPPDRWMTNARMTHYQSLLLTERVTFAPPAALNPATLLPEETDEPVTHDCHQLLIEETGVRKDLTDIPLTGEVLTWFTDGSSYVVEGKRMAGAAVVDGTRTIWASSLPEGTSAQKAELMALTQALRLAEGKSINIYTDSRYAFATAHVHGAIYKQRGWLTSAGREIKNKEEILSLLEALHLPKRLAIIHCPGHQKAKDPISRGNQMADRVAKQAAQGVNLLPAGKRTADGSEFEKRTADGSEFESPKKKAKVE

SEQ ID NO: 46 - protein, 2097 aa, synthetic construct
MPAAKRVKLDGGDKKYSIGLDIGTNSVGWAVITDEYKVPSKKFKVLGNTDRHSIKKNLIGALLFDSGETAEATRLKRTARRRYTRRKNRICYLQEIFSNEMAKVDDSFFHRLEESFLVEEDKKHERHPIFGNIVDEVAYHEKYPTIYHLRKKLVDSTDKADLRLIYLALAHMIKFRGHFLIEGDLNPDNSDVDKLFIQLVQTYNQLFEENPINASGVDAKAILSARLSKSRRLENLIAQLPGEKKNGLFGNLIALSLGLTPNFKSNFDLAEDAKLQLSKDTYDDDLDNLLAQIGDQYADLFLAAKNLSDAILLSDILRVNTEITKAPLSASMIKRYDEHHQDLTLLKALVRQQLPEKYKEIFFDQSKNGYAGYIDGGASQEEFYKFIKPILEKMDGTEELLVKLNREDLLRKQRTFDNGSIPHQIHLGELHAILRRQEDFYPFLKDNREKIEKILTFRIPYYVGPLARGNSRFAWMTRKSEETITPWNFEEVVDKGASAQSFIERMTNFDKNLPNEKVLPKHSLLYEYFTVYNELTKVKYVTEGMRKPAFLSGEQKKAIVDLLFKTNRKVTVKQLKEDYFKKIECFDSVEISGVEDRFNASLGTYHDLLKIIKDKDFLDNEENEDILEDIVLTLTLFEDREMIEERLKTYAHLFDDKVMKQLKRRRYTGWGRLSRKLINGIRDKQSGKTILDFLKSDGFANRNFMQLIHDDSLTFKEDIQKAQVSGQGDSLHEHIANLAGSPAIKKGILQTVKVVDELVKVMGRHKPENIVIEMARENQTTQKGQKNSRERMKRIEEGIKELGSQILKEHPVENTQLQNEKLYLYYLQNGRDMYVDQELDINRLSDYDVDHIVPQSFLKDDSIDNKVLTRSDKARGKSDNVPSEEVVKKMKNYWRQLLNAKLITQRKFDNLTKAERGGLSELDKAGFIKRQLVETRQITKHVAQILDSRMNTKYDENDKLIREVKVITLKSKLVSDFRKDFQFYKVREINNYHHAHDAYLNAVVGTALIKKYPKLESEFVYGDYKVYDVRKMIAKSEQEIGKATAKYFFYSNIMNFFKTEITLANGEIRKRPLIETNGETGEIVWDKGRDFATVRKVLSMPQVNIVKKTEVQTGGFSKESILPKRNSDKLIARKKDWDPKKYGGFDSPTVAYSVLVVAKVEKGKSKKLKSVKELLGITIMERSSFEKNPIDFLEAKGYKEVKKDLIIKLPKYSLFELENGRKRMLASAGELQKGNELALPSKYVNFLYLASHYEKLKGSPEDNEQKQLFVEQHKHYLDEIIEQISEFSKRVILADANLDKVLSAYNKHRDKPIREQAENIIHLFTLTNLGAPAAFKYFDTTIDRKRYTSTKEVLDATLIHQSITGLYETRIDLSQLGGDGGEAAAKEAAAKEAAAKEAAAKGGLDDEYRLYSPLVKPDQNIQFWLEQFPQAWAETAGMGLAKQVPPQVIQLKASATPVSVRQYPLSKEAQEGIRPHVQRLIQQGILVPVQSPWNTPLLPVRKPGTNDYRPVQDLREVNKRVQDIHPTVPNPYNLLCALPPQRSWYTVLDLKDAFFCLRLHPTSQPLFAFEWRDPGTGRTGQLTWTRLPQGFKNSPTIFNEALHRDLANFRIQHPQVTLLQYVDDLLLAGATKQDCLEGTKALLLELSDLGYRASAKKAQICRREVTYLGYSLRDGQRWLTEARKKTVVQIPAPTTAKQVREFLGKAGFCRLFIPGFATLAAPLYPLTKPKGEFSWAPEHQKAFDAIKKALLSAPALALPDVTKPFTLYVDERKGVARGVLTQTLGPWRRPVAYLSKKLDPVASGWPVCLKAIAAVAILVKDADKLTLGQNITVIAPHALENIVRQPPDRWMTNARMTHYQSLLLTERVTFAPPAALNPATLLPEETDEPVTHDCHQLLIEETGVRKDLTDIPLTGEVLTWFTDGSSYVVEGKRMAGAAVVDGTRTIWASSLPEGTSAQKAELMALTQALRLAEGKSINIYTDSRYAFATAHVHGAIYKQRGWLTSAGREIKNKEEILSLLEALHLPKRLAIIHCPGHQKAKDPISRGNQMADRVAKQAAQGVNLLPAGKRTADGSEFEKRTADGSEFESPKKKAKVE

SEQ ID NO: 47 - protein, 2083 aa, synthetic construct
MPAAKRVKLDGGDKKYSIGLDIGTNSVGWAVITDEYKVPSKKFKVLGNTDRHSIKKNLIGALLFDSGETAEATRLKRTARRRYTRRKNRICYLQEIFSNEMAKVDDSFFHRLEESFLVEEDKKHERHPIFGNIVDEVAYHEKYPTIYHLRKKLVDSTDKADLRLIYLALAHMIKFRGHFLIEGDLNPDNSDVDKLFIQLVQTYNQLFEENPINASGVDAKAILSARLSKSRRLENLIAQLPGEKKNGLFGNLIALSLGLTPNFKSNFDLAEDAKLQLSKDTYDDDLDNLLAQIGDQYADLFLAAKNLSDAILLSDILRVNTEITKAPLSASMIKRYDEHHQDLTLLKALVRQQLPEKYKEIFFDQSKNGYAGYIDGGASQEEFYKFIKPILEKMDGTEELLVKLNREDLLRKQRTFDNGSIPHQIHLGELHAILRRQEDFYPFLKDNREKIEKILTFRIPYYVGPLARGNSRFAWMTRKSEETITPWNFEEVVDKGASAQSFIERMTNFDKNLPNEKVLPKHSLLYEYFTVYNELTKVKYVTEGMRKPAFLSGEQKKAIVDLLFKTNRKVTVKQLKEDYFKKIECFDSVEISGVEDRFNASLGTYHDLLKIIKDKDFLDNEENEDILEDIVLTLTLFEDREMIEERLKTYAHLFDDKVMKQLKRRRYTGWGRLSRKLINGIRDKQSGKTILDFLKSDGFANRNFMQLIHDDSLTFKEDIQKAQVSGQGDSLHEHIANLAGSPAIKKGILQTVKVVDELVKVMGRHKPENIVIEMARENQTTQKGQKNSRERMKRIEEGIKELGSQILKEHPVENTQLQNEKLYLYYLQNGRDMYVDQELDINRLSDYDVDHIVPQSFLKDDSIDNKVLTRSDKARGKSDNVPSEEVVKKMKNYWRQLLNAKLITQRKFDNLTKAERGGLSELDKAGFIKRQLVETRQITKHVAQILDSRMNTKYDENDKLIREVKVITLKSKLVSDFRKDFQFYKVREINNYHHAHDAYLNAVVGTALIKKYPKLESEFVYGDYKVYDVRKMIAKSEQEIGKATAKYFFYSNIMNFFKTEITLANGEIRKRPLIETNGETGEIVWDKGRDFATVRKVLSMPQVNIVKKTEVQTGGFSKESILPKRNSDKLIARKKDWDPKKYGGFDSPTVAYSVLVVAKVEKGKSKKLKSVKELLGITIMERSSFEKNPIDFLEAKGYKEVKKDLIIKLPKYSLFELENGRKRMLASAGELQKGNELALPSKYVNFLYLASHYEKLKGSPEDNEQKQLFVEQHKHYLDEIIEQISEFSKRVILADANLDKVLSAYNKHRDKPIREQAENIIHLFTLTNLGAPAAFKYFDTTIDRKRYTSTKEVLDATLIHQSITGLYETRIDLSQLGGDGGGSSPAPGGLDDEYRLYSPLVKPDQNIQFWLEQFPQAWAETAGMGLAKQVPPQVIQLKASATPVSVRQYPLSKEAQEGIRPHVQRLIQQGILVPVQSPWNTPLLPVRKPGTNDYRPVQDLREVNKRVQDIHPTVPNPYNLLCALPPQRSWYTVLDLKDAFFCLRLHPTSQPLFAFEWRDPGTGRTGQLTWTRLPQGFKNSPTIFNEALHRDLANFRIQHPQVTLLQYVDDLLLAGATKQDCLEGTKALLLELSDLGYRASAKKAQICRREVTYLGYSLRDGQRWLTEARKKTVVQIPAPTTAKQVREFLGKAGFCRLFIPGFATLAAPLYPLTKPKGEFSWAPEHQKAFDAIKKALLSAPALALPDVTKPFTLYVDERKGVARGVLTQTLGPWRRPVAYLSKKLDPVASGWPVCLKAIAAVAILVKDADKLTLGQNITVIAPHALENIVRQPPDRWMTNARMTHYQSLLLTERVTFAPPAALNPATLLPEETDEPVTHDCHQLLIEETGVRKDLTDIPLTGEVLTWFTDGSSYVVEGKRMAGAAVVDGTRTIWASSLPEGTSAQKAELMALTQALRLAEGKSINIYTDSRYAFATAHVHGAIYKQRGWLTSAGREIKNKEEILSLLEALHLPKRLAIIHCPGHQKAKDPISRGNQMADRVAKQAAQGVNLLPAGKRTADGSEFEKRTADGSEFESPKKKAKVE

SEQ ID NO: 48 - protein, 2085 aa, synthetic construct
MPAAKRVKLDGGDKKYSIGLDIGTNSVGWAVITDEYKVPSKKFKVLGNTDRHSIKKNLIGALLFDSGETAEATRLKRTARRRYTRRKNRICYLQEIFSNEMAKVDDSFFHRLEESFLVEEDKKHERHPIFGNIVDEVAYHEKYPTIYHLRKKLVDSTDKADLRLIYLALAHMIKFRGHFLIEGDLNPDNSDVDKLFIQLVQTYNQLFEENPINASGVDAKAILSARLSKSRRLENLIAQLPGEKKNGLFGNLIALSLGLTPNFKSNFDLAEDAKLQLSKDTYDDDLDNLLAQIGDQYADLFLAAKNLSDAILLSDILRVNTEITKAPLSASMIKRYDEHHQDLTLLKALVRQQLPEKYKEIFFDQSKNGYAGYIDGGASQEEFYKFIKPILEKMDGTEELLVKLNREDLLRKQRTFDNGSIPHQIHLGELHAILRRQEDFYPFLKDNREKIEKILTFRIPYYVGPLARGNSRFAWMTRKSEETITPWNFEEVVDKGASAQSFIERMTNFDKNLPNEKVLPKHSLLYEYFTVYNELTKVKYVTEGMRKPAFLSGEQKKAIVDLLFKTNRKVTVKQLKEDYFKKIECFDSVEISGVEDRFNASLGTYHDLLKIIKDKDFLDNEENEDILEDIVLTLTLFEDREMIEERLKTYAHLFDDKVMKQLKRRRYTGWGRLSRKLINGIRDKQSGKTILDFLKSDGFANRNFMQLIHDDSLTFKEDIQKAQVSGQGDSLHEHIANLAGSPAIKKGILQTVKVVDELVKVMGRHKPENIVIEMARENQTTQKGQKNSRERMKRIEEGIKELGSQILKEHPVENTQLQNEKLYLYYLQNGRDMYVDQELDINRLSDYDVDHIVPQSFLKDDSIDNKVLTRSDKARGKSDNVPSEEVVKKMKNYWRQLLNAKLITQRKFDNLTKAERGGLSELDKAGFIKRQLVETRQITKHVAQILDSRMNTKYDENDKLIREVKVITLKSKLVSDFRKDFQFYKVREINNYHHAHDAYLNAVVGTALIKKYPKLESEFVYGDYKVYDVRKMIAKSEQEIGKATAKYFFYSNIMNFFKTEITLANGEIRKRPLIETNGETGEIVWDKGRDFATVRKVLSMPQVNIVKKTEVQTGGFSKESILPKRNSDKLIARKKDWDPKKYGGFDSPTVAYSVLVVAKVEKGKSKKLKSVKELLGITIMERSSFEKNPIDFLEAKGYKEVKKDLIIKLPKYSLFELENGRKRMLASAGELQKGNELALPSKYVNFLYLASHYEKLKGSPEDNEQKQLFVEQHKHYLDEIIEQISEFSKRVILADANLDKVLSAYNKHRDKPIREQAENIIHLFTLTNLGAPAAFKYFDTTIDRKRYTSTKEVLDATLIHQSITGLYETRIDLSQLGGDGGEAAAKGGGGGLDDEYRLYSPLVKPDQNIQFWLEQFPQAWAETAGMGLAKQVPPQVIQLKASATPVSVRQYPLSKEAQEGIRPHVQRLIQQGILVPVQSPWNTPLLPVRKPGTNDYRPVQDLREVNKRVQDIHPTVPNPYNLLCALPPQRSWYTVLDLKDAFFCLRLHPTSQPLFAFEWRDPGTGRTGQLTWTRLPQGFKNSPTIFNEALHRDLANFRIQHPQVTLLQYVDDLLLAGATKQDCLEGTKALLLELSDLGYRASAKKAQICRREVTYLGYSLRDGQRWLTEARKKTVVQIPAPTTAKQVREFLGKAGFCRLFIPGFATLAAPLYPLTKPKGEFSWAPEHQKAFDAIKKALLSAPALALPDVTKPFTLYVDERKGVARGVLTQTLGPWRRPVAYLSKKLDPVASGWPVCLKAIAAVAILVKDADKLTLGQNITVIAPHALENIVRQPPDRWMTNARMTHYQSLLLTERVTFAPPAALNPATLLPEETDEPVTHDCHQLLIEETGVRKDLTDIPLTGEVLTWFTDGSSYVVEGKRMAGAAVVDGTRTIWASSLPEGTSAQKAELMALTQALRLAEGKSINIYTDSRYAFATAHVHGAIYKQRGWLTSAGREIKNKEEILSLLEALHLPKRLAIIHCPGHQKAKDPISRGNQMADRVAKQAAQGVNLLPAGKRTADGSEFEKRTADGSEFESPKKKAKVE

SEQ ID NO: 49 - protein, 2088 aa, synthetic construct
MPAAKRVKLDGGDKKYSIGLDIGTNSVGWAVITDEYKVPSKKFKVLGNTDRHSIKKNLIGALLFDSGETAEATRLKRTARRRYTRRKNRICYLQEIFSNEMAKVDDSFFHRLEESFLVEEDKKHERHPIFGNIVDEVAYHEKYPTIYHLRKKLVDSTDKADLRLIYLALAHMIKFRGHFLIEGDLNPDNSDVDKLFIQLVQTYNQLFEENPINASGVDAKAILSARLSKSRRLENLIAQLPGEKKNGLFGNLIALSLGLTPNFKSNFDLAEDAKLQLSKDTYDDDLDNLLAQIGDQYADLFLAAKNLSDAILLSDILRVNTEITKAPLSASMIKRYDEHHQDLTLLKALVRQQLPEKYKEIFFDQSKNGYAGYIDGGASQEEFYKFIKPILEKMDGTEELLVKLNREDLLRKQRTFDNGSIPHQIHLGELHAILRRQEDFYPFLKDNREKIEKILTFRIPYYVGPLARGNSRFAWMTRKSEETITPWNFEEVVDKGASAQSFIERMTNFDKNLPNEKVLPKHSLLYEYFTVYNELTKVKYVTEGMRKPAFLSGEQKKAIVDLLFKTNRKVTVKQLKEDYFKKIECFDSVEISGVEDRFNASLGTYHDLLKIIKDKDFLDNEENEDILEDIVLTLTLFEDREMIEERLKTYAHLFDDKVMKQLKRRRYTGWGRLSRKLINGIRDKQSGKTILDFLKSDGFANRNFMQLIHDDSLTFKEDIQKAQVSGQGDSLHEHIANLAGSPAIKKGILQTVKVVDELVKVMGRHKPENIVIEMARENQTTQKGQKNSRERMKRIEEGIKELGSQILKEHPVENTQLQNEKLYLYYLQNGRDMYVDQELDINRLSDYDVDHIVPQSFLKDDSIDNKVLTRSDKARGKSDNVPSEEVVKKMKNYWRQLLNAKLITQRKFDNLTKAERGGLSELDKAGFIKRQLVETRQITKHVAQILDSRMNTKYDENDKLIREVKVITLKSKLVSDFRKDFQFYKVREINNYHHAHDAYLNAVVGTALIKKYPKLESEFVYGDYKVYDVRKMIAKSEQEIGKATAKYFFYSNIMNFFKTEITLANGEIRKRPLIETNGETGEIVWDKGRDFATVRKVLSMPQVNIVKKTEVQTGGFSKESILPKRNSDKLIARKKDWDPKKYGGFDSPTVAYSVLVVAKVEKGKSKKLKSVKELLGITIMERSSFEKNPIDFLEAKGYKEVKKDLIIKLPKYSLFELENGRKRMLASAGELQKGNELALPSKYVNFLYLASHYEKLKGSPEDNEQKQLFVEQHKHYLDEIIEQISEFSKRVILADANLDKVLSAYNKHRDKPIREQAENIIHLFTLTNLGAPAAFKYFDTTIDRKRYTSTKEVLDATLIHQSITGLYETRIDLSQLGGDGGGGSEAAAKPAPGGLDDEYRLYSPLVKPDQNIQFWLEQFPQAWAETAGMGLAKQVPPQVIQLKASATPVSVRQYPLSKEAQEGIRPHVQRLIQQGILVPVQSPWNTPLLPVRKPGTNDYRPVQDLREVNKRVQDIHPTVPNPYNLLCALPPQRSWYTVLDLKDAFFCLRLHPTSQPLFAFEWRDPGTGRTGQLTWTRLPQGFKNSPTIFNEALHRDLANFRIQHPQVTLLQYVDDLLLAGATKQDCLEGTKALLLELSDLGYRASAKKAQICRREVTYLGYSLRDGQRWLTEARKKTVVQIPAPTTAKQVREFLGKAGFCRLFIPGFATLAAPLYPLTKPKGEFSWAPEHQKAFDAIKKALLSAPALALPDVTKPFTLYVDERKGVARGVLTQTLGPWRRPVAYLSKKLDPVASGWPVCLKAIAAVAILVKDADKLTLGQNITVIAPHALENIVRQPPDRWMTNARMTHYQSLLLTERVTFAPPAALNPATLLPEETDEPVTHDCHQLLIEETGVRKDLTDIPLTGEVLTWFTDGSSYVVEGKRMAGAAVVDGTRTIWASSLPEGTSAQKAELMALTQALRLAEGKSINIYTDSRYAFATAHVHGAIYKQRGWLTSAGREIKNKEEILSLLEALHLPKRLAIIHCPGHQKAKDPISRGNQMADRVAKQAAQGVNLLPAGKRTADGSEFEKRTADGSEFESPKKKAKVE

SEQ ID NO: 50 - protein, 2088 aa, synthetic construct
MPAAKRVKLDGGDKKYSIGLDIGTNSVGWAVITDEYKVPSKKFKVLGNTDRHSIKKNLIGALLFDSGETAEATRLKRTARRRYTRRKNRICYLQEIFSNEMAKVDDSFFHRLEESFLVEEDKKHERHPIFGNIVDEVAYHEKYPTIYHLRKKLVDSTDKADLRLIYLALAHMIKFRGHFLIEGDLNPDNSDVDKLFIQLVQTYNQLFEENPINASGVDAKAILSARLSKSRRLENLIAQLPGEKKNGLFGNLIALSLGLTPNFKSNFDLAEDAKLQLSKDTYDDDLDNLLAQIGDQYADLFLAAKNLSDAILLSDILRVNTEITKAPLSASMIKRYDEHHQDLTLLKALVRQQLPEKYKEIFFDQSKNGYAGYIDGGASQEEFYKFIKPILEKMDGTEELLVKLNREDLLRKQRTFDNGSIPHQIHLGELHAILRRQEDFYPFLKDNREKIEKILTFRIPYYVGPLARGNSRFAWMTRKSEETITPWNFEEVVDKGASAQSFIERMTNFDKNLPNEKVLPKHSLLYEYFTVYNELTKVKYVTEGMRKPAFLSGEQKKAIVDLLFKTNRKVTVKQLKEDYFKKIECFDSVEISGVEDRFNASLGTYHDLLKIIKDKDFLDNEENEDILEDIVLTLTLFEDREMIEERLKTYAHLFDDKVMKQLKRRRYTGWGRLSRKLINGIRDKQSGKTILDFLKSDGFANRNFMQLIHDDSLTFKEDIQKAQVSGQGDSLHEHIANLAGSPAIKKGILQTVKVVDELVKVMGRHKPENIVIEMARENQTTQKGQKNSRERMKRIEEGIKELGSQILKEHPVENTQLQNEKLYLYYLQNGRDMYVDQELDINRLSDYDVDHIVPQSFLKDDSIDNKVLTRSDKARGKSDNVPSEEVVKKMKNYWRQLLNAKLITQRKFDNLTKAERGGLSELDKAGFIKRQLVETRQITKHVAQILDSRMNTKYDENDKLIREVKVITLKSKLVSDFRKDFQFYKVREINNYHHAHDAYLNAVVGTALIKKYPKLESEFVYGDYKVYDVRKMIAKSEQEIGKATAKYFFYSNIMNFFKTEITLANGEIRKRPLIETNGETGEIVWDKGRDFATVRKVLSMPQVNIVKKTEVQTGGFSKESILPKRNSDKLIARKKDWDPKKYGGFDSPTVAYSVLVVAKVEKGKSKKLKSVKELLGITIMERSSFEKNPIDFLEAKGYKEVKKDLIIKLPKYSLFELENGRKRMLASAGELQKGNELALPSKYVNFLYLASHYEKLKGSPEDNEQKQLFVEQHKHYLDEIIEQISEFSKRVILADANLDKVLSAYNKHRDKPIREQAENIIHLFTLTNLGAPAAFKYFDTTIDRKRYTSTKEVLDATLIHQSITGLYETRIDLSQLGGDGGPAPGGGEAAAKGGLDDEYRLYSPLVKPDQNIQFWLEQFPQAWAETAGMGLAKQVPPQVIQLKASATPVSVRQYPLSKEAQEGIRPHVQRLIQQGILVPVQSPWNTPLLPVRKPGTNDYRPVQDLREVNKRVQDIHPTVPNPYNLLCALPPQRSWYTVLDLKDAFFCLRLHPTSQPLFAFEWRDPGTGRTGQLTWTRLPQGFKNSPTIFNEALHRDLANFRIQHPQVTLLQYVDDLLLAGATKQDCLEGTKALLLELSDLGYRASAKKAQICRREVTYLGYSLRDGQRWLTEARKKTVVQIPAPTTAKQVREFLGKAGFCRLFIPGFATLAAPLYPLTKPKGEFSWAPEHQKAFDAIKKALLSAPALALPDVTKPFTLYVDERKGVARGVLTQTLGPWRRPVAYLSKKLDPVASGWPVCLKAIAAVAILVKDADKLTLGQNITVIAPHALENIVRQPPDRWMTNARMTHYQSLLLTERVTFAPPAALNPATLLPEETDEPVTHDCHQLLIEETGVRKDLTDIPLTGEVLTWFTDGSSYVVEGKRMAGAAVVDGTRTIWASSLPEGTSAQKAELMALTQALRLAEGKSINIYTDSRYAFATAHVHGAIYKQRGWLTSAGREIKNKEEILSLLEALHLPKRLAIIHCPGHQKAKDPISRGNQMADRVAKQAAQGVNLLPAGKRTADGSEFEKRTADGSEFESPKKKAKVE

SEQ ID NO: 51 - protein, 2092 aa, synthetic construct
MPAAKRVKLDGGDKKYSIGLDIGTNSVGWAVITDEYKVPSKKFKVLGNTDRHSIKKNLIGALLFDSGETAEATRLKRTARRRYTRRKNRICYLQEIFSNEMAKVDDSFFHRLEESFLVEEDKKHERHPIFGNIVDEVAYHEKYPTIYHLRKKLVDSTDKADLRLIYLALAHMIKFRGHFLIEGDLNPDNSDVDKLFIQLVQTYNQLFEENPINASGVDAKAILSARLSKSRRLENLIAQLPGEKKNGLFGNLIALSLGLTPNFKSNFDLAEDAKLQLSKDTYDDDLDNLLAQIGDQYADLFLAAKNLSDAILLSDILRVNTEITKAPLSASMIKRYDEHHQDLTLLKALVRQQLPEKYKEIFFDQSKNGYAGYIDGGASQEEFYKFIKPILEKMDGTEELLVKLNREDLLRKQRTFDNGSIPHQIHLGELHAILRRQEDFYPFLKDNREKIEKILTFRIPYYVGPLARGNSRFAWMTRKSEETITPWNFEEVVDKGASAQSFIERMTNFDKNLPNEKVLPKHSLLYEYFTVYNELTKVKYVTEGMRKPAFLSGEQKKAIVDLLFKTNRKVTVKQLKEDYFKKIECFDSVEISGVEDRFNASLGTYHDLLKIIKDKDFLDNEENEDILEDIVLTLTLFEDREMIEERLKTYAHLFDDKVMKQLKRRRYTGWGRLSRKLINGIRDKQSGKTILDFLKSDGFANRNFMQLIHDDSLTFKEDIQKAQVSGQGDSLHEHIANLAGSPAIKKGILQTVKVVDELVKVMGRHKPENIVIEMARENQTTQKGQKNSRERMKRIEEGIKELGSQILKEHPVENTQLQNEKLYLYYLQNGRDMYVDQELDINRLSDYDVDHIVPQSFLKDDSIDNKVLTRSDKARGKSDNVPSEEVVKKMKNYWRQLLNAKLITQRKFDNLTKAERGGLSELDKAGFIKRQLVETRQITKHVAQILDSRMNTKYDENDKLIREVKVITLKSKLVSDFRKDFQFYKVREINNYHHAHDAYLNAVVGTALIKKYPKLESEFVYGDYKVYDVRKMIAKSEQEIGKATAKYFFYSNIMNFFKTEITLANGEIRKRPLIETNGETGEIVWDKGRDFATVRKVLSMPQVNIVKKTEVQTGGFSKESILPKRNSDKLIARKKDWDPKKYGGFDSPTVAYSVLVVAKVEKGKSKKLKSVKELLGITIMERSSFEKNPIDFLEAKGYKEVKKDLIIKLPKYSLFELENGRKRMLASAGELQKGNELALPSKYVNFLYLASHYEKLKGSPEDNEQKQLFVEQHKHYLDEIIEQISEFSKRVILADANLDKVLSAYNKHRDKPIREQAENIIHLFTLTNLGAPAAFKYFDTTIDRKRYTSTKEVLDATLIHQSITGLYETRIDLSQLGGDGGGGGGSGGGGSGGGGSGGLDDEYRLYSPLVKPDQNIQFWLEQFPQAWAETAGMGLAKQVPPQVIQLKASATPVSVRQYPLSKEAQEGIRPHVQRLIQQGILVPVQSPWNTPLLPVRKPGTNDYRPVQDLREVNKRVQDIHPTVPNPYNLLCALPPQRSWYTVLDLKDAFFCLRLHPTSQPLFAFEWRDPGTGRTGQLTWTRLPQGFKNSPTIFNEALHRDLANFRIQHPQVTLLQYVDDLLLAGATKQDCLEGTKALLLELSDLGYRASAKKAQICRREVTYLGYSLRDGQRWLTEARKKTVVQIPAPTTAKQVREFLGKAGFCRLFIPGFATLAAPLYPLTKPKGEFSWAPEHQKAFDAIKKALLSAPALALPDVTKPFTLYVDERKGVARGVLTQTLGPWRRPVAYLSKKLDPVASGWPVCLKAIAAVAILVKDADKLTLGQNITVIAPHALENIVRQPPDRWMTNARMTHYQSLLLTERVTFAPPAALNPATLLPEETDEPVTHDCHQLLIEETGVRKDLTDIPLTGEVLTWFTDGSSYVVEGKRMAGAAVVDGTRTIWASSLPEGTSAQKAELMALTQALRLAEGKSINIYTDSRYAFATAHVHGAIYKQRGWLTSAGREIKNKEEILSLLEALHLPKRLAIIHCPGHQKAKDPISRGNQMADRVAKQAAQGVNLLPAGKRTADGSEFEKRTADGSEFESPKKKAKVE

SEQ ID NO: 52 - protein, 2092 aa, synthetic construct
MPAAKRVKLDGGDKKYSIGLDIGTNSVGWAVITDEYKVPSKKFKVLGNTDRHSIKKNLIGALLFDSGETAEATRLKRTARRRYTRRKNRICYLQEIFSNEMAKVDDSFFHRLEESFLVEEDKKHERHPIFGNIVDEVAYHEKYPTIYHLRKKLVDSTDKADLRLIYLALAHMIKFRGHFLIEGDLNPDNSDVDKLFIQLVQTYNQLFEENPINASGVDAKAILSARLSKSRRLENLIAQLPGEKKNGLFGNLIALSLGLTPNFKSNFDLAEDAKLQLSKDTYDDDLDNLLAQIGDQYADLFLAAKNLSDAILLSDILRVNTEITKAPLSASMIKRYDEHHQDLTLLKALVRQQLPEKYKEIFFDQSKNGYAGYIDGGASQEEFYKFIKPILEKMDGTEELLVKLNREDLLRKQRTFDNGSIPHQIHLGELHAILRRQEDFYPFLKDNREKIEKILTFRIPYYVGPLARGNSRFAWMTRKSEETITPWNFEEVVDKGASAQSFIERMTNFDKNLPNEKVLPKHSLLYEYFTVYNELTKVKYVTEGMRKPAFLSGEQKKAIVDLLFKTNRKVTVKQLKEDYFKKIECFDSVEISGVEDRFNASLGTYHDLLKIIKDKDFLDNEENEDILEDIVLTLTLFEDREMIEERLKTYAHLFDDKVMKQLKRRRYTGWGRLSRKLINGIRDKQSGKTILDFLKSDGFANRNFMQLIHDDSLTFKEDIQKAQVSGQGDSLHEHIANLAGSPAIKKGILQTVKVVDELVKVMGRHKPENIVIEMARENQTTQKGQKNSRERMKRIEEGIKELGSQILKEHPVENTQLQNEKLYLYYLQNGRDMYVDQELDINRLSDYDVDHIVPQSFLKDDSIDNKVLTRSDKARGKSDNVPSEEVVKKMKNYWRQLLNAKLITQRKFDNLTKAERGGLSELDKAGFIKRQLVETRQITKHVAQILDSRMNTKYDENDKLIREVKVITLKSKLVSDFRKDFQFYKVREINNYHHAHDAYLNAVVGTALIKKYPKLESEFVYGDYKVYDVRKMIAKSEQEIGKATAKYFFYSNIMNFFKTEITLANGEIRKRPLIETNGETGEIVWDKGRDFATVRKVLSMPQVNIVKKTEVQTGGFSKESILPKRNSDKLIARKKDWDPKKYGGFDSPTVAYSVLVVAKVEKGKSKKLKSVKELLGITIMERSSFEKNPIDFLEAKGYKEVKKDLIIKLPKYSLFELENGRKRMLASAGELQKGNELALPSKYVNFLYLASHYEKLKGSPEDNEQKQLFVEQHKHYLDEIIEQISEFSKRVILADANLDKVLSAYNKHRDKPIREQAENIIHLFTLTNLGAPAAFKYFDTTIDRKRYTSTKEVLDATLIHQSITGLYETRIDLSQLGGDGGGGSGGSGGSGGSGGSGGLDDEYRLYSPLVKPDQNIQFWLEQFPQAWAETAGMGLAKQVPPQVIQLKASATPVSVRQYPLSKEAQEGIRPHVQRLIQQGILVPVQSPWNTPLLPVRKPGTNDYRPVQDLREVNKRVQDIHPTVPNPYNLLCALPPQRSWYTVLDLKDAFFCLRLHPTSQPLFAFEWRDPGTGRTGQLTWTRLPQGFKNSPTIFNEALHRDLANFRIQHPQVTLLQYVDDLLLAGATKQDCLEGTKALLLELSDLGYRASAKKAQICRREVTYLGYSLRDGQRWLTEARKKTVVQIPAPTTAKQVREFLGKAGFCRLFIPGFATLAAPLYPLTKPKGEFSWAPEHQKAFDAIKKALLSAPALALPDVTKPFTLYVDERKGVARGVLTQTLGPWRRPVAYLSKKLDPVASGWPVCLKAIAAVAILVKDADKLTLGQNITVIAPHALENIVRQPPDRWMTNARMTHYQSLLLTERVTFAPPAALNPATLLPEETDEPVTHDCHQLLIEETGVRKDLTDIPLTGEVLTWFTDGSSYVVEGKRMAGAAVVDGTRTIWASSLPEGTSAQKAELMALTQALRLAEGKSINIYTDSRYAFATAHVHGAIYKQRGWLTSAGREIKNKEEILSLLEALHLPKRLAIIHCPGHQKAKDPISRGNQMADRVAKQAAQGVNLLPAGKRTADGSEFEKRTADGSEFESPKKKAKVE

SEQ ID NO: 53 - protein, 2088 aa, synthetic construct
MPAAKRVKLDGGDKKYSIGLDIGTNSVGWAVITDEYKVPSKKFKVLGNTDRHSIKKNLIGALLFDSGETAEATRLKRTARRRYTRRKNRICYLQEIFSNEMAKVDDSFFHRLEESFLVEEDKKHERHPIFGNIVDEVAYHEKYPTIYHLRKKLVDSTDKADLRLIYLALAHMIKFRGHFLIEGDLNPDNSDVDKLFIQLVQTYNQLFEENPINASGVDAKAILSARLSKSRRLENLIAQLPGEKKNGLFGNLIALSLGLTPNFKSNFDLAEDAKLQLSKDTYDDDLDNLLAQIGDQYADLFLAAKNLSDAILLSDILRVNTEITKAPLSASMIKRYDEHHQDLTLLKALVRQQLPEKYKEIFFDQSKNGYAGYIDGGASQEEFYKFIKPILEKMDGTEELLVKLNREDLLRKQRTFDNGSIPHQIHLGELHAILRRQEDFYPFLKDNREKIEKILTFRIPYYVGPLARGNSRFAWMTRKSEETITPWNFEEVVDKGASAQSFIERMTNFDKNLPNEKVLPKHSLLYEYFTVYNELTKVKYVTEGMRKPAFLSGEQKKAIVDLLFKTNRKVTVKQLKEDYFKKIECFDSVEISGVEDRFNASLGTYHDLLKIIKDKDFLDNEENEDILEDIVLTLTLFEDREMIEERLKTYAHLFDDKVMKQLKRRRYTGWGRLSRKLINGIRDKQSGKTILDFLKSDGFANRNFMQLIHDDSLTFKEDIQKAQVSGQGDSLHEHIANLAGSPAIKKGILQTVKVVDELVKVMGRHKPENIVIEMARENQTTQKGQKNSRERMKRIEEGIKELGSQILKEHPVENTQLQNEKLYLYYLQNGRDMYVDQELDINRLSDYDVDHIVPQSFLKDDSIDNKVLTRSDKARGKSDNVPSEEVVKKMKNYWRQLLNAKLITQRKFDNLTKAERGGLSELDKAGFIKRQLVETRQITKHVAQILDSRMNTKYDENDKLIREVKVITLKSKLVSDFRKDFQFYKVREINNYHHAHDAYLNAVVGTALIKKYPKLESEFVYGDYKVYDVRKMIAKSEQEIGKATAKYFFYSNIMNFFKTEITLANGEIRKRPLIETNGETGEIVWDKGRDFATVRKVLSMPQVNIVKKTEVQTGGFSKESILPKRNSDKLIARKKDWDPKKYGGFDSPTVAYSVLVVAKVEKGKSKKLKSVKELLGITIMERSSFEKNPIDFLEAKGYKEVKKDLIIKLPKYSLFELENGRKRMLASAGELQKGNELALPSKYVNFLYLASHYEKLKGSPEDNEQKQLFVEQHKHYLDEIIEQISEFSKRVILADANLDKVLSAYNKHRDKPIREQAENIIHLFTLTNLGAPAAFKYFDTTIDRKRYTSTKEVLDATLIHQSITGLYETRIDLSQLGGDGGEAAAKGGGGSSGGLDDEYRLYSPLVKPDQNIQFWLEQFPQAWAETAGMGLAKQVPPQVIQLKASATPVSVRQYPLSKEAQEGIRPHVQRLIQQGILVPVQSPWNTPLLPVRKPGTNDYRPVQDLREVNKRVQDIHPTVPNPYNLLCALPPQRSWYTVLDLKDAFFCLRLHPTSQPLFAFEWRDPGTGRTGQLTWTRLPQGFKNSPTIFNEALHRDLANFRIQHPQVTLLQYVDDLLLAGATKQDCLEGTKALLLELSDLGYRASAKKAQICRREVTYLGYSLRDGQRWLTEARKKTVVQIPAPTTAKQVREFLGKAGFCRLFIPGFATLAAPLYPLTKPKGEFSWAPEHQKAFDAIKKALLSAPALALPDVTKPFTLYVDERKGVARGVLTQTLGPWRRPVAYLSKKLDPVASGWPVCLKAIAAVAILVKDADKLTLGQNITVIAPHALENIVRQPPDRWMTNARMTHYQSLLLTERVTFAPPAALNPATLLPEETDEPVTHDCHQLLIEETGVRKDLTDIPLTGEVLTWFTDGSSYVVEGKRMAGAAVVDGTRTIWASSLPEGTSAQKAELMALTQALRLAEGKSINIYTDSRYAFATAHVHGAIYKQRGWLTSAGREIKNKEEILSLLEALHLPKRLAIIHCPGHQKAKDPISRGNQMADRVAKQAAQGVNLLPAGKRTADGSEFEKRTADGSEFESPKKKAKVE

SEQ ID NO: 54 - protein, 2090 aa, synthetic construct
MPAAKRVKLDGGDKKYSIGLDIGTNSVGWAVITDEYKVPSKKFKVLGNTDRHSIKKNLIGALLFDSGETAEATRLKRTARRRYTRRKNRICYLQEIFSNEMAKVDDSFFHRLEESFLVEEDKKHERHPIFGNIVDEVAYHEKYPTIYHLRKKLVDSTDKADLRLIYLALAHMIKFRGHFLIEGDLNPDNSDVDKLFIQLVQTYNQLFEENPINASGVDAKAILSARLSKSRRLENLIAQLPGEKKNGLFGNLIALSLGLTPNFKSNFDLAEDAKLQLSKDTYDDDLDNLLAQIGDQYADLFLAAKNLSDAILLSDILRVNTEITKAPLSASMIKRYDEHHQDLTLLKALVRQQLPEKYKEIFFDQSKNGYAGYIDGGASQEEFYKFIKPILEKMDGTEELLVKLNREDLLRKQRTFDNGSIPHQIHLGELHAILRRQEDFYPFLKDNREKIEKILTFRIPYYVGPLARGNSRFAWMTRKSEETITPWNFEEVVDKGASAQSFIERMTNFDKNLPNEKVLPKHSLLYEYFTVYNELTKVKYVTEGMRKPAFLSGEQKKAIVDLLFKTNRKVTVKQLKEDYFKKIECFDSVEISGVEDRFNASLGTYHDLLKIIKDKDFLDNEENEDILEDIVLTLTLFEDREMIEERLKTYAHLFDDKVMKQLKRRRYTGWGRLSRKLINGIRDKQSGKTILDFLKSDGFANRNFMQLIHDDSLTFKEDIQKAQVSGQGDSLHEHIANLAGSPAIKKGILQTVKVVDELVKVMGRHKPENIVIEMARENQTTQKGQKNSRERMKRIEEGIKELGSQILKEHPVENTQLQNEKLYLYYLQNGRDMYVDQELDINRLSDYDVDHIVPQSFLKDDSIDNKVLTRSDKARGKSDNVPSEEVVKKMKNYWRQLLNAKLITQRKFDNLTKAERGGLSELDKAGFIKRQLVETRQITKHVAQILDSRMNTKYDENDKLIREVKVITLKSKLVSDFRKDFQFYKVREINNYHHAHDAYLNAVVGTALIKKYPKLESEFVYGDYKVYDVRKMIAKSEQEIGKATAKYFFYSNIMNFFKTEITLANGEIRKRPLIETNGETGEIVWDKGRDFATVRKVLSMPQVNIVKKTEVQTGGFSKESILPKRNSDKLIARKKDWDPKKYGGFDSPTVAYSVLVVAKVEKGKSKKLKSVKELLGITIMERSSFEKNPIDFLEAKGYKEVKKDLIIKLPKYSLFELENGRKRMLASAGELQKGNELALPSKYVNFLYLASHYEKLKGSPEDNEQKQLFVEQHKHYLDEIIEQISEFSKRVILADANLDKVLSAYNKHRDKPIREQAENIIHLFTLTNLGAPAAFKYFDTTIDRKRYTSTKEVLDATLIHQSITGLYETRIDLSQLGGDGGPAPAPAPAPAPAPGGLDDEYRLYSPLVKPDQNIQFWLEQFPQAWAETAGMGLAKQVPPQVIQLKASATPVSVRQYPLSKEAQEGIRPHVQRLIQQGILVPVQSPWNTPLLPVRKPGTNDYRPVQDLREVNKRVQDIHPTVPNPYNLLCALPPQRSWYTVLDLKDAFFCLRLHPTSQPLFAFEWRDPGTGRTGQLTWTRLPQGFKNSPTIFNEALHRDLANFRIQHPQVTLLQYVDDLLLAGATKQDCLEGTKALLLELSDLGYRASAKKAQICRREVTYLGYSLRDGQRWLTEARKKTVVQIPAPTTAKQVREFLGKAGFCRLFIPGFATLAAPLYPLTKPKGEFSWAPEHQKAFDAIKKALLSAPALALPDVTKPFTLYVDERKGVARGVLTQTLGPWRRPVAYLSKKLDPVASGWPVCLKAIAAVAILVKDADKLTLGQNITVIAPHALENIVRQPPDRWMTNARMTHYQSLLLTERVTFAPPAALNPATLLPEETDEPVTHDCHQLLIEETGVRKDLTDIPLTGEVLTWFTDGSSYVVEGKRMAGAAVVDGTRTIWASSLPEGTSAQKAELMALTQALRLAEGKSINIYTDSRYAFATAHVHGAIYKQRGWLTSAGREIKNKEEILSLLEALHLPKRLAIIHCPGHQKAKDPISRGNQMADRVAKQAAQGVNLLPAGKRTADGSEFEKRTADGSEFESPKKKAKVE

SEQ ID NO: 55 - protein, 2087 aa, synthetic construct
MPAAKRVKLDGGDKKYSIGLDIGTNSVGWAVITDEYKVPSKKFKVLGNTDRHSIKKNLIGALLFDSGETAEATRLKRTARRRYTRRKNRICYLQEIFSNEMAKVDDSFFHRLEESFLVEEDKKHERHPIFGNIVDEVAYHEKYPTIYHLRKKLVDSTDKADLRLIYLALAHMIKFRGHFLIEGDLNPDNSDVDKLFIQLVQTYNQLFEENPINASGVDAKAILSARLSKSRRLENLIAQLPGEKKNGLFGNLIALSLGLTPNFKSNFDLAEDAKLQLSKDTYDDDLDNLLAQIGDQYADLFLAAKNLSDAILLSDILRVNTEITKAPLSASMIKRYDEHHQDLTLLKALVRQQLPEKYKEIFFDQSKNGYAGYIDGGASQEEFYKFIKPILEKMDGTEELLVKLNREDLLRKQRTFDNGSIPHQIHLGELHAILRRQEDFYPFLKDNREKIEKILTFRIPYYVGPLARGNSRFAWMTRKSEETITPWNFEEVVDKGASAQSFIERMTNFDKNLPNEKVLPKHSLLYEYFTVYNELTKVKYVTEGMRKPAFLSGEQKKAIVDLLFKTNRKVTVKQLKEDYFKKIECFDSVEISGVEDRFNASLGTYHDLLKIIKDKDFLDNEENEDILEDIVLTLTLFEDREMIEERLKTYAHLFDDKVMKQLKRRRYTGWGRLSRKLINGIRDKQSGKTILDFLKSDGFANRNFMQLIHDDSLTFKEDIQKAQVSGQGDSLHEHIANLAGSPAIKKGILQTVKVVDELVKVMGRHKPENIVIEMARENQTTQKGQKNSRERMKRIEEGIKELGSQILKEHPVENTQLQNEKLYLYYLQNGRDMYVDQELDINRLSDYDVDHIVPQSFLKDDSIDNKVLTRSDKARGKSDNVPSEEVVKKMKNYWRQLLNAKLITQRKFDNLTKAERGGLSELDKAGFIKRQLVETRQITKHVAQILDSRMNTKYDENDKLIREVKVITLKSKLVSDFRKDFQFYKVREINNYHHAHDAYLNAVVGTALIKKYPKLESEFVYGDYKVYDVRKMIAKSEQEIGKATAKYFFYSNIMNFFKTEITLANGEIRKRPLIETNGETGEIVWDKGRDFATVRKVLSMPQVNIVKKTEVQTGGFSKESILPKRNSDKLIARKKDWDPKKYGGFDSPTVAYSVLVVAKVEKGKSKKLKSVKELLGITIMERSSFEKNPIDFLEAKGYKEVKKDLIIKLPKYSLFELENGRKRMLASAGELQKGNELALPSKYVNFLYLASHYEKLKGSPEDNEQKQLFVEQHKHYLDEIIEQISEFSKRVILADANLDKVLSAYNKHRDKPIREQAENIIHLFTLTNLGAPAAFKYFDTTIDRKRYTSTKEVLDATLIHQSITGLYETRIDLSQLGGDGGGGGGSGGGGSGGLDDEYRLYSPLVKPDQNIQFWLEQFPQAWAETAGMGLAKQVPPQVIQLKASATPVSVRQYPLSKEAQEGIRPHVQRLIQQGILVPVQSPWNTPLLPVRKPGTNDYRPVQDLREVNKRVQDIHPTVPNPYNLLCALPPQRSWYTVLDLKDAFFCLRLHPTSQPLFAFEWRDPGTGRTGQLTWTRLPQGFKNSPTIFNEALHRDLANFRIQHPQVTLLQYVDDLLLAGATKQDCLEGTKALLLELSDLGYRASAKKAQICRREVTYLGYSLRDGQRWLTEARKKTVVQIPAPTTAKQVREFLGKAGFCRLFIPGFATLAAPLYPLTKPKGEFSWAPEHQKAFDAIKKALLSAPALALPDVTKPFTLYVDERKGVARGVLTQTLGPWRRPVAYLSKKLDPVASGWPVCLKAIAAVAILVKDADKLTLGQNITVIAPHALENIVRQPPDRWMTNARMTHYQSLLLTERVTFAPPAALNPATLLPEETDEPVTHDCHQLLIEETGVRKDLTDIPLTGEVLTWFTDGSSYVVEGKRMAGAAVVDGTRTIWASSLPEGTSAQKAELMALTQALRLAEGKSINIYTDSRYAFATAHVHGAIYKQRGWLTSAGREIKNKEEILSLLEALHLPKRLAIIHCPGHQKAKDPISRGNQMADRVAKQAAQGVNLLPAGKRTADGSEFEKRTADGSEFESPKKKAKVE

SEQ ID NO: 56 - protein, 2092 aa, synthetic construct
MPAAKRVKLDGGDKKYSIGLDIGTNSVGWAVITDEYKVPSKKFKVLGNTDRHSIKKNLIGALLFDSGETAEATRLKRTARRRYTRRKNRICYLQEIFSNEMAKVDDSFFHRLEESFLVEEDKKHERHPIFGNIVDEVAYHEKYPTIYHLRKKLVDSTDKADLRLIYLALAHMIKFRGHFLIEGDLNPDNSDVDKLFIQLVQTYNQLFEENPINASGVDAKAILSARLSKSRRLENLIAQLPGEKKNGLFGNLIALSLGLTPNFKSNFDLAEDAKLQLSKDTYDDDLDNLLAQIGDQYADLFLAAKNLSDAILLSDILRVNTEITKAPLSASMIKRYDEHHQDLTLLKALVRQQLPEKYKEIFFDQSKNGYAGYIDGGASQEEFYKFIKPILEKMDGTEELLVKLNREDLLRKQRTFDNGSIPHQIHLGELHAILRRQEDFYPFLKDNREKIEKILTFRIPYYVGPLARGNSRFAWMTRKSEETITPWNFEEVVDKGASAQSFIERMTNFDKNLPNEKVLPKHSLLYEYFTVYNELTKVKYVTEGMRKPAFLSGEQKKAIVDLLFKTNRKVTVKQLKEDYFKKIECFDSVEISGVEDRFNASLGTYHDLLKIIKDKDFLDNEENEDILEDIVLTLTLFEDREMIEERLKTYAHLFDDKVMKQLKRRRYTGWGRLSRKLINGIRDKQSGKTILDFLKSDGFANRNFMQLIHDDSLTFKEDIQKAQVSGQGDSLHEHIANLAGSPAIKKGILQTVKVVDELVKVMGRHKPENIVIEMARENQTTQKGQKNSRERMKRIEEGIKELGSQILKEHPVENTQLQNEKLYLYYLQNGRDMYVDQELDINRLSDYDVDHIVPQSFLKDDSIDNKVLTRSDKARGKSDNVPSEEVVKKMKNYWRQLLNAKLITQRKFDNLTKAERGGLSELDKAGFIKRQLVETRQITKHVAQILDSRMNTKYDENDKLIREVKVITLKSKLVSDFRKDFQFYKVREINNYHHAHDAYLNAVVGTALIKKYPKLESEFVYGDYKVYDVRKMIAKSEQEIGKATAKYFFYSNIMNFFKTEITLANGEIRKRPLIETNGETGEIVWDKGRDFATVRKVLSMPQVNIVKKTEVQTGGFSKESILPKRNSDKLIARKKDWDPKKYGGFDSPTVAYSVLVVAKVEKGKSKKLKSVKELLGITIMERSSFEKNPIDFLEAKGYKEVKKDLIIKLPKYSLFELENGRKRMLASAGELQKGNELALPSKYVNFLYLASHYEKLKGSPEDNEQKQLFVEQHKHYLDEIIEQISEFSKRVILADANLDKVLSAYNKHRDKPIREQAENIIHLFTLTNLGAPAAFKYFDTTIDRKRYTSTKEVLDATLIHQSITGLYETRIDLSQLGGDGGEAAAKGGGGSEAAAKGGLDDEYRLYSPLVKPDQNIQFWLEQFPQAWAETAGMGLAKQVPPQVIQLKASATPVSVRQYPLSKEAQEGIRPHVQRLIQQGILVPVQSPWNTPLLPVRKPGTNDYRPVQDLREVNKRVQDIHPTVPNPYNLLCALPPQRSWYTVLDLKDAFFCLRLHPTSQPLFAFEWRDPGTGRTGQLTWTRLPQGFKNSPTIFNEALHRDLANFRIQHPQVTLLQYVDDLLLAGATKQDCLEGTKALLLELSDLGYRASAKKAQICRREVTYLGYSLRDGQRWLTEARKKTVVQIPAPTTAKQVREFLGKAGFCRLFIPGFATLAAPLYPLTKPKGEFSWAPEHQKAFDAIKKALLSAPALALPDVTKPFTLYVDERKGVARGVLTQTLGPWRRPVAYLSKKLDPVASGWPVCLKAIAAVAILVKDADKLTLGQNITVIAPHALENIVRQPPDRWMTNARMTHYQSLLLTERVTFAPPAALNPATLLPEETDEPVTHDCHQLLIEETGVRKDLTDIPLTGEVLTWFTDGSSYVVEGKRMAGAAVVDGTRTIWASSLPEGTSAQKAELMALTQALRLAEGKSINIYTDSRYAFATAHVHGAIYKQRGWLTSAGREIKNKEEILSLLEALHLPKRLAIIHCPGHQKAKDPISRGNQMADRVAKQAAQGVNLLPAGKRTADGSEFEKRTADGSEFESPKKKAKVE

SEQ ID NO: 57 - protein, 2085 aa, synthetic construct
MPAAKRVKLDGGDKKYSIGLDIGTNSVGWAVITDEYKVPSKKFKVLGNTDRHSIKKNLIGALLFDSGETAEATRLKRTARRRYTRRKNRICYLQEIFSNEMAKVDDSFFHRLEESFLVEEDKKHERHPIFGNIVDEVAYHEKYPTIYHLRKKLVDSTDKADLRLIYLALAHMIKFRGHFLIEGDLNPDNSDVDKLFIQLVQTYNQLFEENPINASGVDAKAILSARLSKSRRLENLIAQLPGEKKNGLFGNLIALSLGLTPNFKSNFDLAEDAKLQLSKDTYDDDLDNLLAQIGDQYADLFLAAKNLSDAILLSDILRVNTEITKAPLSASMIKRYDEHHQDLTLLKALVRQQLPEKYKEIFFDQSKNGYAGYIDGGASQEEFYKFIKPILEKMDGTEELLVKLNREDLLRKQRTFDNGSIPHQIHLGELHAILRRQEDFYPFLKDNREKIEKILTFRIPYYVGPLARGNSRFAWMTRKSEETITPWNFEEVVDKGASAQSFIERMTNFDKNLPNEKVLPKHSLLYEYFTVYNELTKVKYVTEGMRKPAFLSGEQKKAIVDLLFKTNRKVTVKQLKEDYFKKIECFDSVEISGVEDRFNASLGTYHDLLKIIKDKDFLDNEENEDILEDIVLTLTLFEDREMIEERLKTYAHLFDDKVMKQLKRRRYTGWGRLSRKLINGIRDKQSGKTILDFLKSDGFANRNFMQLIHDDSLTFKEDIQKAQVSGQGDSLHEHIANLAGSPAIKKGILQTVKVVDELVKVMGRHKPENIVIEMARENQTTQKGQKNSRERMKRIEEGIKELGSQILKEHPVENTQLQNEKLYLYYLQNGRDMYVDQELDINRLSDYDVDHIVPQSFLKDDSIDNKVLTRSDKARGKSDNVPSEEVVKKMKNYWRQLLNAKLITQRKFDNLTKAERGGLSELDKAGFIKRQLVETRQITKHVAQILDSRMNTKYDENDKLIREVKVITLKSKLVSDFRKDFQFYKVREINNYHHAHDAYLNAVVGTALIKKYPKLESEFVYGDYKVYDVRKMIAKSEQEIGKATAKYFFYSNIMNFFKTEITLANGEIRKRPLIETNGETGEIVWDKGRDFATVRKVLSMPQVNIVKKTEVQTGGFSKESILPKRNSDKLIARKKDWDPKKYGGFDSPTVAYSVLVVAKVEKGKSKKLKSVKELLGITIMERSSFEKNPIDFLEAKGYKEVKKDLIIKLPKYSLFELENGRKRMLASAGELQKGNELALPSKYVNFLYLASHYEKLKGSPEDNEQKQLFVEQHKHYLDEIIEQISEFSKRVILADANLDKVLSAYNKHRDKPIREQAENIIHLFTLTNLGAPAAFKYFDTTIDRKRYTSTKEVLDATLIHQSITGLYETRIDLSQLGGDGGGGGGGGGGGGLDDEYRLYSPLVKPDQNIQFWLEQFPQAWAETAGMGLAKQVPPQVIQLKASATPVSVRQYPLSKEAQEGIRPHVQRLIQQGILVPVQSPWNTPLLPVRKPGTNDYRPVQDLREVNKRVQDIHPTVPNPYNLLCALPPQRSWYTVLDLKDAFFCLRLHPTSQPLFAFEWRDPGTGRTGQLTWTRLPQGFKNSPTIFNEALHRDLANFRIQHPQVTLLQYVDDLLLAGATKQDCLEGTKALLLELSDLGYRASAKKAQICRREVTYLGYSLRDGQRWLTEARKKTVVQIPAPTTAKQVREFLGKAGFCRLFIPGFATLAAPLYPLTKPKGEFSWAPEHQKAFDAIKKALLSAPALALPDVTKPFTLYVDERKGVARGVLTQTLGPWRRPVAYLSKKLDPVASGWPVCLKAIAAVAILVKDADKLTLGQNITVIAPHALENIVRQPPDRWMTNARMTHYQSLLLTERVTFAPPAALNPATLLPEETDEPVTHDCHQLLIEETGVRKDLTDIPLTGEVLTWFTDGSSYVVEGKRMAGAAVVDGTRTIWASSLPEGTSAQKAELMALTQALRLAEGKSINIYTDSRYAFATAHVHGAIYKQRGWLTSAGREIKNKEEILSLLEALHLPKRLAIIHCPGHQKAKDPISRGNQMADRVAKQAAQGVNLLPAGKRTADGSEFEKRTADGSEFESPKKKAKVE

SEQ ID NO: 58 - protein, 2086 aa, synthetic construct
MPAAKRVKLDGGDKKYSIGLDIGTNSVGWAVITDEYKVPSKKFKVLGNTDRHSIKKNLIGALLFDSGETAEATRLKRTARRRYTRRKNRICYLQEIFSNEMAKVDDSFFHRLEESFLVEEDKKHERHPIFGNIVDEVAYHEKYPTIYHLRKKLVDSTDKADLRLIYLALAHMIKFRGHFLIEGDLNPDNSDVDKLFIQLVQTYNQLFEENPINASGVDAKAILSARLSKSRRLENLIAQLPGEKKNGLFGNLIALSLGLTPNFKSNFDLAEDAKLQLSKDTYDDDLDNLLAQIGDQYADLFLAAKNLSDAILLSDILRVNTEITKAPLSASMIKRYDEHHQDLTLLKALVRQQLPEKYKEIFFDQSKNGYAGYIDGGASQEEFYKFIKPILEKMDGTEELLVKLNREDLLRKQRTFDNGSIPHQIHLGELHAILRRQEDFYPFLKDNREKIEKILTFRIPYYVGPLARGNSRFAWMTRKSEETITPWNFEEVVDKGASAQSFIERMTNFDKNLPNEKVLPKHSLLYEYFTVYNELTKVKYVTEGMRKPAFLSGEQKKAIVDLLFKTNRKVTVKQLKEDYFKKIECFDSVEISGVEDRFNASLGTYHDLLKIIKDKDFLDNEENEDILEDIVLTLTLFEDREMIEERLKTYAHLFDDKVMKQLKRRRYTGWGRLSRKLINGIRDKQSGKTILDFLKSDGFANRNFMQLIHDDSLTFKEDIQKAQVSGQGDSLHEHIANLAGSPAIKKGILQTVKVVDELVKVMGRHKPENIVIEMARENQTTQKGQKNSRERMKRIEEGIKELGSQILKEHPVENTQLQNEKLYLYYLQNGRDMYVDQELDINRLSDYDVDHIVPQSFLKDDSIDNKVLTRSDKARGKSDNVPSEEVVKKMKNYWRQLLNAKLITQRKFDNLTKAERGGLSELDKAGFIKRQLVETRQITKHVAQILDSRMNTKYDENDKLIREVKVITLKSKLVSDFRKDFQFYKVREINNYHHAHDAYLNAVVGTALIKKYPKLESEFVYGDYKVYDVRKMIAKSEQEIGKATAKYFFYSNIMNFFKTEITLANGEIRKRPLIETNGETGEIVWDKGRDFATVRKVLSMPQVNIVKKTEVQTGGFSKESILPKRNSDKLIARKKDWDPKKYGGFDSPTVAYSVLVVAKVEKGKSKKLKSVKELLGITIMERSSFEKNPIDFLEAKGYKEVKKDLIIKLPKYSLFELENGRKRMLASAGELQKGNELALPSKYVNFLYLASHYEKLKGSPEDNEQKQLFVEQHKHYLDEIIEQISEFSKRVILADANLDKVLSAYNKHRDKPIREQAENIIHLFTLTNLGAPAAFKYFDTTIDRKRYTSTKEVLDATLIHQSITGLYETRIDLSQLGGDGGGGSPAPGGGGGLDDEYRLYSPLVKPDQNIQFWLEQFPQAWAETAGMGLAKQVPPQVIQLKASATPVSVRQYPLSKEAQEGIRPHVQRLIQQGILVPVQSPWNTPLLPVRKPGTNDYRPVQDLREVNKRVQDIHPTVPNPYNLLCALPPQRSWYTVLDLKDAFFCLRLHPTSQPLFAFEWRDPGTGRTGQLTWTRLPQGFKNSPTIFNEALHRDLANFRIQHPQVTLLQYVDDLLLAGATKQDCLEGTKALLLELSDLGYRASAKKAQICRREVTYLGYSLRDGQRWLTEARKKTVVQIPAPTTAKQVREFLGKAGFCRLFIPGFATLAAPLYPLTKPKGEFSWAPEHQKAFDAIKKALLSAPALALPDVTKPFTLYVDERKGVARGVLTQTLGPWRRPVAYLSKKLDPVASGWPVCLKAIAAVAILVKDADKLTLGQNITVIAPHALENIVRQPPDRWMTNARMTHYQSLLLTERVTFAPPAALNPATLLPEETDEPVTHDCHQLLIEETGVRKDLTDIPLTGEVLTWFTDGSSYVVEGKRMAGAAVVDGTRTIWASSLPEGTSAQKAELMALTQALRLAEGKSINIYTDSRYAFATAHVHGAIYKQRGWLTSAGREIKNKEEILSLLEALHLPKRLAIIHCPGHQKAKDPISRGNQMADRVAKQAAQGVNLLPAGKRTADGSEFEKRTADGSEFESPKKKAKVE

SEQ ID NO: 59 - protein, 2083 aa, synthetic construct
MPAAKRVKLDGGDKKYSIGLDIGTNSVGWAVITDEYKVPSKKFKVLGNTDRHSIKKNLIGALLFDSGETAEATRLKRTARRRYTRRKNRICYLQEIFSNEMAKVDDSFFHRLEESFLVEEDKKHERHPIFGNIVDEVAYHEKYPTIYHLRKKLVDSTDKADLRLIYLALAHMIKFRGHFLIEGDLNPDNSDVDKLFIQLVQTYNQLFEENPINASGVDAKAILSARLSKSRRLENLIAQLPGEKKNGLFGNLIALSLGLTPNFKSNFDLAEDAKLQLSKDTYDDDLDNLLAQIGDQYADLFLAAKNLSDAILLSDILRVNTEITKAPLSASMIKRYDEHHQDLTLLKALVRQQLPEKYKEIFFDQSKNGYAGYIDGGASQEEFYKFIKPILEKMDGTEELLVKLNREDLLRKQRTFDNGSIPHQIHLGELHAILRRQEDFYPFLKDNREKIEKILTFRIPYYVGPLARGNSRFAWMTRKSEETITPWNFEEVVDKGASAQSFIERMTNFDKNLPNEKVLPKHSLLYEYFTVYNELTKVKYVTEGMRKPAFLSGEQKKAIVDLLFKTNRKVTVKQLKEDYFKKIECFDSVEISGVEDRFNASLGTYHDLLKIIKDKDFLDNEENEDILEDIVLTLTLFEDREMIEERLKTYAHLFDDKVMKQLKRRRYTGWGRLSRKLINGIRDKQSGKTILDFLKSDGFANRNFMQLIHDDSLTFKEDIQKAQVSGQGDSLHEHIANLAGSPAIKKGILQTVKVVDELVKVMGRHKPENIVIEMARENQTTQKGQKNSRERMKRIEEGIKELGSQILKEHPVENTQLQNEKLYLYYLQNGRDMYVDQELDINRLSDYDVDHIVPQSFLKDDSIDNKVLTRSDKARGKSDNVPSEEVVKKMKNYWRQLLNAKLITQRKFDNLTKAERGGLSELDKAGFIKRQLVETRQITKHVAQILDSRMNTKYDENDKLIREVKVITLKSKLVSDFRKDFQFYKVREINNYHHAHDAYLNAVVGTALIKKYPKLESEFVYGDYKVYDVRKMIAKSEQEIGKATAKYFFYSNIMNFFKTEITLANGEIRKRPLIETNGETGEIVWDKGRDFATVRKVLSMPQVNIVKKTEVQTGGFSKESILPKRNSDKLIARKKDWDPKKYGGFDSPTVAYSVLVVAKVEKGKSKKLKSVKELLGITIMERSSFEKNPIDFLEAKGYKEVKKDLIIKLPKYSLFELENGRKRMLASAGELQKGNELALPSKYVNFLYLASHYEKLKGSPEDNEQKQLFVEQHKHYLDEIIEQISEFSKRVILADANLDKVLSAYNKHRDKPIREQAENIIHLFTLTNLGAPAAFKYFDTTIDRKRYTSTKEVLDATLIHQSITGLYETRIDLSQLGGDGGGGGGGGGGLDDEYRLYSPLVKPDQNIQFWLEQFPQAWAETAGMGLAKQVPPQVIQLKASATPVSVRQYPLSKEAQEGIRPHVQRLIQQGILVPVQSPWNTPLLPVRKPGTNDYRPVQDLREVNKRVQDIHPTVPNPYNLLCALPPQRSWYTVLDLKDAFFCLRLHPTSQPLFAFEWRDPGTGRTGQLTWTRLPQGFKNSPTIFNEALHRDLANFRIQHPQVTLLQYVDDLLLAGATKQDCLEGTKALLLELSDLGYRASAKKAQICRREVTYLGYSLRDGQRWLTEARKKTVVQIPAPTTAKQVREFLGKAGFCRLFIPGFATLAAPLYPLTKPKGEFSWAPEHQKAFDAIKKALLSAPALALPDVTKPFTLYVDERKGVARGVLTQTLGPWRRPVAYLSKKLDPVASGWPVCLKAIAAVAILVKDADKLTLGQNITVIAPHALENIVRQPPDRWMTNARMTHYQSLLLTERVTFAPPAALNPATLLPEETDEPVTHDCHQLLIEETGVRKDLTDIPLTGEVLTWFTDGSSYVVEGKRMAGAAVVDGTRTIWASSLPEGTSAQKAELMALTQALRLAEGKSINIYTDSRYAFATAHVHGAIYKQRGWLTSAGREIKNKEEILSLLEALHLPKRLAIIHCPGHQKAKDPISRGNQMADRVAKQAAQGVNLLPAGKRTADGSEFEKRTADGSEFESPKKKAKVE

SEQ ID NO: 60 - protein, 2086 aa, synthetic construct
MPAAKRVKLDGGDKKYSIGLDIGTNSVGWAVITDEYKVPSKKFKVLGNTDRHSIKKNLIGALLFDSGETAEATRLKRTARRRYTRRKNRICYLQEIFSNEMAKVDDSFFHRLEESFLVEEDKKHERHPIFGNIVDEVAYHEKYPTIYHLRKKLVDSTDKADLRLIYLALAHMIKFRGHFLIEGDLNPDNSDVDKLFIQLVQTYNQLFEENPINASGVDAKAILSARLSKSRRLENLIAQLPGEKKNGLFGNLIALSLGLTPNFKSNFDLAEDAKLQLSKDTYDDDLDNLLAQIGDQYADLFLAAKNLSDAILLSDILRVNTEITKAPLSASMIKRYDEHHQDLTLLKALVRQQLPEKYKEIFFDQSKNGYAGYIDGGASQEEFYKFIKPILEKMDGTEELLVKLNREDLLRKQRTFDNGSIPHQIHLGELHAILRRQEDFYPFLKDNREKIEKILTFRIPYYVGPLARGNSRFAWMTRKSEETITPWNFEEVVDKGASAQSFIERMTNFDKNLPNEKVLPKHSLLYEYFTVYNELTKVKYVTEGMRKPAFLSGEQKKAIVDLLFKTNRKVTVKQLKEDYFKKIECFDSVEISGVEDRFNASLGTYHDLLKIIKDKDFLDNEENEDILEDIVLTLTLFEDREMIEERLKTYAHLFDDKVMKQLKRRRYTGWGRLSRKLINGIRDKQSGKTILDFLKSDGFANRNFMQLIHDDSLTFKEDIQKAQVSGQGDSLHEHIANLAGSPAIKKGILQTVKVVDELVKVMGRHKPENIVIEMARENQTTQKGQKNSRERMKRIEEGIKELGSQILKEHPVENTQLQNEKLYLYYLQNGRDMYVDQELDINRLSDYDVDHIVPQSFLKDDSIDNKVLTRSDKARGKSDNVPSEEVVKKMKNYWRQLLNAKLITQRKFDNLTKAERGGLSELDKAGFIKRQLVETRQITKHVAQILDSRMNTKYDENDKLIREVKVITLKSKLVSDFRKDFQFYKVREINNYHHAHDAYLNAVVGTALIKKYPKLESEFVYGDYKVYDVRKMIAKSEQEIGKATAKYFFYSNIMNFFKTEITLANGEIRKRPLIETNGETGEIVWDKGRDFATVRKVLSMPQVNIVKKTEVQTGGFSKESILPKRNSDKLIARKKDWDPKKYGGFDSPTVAYSVLVVAKVEKGKSKKLKSVKELLGITIMERSSFEKNPIDFLEAKGYKEVKKDLIIKLPKYSLFELENGRKRMLASAGELQKGNELALPSKYVNFLYLASHYEKLKGSPEDNEQKQLFVEQHKHYLDEIIEQISEFSKRVILADANLDKVLSAYNKHRDKPIREQAENIIHLFTLTNLGAPAAFKYFDTTIDRKRYTSTKEVLDATLIHQSITGLYETRIDLSQLGGDGGPAPGGSGSSGGLDDEYRLYSPLVKPDQNIQFWLEQFPQAWAETAGMGLAKQVPPQVIQLKASATPVSVRQYPLSKEAQEGIRPHVQRLIQQGILVPVQSPWNTPLLPVRKPGTNDYRPVQDLREVNKRVQDIHPTVPNPYNLLCALPPQRSWYTVLDLKDAFFCLRLHPTSQPLFAFEWRDPGTGRTGQLTWTRLPQGFKNSPTIFNEALHRDLANFRIQHPQVTLLQYVDDLLLAGATKQDCLEGTKALLLELSDLGYRASAKKAQICRREVTYLGYSLRDGQRWLTEARKKTVVQIPAPTTAKQVREFLGKAGFCRLFIPGFATLAAPLYPLTKPKGEFSWAPEHQKAFDAIKKALLSAPALALPDVTKPFTLYVDERKGVARGVLTQTLGPWRRPVAYLSKKLDPVASGWPVCLKAIAAVAILVKDADKLTLGQNITVIAPHALENIVRQPPDRWMTNARMTHYQSLLLTERVTFAPPAALNPATLLPEETDEPVTHDCHQLLIEETGVRKDLTDIPLTGEVLTWFTDGSSYVVEGKRMAGAAVVDGTRTIWASSLPEGTSAQKAELMALTQALRLAEGKSINIYTDSRYAFATAHVHGAIYKQRGWLTSAGREIKNKEEILSLLEALHLPKRLAIIHCPGHQKAKDPISRGNQMADRVAKQAAQGVNLLPAGKRTADGSEFEKRTADGSEFESPKKKAKVE

SEQ ID NO: 61 - protein, 2083 aa, synthetic construct
MPAAKRVKLDGGDKKYSIGLDIGTNSVGWAVITDEYKVPSKKFKVLGNTDRHSIKKNLIGALLFDSGETAEATRLKRTARRRYTRRKNRICYLQEIFSNEMAKVDDSFFHRLEESFLVEEDKKHERHPIFGNIVDEVAYHEKYPTIYHLRKKLVDSTDKADLRLIYLALAHMIKFRGHFLIEGDLNPDNSDVDKLFIQLVQTYNQLFEENPINASGVDAKAILSARLSKSRRLENLIAQLPGEKKNGLFGNLIALSLGLTPNFKSNFDLAEDAKLQLSKDTYDDDLDNLLAQIGDQYADLFLAAKNLSDAILLSDILRVNTEITKAPLSASMIKRYDEHHQDLTLLKALVRQQLPEKYKEIFFDQSKNGYAGYIDGGASQEEFYKFIKPILEKMDGTEELLVKLNREDLLRKQRTFDNGSIPHQIHLGELHAILRRQEDFYPFLKDNREKIEKILTFRIPYYVGPLARGNSRFAWMTRKSEETITPWNFEEVVDKGASAQSFIERMTNFDKNLPNEKVLPKHSLLYEYFTVYNELTKVKYVTEGMRKPAFLSGEQKKAIVDLLFKTNRKVTVKQLKEDYFKKIECFDSVEISGVEDRFNASLGTYHDLLKIIKDKDFLDNEENEDILEDIVLTLTLFEDREMIEERLKTYAHLFDDKVMKQLKRRRYTGWGRLSRKLINGIRDKQSGKTILDFLKSDGFANRNFMQLIHDDSLTFKEDIQKAQVSGQGDSLHEHIANLAGSPAIKKGILQTVKVVDELVKVMGRHKPENIVIEMARENQTTQKGQKNSRERMKRIEEGIKELGSQILKEHPVENTQLQNEKLYLYYLQNGRDMYVDQELDINRLSDYDVDHIVPQSFLKDDSIDNKVLTRSDKARGKSDNVPSEEVVKKMKNYWRQLLNAKLITQRKFDNLTKAERGGLSELDKAGFIKRQLVETRQITKHVAQILDSRMNTKYDENDKLIREVKVITLKSKLVSDFRKDFQFYKVREINNYHHAHDAYLNAVVGTALIKKYPKLESEFVYGDYKVYDVRKMIAKSEQEIGKATAKYFFYSNIMNFFKTEITLANGEIRKRPLIETNGETGEIVWDKGRDFATVRKVLSMPQVNIVKKTEVQTGGFSKESILPKRNSDKLIARKKDWDPKKYGGFDSPTVAYSVLVVAKVEKGKSKKLKSVKELLGITIMERSSFEKNPIDFLEAKGYKEVKKDLIIKLPKYSLFELENGRKRMLASAGELQKGNELALPSKYVNFLYLASHYEKLKGSPEDNEQKQLFVEQHKHYLDEIIEQISEFSKRVILADANLDKVLSAYNKHRDKPIREQAENIIHLFTLTNLGAPAAFKYFDTTIDRKRYTSTKEVLDATLIHQSITGLYETRIDLSQLGGDGGPAPGSSGGLDDEYRLYSPLVKPDQNIQFWLEQFPQAWAETAGMGLAKQVPPQVIQLKASATPVSVRQYPLSKEAQEGIRPHVQRLIQQGILVPVQSPWNTPLLPVRKPGTNDYRPVQDLREVNKRVQDIHPTVPNPYNLLCALPPQRSWYTVLDLKDAFFCLRLHPTSQPLFAFEWRDPGTGRTGQLTWTRLPQGFKNSPTIFNEALHRDLANFRIQHPQVTLLQYVDDLLLAGATKQDCLEGTKALLLELSDLGYRASAKKAQICRREVTYLGYSLRDGQRWLTEARKKTVVQIPAPTTAKQVREFLGKAGFCRLFIPGFATLAAPLYPLTKPKGEFSWAPEHQKAFDAIKKALLSAPALALPDVTKPFTLYVDERKGVARGVLTQTLGPWRRPVAYLSKKLDPVASGWPVCLKAIAAVAILVKDADKLTLGQNITVIAPHALENIVRQPPDRWMTNARMTHYQSLLLTERVTFAPPAALNPATLLPEETDEPVTHDCHQLLIEETGVRKDLTDIPLTGEVLTWFTDGSSYVVEGKRMAGAAVVDGTRTIWASSLPEGTSAQKAELMALTQALRLAEGKSINIYTDSRYAFATAHVHGAIYKQRGWLTSAGREIKNKEEILSLLEALHLPKRLAIIHCPGHQKAKDPISRGNQMADRVAKQAAQGVNLLPAGKRTADGSEFEKRTADGSEFESPKKKAKVE

SEQ ID NO: 62 - protein, 2088 aa, synthetic construct
MPAAKRVKLDGGDKKYSIGLDIGTNSVGWAVITDEYKVPSKKFKVLGNTDRHSIKKNLIGALLFDSGETAEATRLKRTARRRYTRRKNRICYLQEIFSNEMAKVDDSFFHRLEESFLVEEDKKHERHPIFGNIVDEVAYHEKYPTIYHLRKKLVDSTDKADLRLIYLALAHMIKFRGHFLIEGDLNPDNSDVDKLFIQLVQTYNQLFEENPINASGVDAKAILSARLSKSRRLENLIAQLPGEKKNGLFGNLIALSLGLTPNFKSNFDLAEDAKLQLSKDTYDDDLDNLLAQIGDQYADLFLAAKNLSDAILLSDILRVNTEITKAPLSASMIKRYDEHHQDLTLLKALVRQQLPEKYKEIFFDQSKNGYAGYIDGGASQEEFYKFIKPILEKMDGTEELLVKLNREDLLRKQRTFDNGSIPHQIHLGELHAILRRQEDFYPFLKDNREKIEKILTFRIPYYVGPLARGNSRFAWMTRKSEETITPWNFEEVVDKGASAQSFIERMTNFDKNLPNEKVLPKHSLLYEYFTVYNELTKVKYVTEGMRKPAFLSGEQKKAIVDLLFKTNRKVTVKQLKEDYFKKIECFDSVEISGVEDRFNASLGTYHDLLKIIKDKDFLDNEENEDILEDIVLTLTLFEDREMIEERLKTYAHLFDDKVMKQLKRRRYTGWGRLSRKLINGIRDKQSGKTILDFLKSDGFANRNFMQLIHDDSLTFKEDIQKAQVSGQGDSLHEHIANLAGSPAIKKGILQTVKVVDELVKVMGRHKPENIVIEMARENQTTQKGQKNSRERMKRIEEGIKELGSQILKEHPVENTQLQNEKLYLYYLQNGRDMYVDQELDINRLSDYDVDHIVPQSFLKDDSIDNKVLTRSDKARGKSDNVPSEEVVKKMKNYWRQLLNAKLITQRKFDNLTKAERGGLSELDKAGFIKRQLVETRQITKHVAQILDSRMNTKYDENDKLIREVKVITLKSKLVSDFRKDFQFYKVREINNYHHAHDAYLNAVVGTALIKKYPKLESEFVYGDYKVYDVRKMIAKSEQEIGKATAKYFFYSNIMNFFKTEITLANGEIRKRPLIETNGETGEIVWDKGRDFATVRKVLSMPQVNIVKKTEVQTGGFSKESILPKRNSDKLIARKKDWDPKKYGGFDSPTVAYSVLVVAKVEKGKSKKLKSVKELLGITIMERSSFEKNPIDFLEAKGYKEVKKDLIIKLPKYSLFELENGRKRMLASAGELQKGNELALPSKYVNFLYLASHYEKLKGSPEDNEQKQLFVEQHKHYLDEIIEQISEFSKRVILADANLDKVLSAYNKHRDKPIREQAENIIHLFTLTNLGAPAAFKYFDTTIDRKRYTSTKEVLDATLIHQSITGLYETRIDLSQLGGDGGPAPAPAPAPAPGGLDDEYRLYSPLVKPDQNIQFWLEQFPQAWAETAGMGLAKQVPPQVIQLKASATPVSVRQYPLSKEAQEGIRPHVQRLIQQGILVPVQSPWNTPLLPVRKPGTNDYRPVQDLREVNKRVQDIHPTVPNPYNLLCALPPQRSWYTVLDLKDAFFCLRLHPTSQPLFAFEWRDPGTGRTGQLTWTRLPQGFKNSPTIFNEALHRDLANFRIQHPQVTLLQYVDDLLLAGATKQDCLEGTKALLLELSDLGYRASAKKAQICRREVTYLGYSLRDGQRWLTEARKKTVVQIPAPTTAKQVREFLGKAGFCRLFIPGFATLAAPLYPLTKPKGEFSWAPEHQKAFDAIKKALLSAPALALPDVTKPFTLYVDERKGVARGVLTQTLGPWRRPVAYLSKKLDPVASGWPVCLKAIAAVAILVKDADKLTLGQNITVIAPHALENIVRQPPDRWMTNARMTHYQSLLLTERVTFAPPAALNPATLLPEETDEPVTHDCHQLLIEETGVRKDLTDIPLTGEVLTWFTDGSSYVVEGKRMAGAAVVDGTRTIWASSLPEGTSAQKAELMALTQALRLAEGKSINIYTDSRYAFATAHVHGAIYKQRGWLTSAGREIKNKEEILSLLEALHLPKRLAIIHCPGHQKAKDPISRGNQMADRVAKQAAQGVNLLPAGKRTADGSEFEKRTADGSEFESPKKKAKVE

SEQ ID NO: 63 - protein, 2088 aa, synthetic construct
MPAAKRVKLDGGDKKYSIGLDIGTNSVGWAVITDEYKVPSKKFKVLGNTDRHSIKKNLIGALLFDSGETAEATRLKRTARRRYTRRKNRICYLQEIFSNEMAKVDDSFFHRLEESFLVEEDKKHERHPIFGNIVDEVAYHEKYPTIYHLRKKLVDSTDKADLRLIYLALAHMIKFRGHFLIEGDLNPDNSDVDKLFIQLVQTYNQLFEENPINASGVDAKAILSARLSKSRRLENLIAQLPGEKKNGLFGNLIALSLGLTPNFKSNFDLAEDAKLQLSKDTYDDDLDNLLAQIGDQYADLFLAAKNLSDAILLSDILRVNTEITKAPLSASMIKRYDEHHQDLTLLKALVRQQLPEKYKEIFFDQSKNGYAGYIDGGASQEEFYKFIKPILEKMDGTEELLVKLNREDLLRKQRTFDNGSIPHQIHLGELHAILRRQEDFYPFLKDNREKIEKILTFRIPYYVGPLARGNSRFAWMTRKSEETITPWNFEEVVDKGASAQSFIERMTNFDKNLPNEKVLPKHSLLYEYFTVYNELTKVKYVTEGMRKPAFLSGEQKKAIVDLLFKTNRKVTVKQLKEDYFKKIECFDSVEISGVEDRFNASLGTYHDLLKIIKDKDFLDNEENEDILEDIVLTLTLFEDREMIEERLKTYAHLFDDKVMKQLKRRRYTGWGRLSRKLINGIRDKQSGKTILDFLKSDGFANRNFMQLIHDDSLTFKEDIQKAQVSGQGDSLHEHIANLAGSPAIKKGILQTVKVVDELVKVMGRHKPENIVIEMARENQTTQKGQKNSRERMKRIEEGIKELGSQILKEHPVENTQLQNEKLYLYYLQNGRDMYVDQELDINRLSDYDVDHIVPQSFLKDDSIDNKVLTRSDKARGKSDNVPSEEVVKKMKNYWRQLLNAKLITQRKFDNLTKAERGGLSELDKAGFIKRQLVETRQITKHVAQILDSRMNTKYDENDKLIREVKVITLKSKLVSDFRKDFQFYKVREINNYHHAHDAYLNAVVGTALIKKYPKLESEFVYGDYKVYDVRKMIAKSEQEIGKATAKYFFYSNIMNFFKTEITLANGEIRKRPLIETNGETGEIVWDKGRDFATVRKVLSMPQVNIVKKTEVQTGGFSKESILPKRNSDKLIARKKDWDPKKYGGFDSPTVAYSVLVVAKVEKGKSKKLKSVKELLGITIMERSSFEKNPIDFLEAKGYKEVKKDLIIKLPKYSLFELENGRKRMLASAGELQKGNELALPSKYVNFLYLASHYEKLKGSPEDNEQKQLFVEQHKHYLDEIIEQISEFSKRVILADANLDKVLSAYNKHRDKPIREQAENIIHLFTLTNLGAPAAFKYFDTTIDRKRYTSTKEVLDATLIHQSITGLYETRIDLSQLGGDGGGGGEAAAKPAPGGLDDEYRLYSPLVKPDQNIQFWLEQFPQAWAETAGMGLAKQVPPQVIQLKASATPVSVRQYPLSKEAQEGIRPHVQRLIQQGILVPVQSPWNTPLLPVRKPGTNDYRPVQDLREVNKRVQDIHPTVPNPYNLLCALPPQRSWYTVLDLKDAFFCLRLHPTSQPLFAFEWRDPGTGRTGQLTWTRLPQGFKNSPTIFNEALHRDLANFRIQHPQVTLLQYVDDLLLAGATKQDCLEGTKALLLELSDLGYRASAKKAQICRREVTYLGYSLRDGQRWLTEARKKTVVQIPAPTTAKQVREFLGKAGFCRLFIPGFATLAAPLYPLTKPKGEFSWAPEHQKAFDAIKKALLSAPALALPDVTKPFTLYVDERKGVARGVLTQTLGPWRRPVAYLSKKLDPVASGWPVCLKAIAAVAILVKDADKLTLGQNITVIAPHALENIVRQPPDRWMTNARMTHYQSLLLTERVTFAPPAALNPATLLPEETDEPVTHDCHQLLIEETGVRKDLTDIPLTGEVLTWFTDGSSYVVEGKRMAGAAVVDGTRTIWASSLPEGTSAQKAELMALTQALRLAEGKSINIYTDSRYAFATAHVHGAIYKQRGWLTSAGREIKNKEEILSLLEALHLPKRLAIIHCPGHQKAKDPISRGNQMADRVAKQAAQGVNLLPAGKRTADGSEFEKRTADGSEFESPKKKAKVE

SEQ ID NO: 64 - protein, 2086 aa, synthetic construct
MPAAKRVKLDGGDKKYSIGLDIGTNSVGWAVITDEYKVPSKKFKVLGNTDRHSIKKNLIGALLFDSGETAEATRLKRTARRRYTRRKNRICYLQEIFSNEMAKVDDSFFHRLEESFLVEEDKKHERHPIFGNIVDEVAYHEKYPTIYHLRKKLVDSTDKADLRLIYLALAHMIKFRGHFLIEGDLNPDNSDVDKLFIQLVQTYNQLFEENPINASGVDAKAILSARLSKSRRLENLIAQLPGEKKNGLFGNLIALSLGLTPNFKSNFDLAEDAKLQLSKDTYDDDLDNLLAQIGDQYADLFLAAKNLSDAILLSDILRVNTEITKAPLSASMIKRYDEHHQDLTLLKALVRQQLPEKYKEIFFDQSKNGYAGYIDGGASQEEFYKFIKPILEKMDGTEELLVKLNREDLLRKQRTFDNGSIPHQIHLGELHAILRRQEDFYPFLKDNREKIEKILTFRIPYYVGPLARGNSRFAWMTRKSEETITPWNFEEVVDKGASAQSFIERMTNFDKNLPNEKVLPKHSLLYEYFTVYNELTKVKYVTEGMRKPAFLSGEQKKAIVDLLFKTNRKVTVKQLKEDYFKKIECFDSVEISGVEDRFNASLGTYHDLLKIIKDKDFLDNEENEDILEDIVLTLTLFEDREMIEERLKTYAHLFDDKVMKQLKRRRYTGWGRLSRKLINGIRDKQSGKTILDFLKSDGFANRNFMQLIHDDSLTFKEDIQKAQVSGQGDSLHEHIANLAGSPAIKKGILQTVKVVDELVKVMGRHKPENIVIEMARENQTTQKGQKNSRERMKRIEEGIKELGSQILKEHPVENTQLQNEKLYLYYLQNGRDMYVDQELDINRLSDYDVDHIVPQSFLKDDSIDNKVLTRSDKARGKSDNVPSEEVVKKMKNYWRQLLNAKLITQRKFDNLTKAERGGLSELDKAGFIKRQLVETRQITKHVAQILDSRMNTKYDENDKLIREVKVITLKSKLVSDFRKDFQFYKVREINNYHHAHDAYLNAVVGTALIKKYPKLESEFVYGDYKVYDVRKMIAKSEQEIGKATAKYFFYSNIMNFFKTEITLANGEIRKRPLIETNGETGEIVWDKGRDFATVRKVLSMPQVNIVKKTEVQTGGFSKESILPKRNSDKLIARKKDWDPKKYGGFDSPTVAYSVLVVAKVEKGKSKKLKSVKELLGITIMERSSFEKNPIDFLEAKGYKEVKKDLIIKLPKYSLFELENGRKRMLASAGELQKGNELALPSKYVNFLYLASHYEKLKGSPEDNEQKQLFVEQHKHYLDEIIEQISEFSKRVILADANLDKVLSAYNKHRDKPIREQAENIIHLFTLTNLGAPAAFKYFDTTIDRKRYTSTKEVLDATLIHQSITGLYETRIDLSQLGGDGGGSSGGSPAPGGLDDEYRLYSPLVKPDQNIQFWLEQFPQAWAETAGMGLAKQVPPQVIQLKASATPVSVRQYPLSKEAQEGIRPHVQRLIQQGILVPVQSPWNTPLLPVRKPGTNDYRPVQDLREVNKRVQDIHPTVPNPYNLLCALPPQRSWYTVLDLKDAFFCLRLHPTSQPLFAFEWRDPGTGRTGQLTWTRLPQGFKNSPTIFNEALHRDLANFRIQHPQVTLLQYVDDLLLAGATKQDCLEGTKALLLELSDLGYRASAKKAQICRREVTYLGYSLRDGQRWLTEARKKTVVQIPAPTTAKQVREFLGKAGFCRLFIPGFATLAAPLYPLTKPKGEFSWAPEHQKAFDAIKKALLSAPALALPDVTKPFTLYVDERKGVARGVLTQTLGPWRRPVAYLSKKLDPVASGWPVCLKAIAAVAILVKDADKLTLGQNITVIAPHALENIVRQPPDRWMTNARMTHYQSLLLTERVTFAPPAALNPATLLPEETDEPVTHDCHQLLIEETGVRKDLTDIPLTGEVLTWFTDGSSYVVEGKRMAGAAVVDGTRTIWASSLPEGTSAQKAELMALTQALRLAEGKSINIYTDSRYAFATAHVHGAIYKQRGWLTSAGREIKNKEEILSLLEALHLPKRLAIIHCPGHQKAKDPISRGNQMADRVAKQAAQGVNLLPAGKRTADGSEFEKRTADGSEFESPKKKAKVE

SEQ ID NO: 65 - protein, 2088 aa, synthetic construct
MPAAKRVKLDGGDKKYSIGLDIGTNSVGWAVITDEYKVPSKKFKVLGNTDRHSIKKNLIGALLFDSGETAEATRLKRTARRRYTRRKNRICYLQEIFSNEMAKVDDSFFHRLEESFLVEEDKKHERHPIFGNIVDEVAYHEKYPTIYHLRKKLVDSTDKADLRLIYLALAHMIKFRGHFLIEGDLNPDNSDVDKLFIQLVQTYNQLFEENPINASGVDAKAILSARLSKSRRLENLIAQLPGEKKNGLFGNLIALSLGLTPNFKSNFDLAEDAKLQLSKDTYDDDLDNLLAQIGDQYADLFLAAKNLSDAILLSDILRVNTEITKAPLSASMIKRYDEHHQDLTLLKALVRQQLPEKYKEIFFDQSKNGYAGYIDGGASQEEFYKFIKPILEKMDGTEELLVKLNREDLLRKQRTFDNGSIPHQIHLGELHAILRRQEDFYPFLKDNREKIEKILTFRIPYYVGPLARGNSRFAWMTRKSEETITPWNFEEVVDKGASAQSFIERMTNFDKNLPNEKVLPKHSLLYEYFTVYNELTKVKYVTEGMRKPAFLSGEQKKAIVDLLFKTNRKVTVKQLKEDYFKKIECFDSVEISGVEDRFNASLGTYHDLLKIIKDKDFLDNEENEDILEDIVLTLTLFEDREMIEERLKTYAHLFDDKVMKQLKRRRYTGWGRLSRKLINGIRDKQSGKTILDFLKSDGFANRNFMQLIHDDSLTFKEDIQKAQVSGQGDSLHEHIANLAGSPAIKKGILQTVKVVDELVKVMGRHKPENIVIEMARENQTTQKGQKNSRERMKRIEEGIKELGSQILKEHPVENTQLQNEKLYLYYLQNGRDMYVDQELDINRLSDYDVDHIVPQSFLKDDSIDNKVLTRSDKARGKSDNVPSEEVVKKMKNYWRQLLNAKLITQRKFDNLTKAERGGLSELDKAGFIKRQLVETRQITKHVAQILDSRMNTKYDENDKLIREVKVITLKSKLVSDFRKDFQFYKVREINNYHHAHDAYLNAVVGTALIKKYPKLESEFVYGDYKVYDVRKMIAKSEQEIGKATAKYFFYSNIMNFFKTEITLANGEIRKRPLIETNGETGEIVWDKGRDFATVRKVLSMPQVNIVKKTEVQTGGFSKESILPKRNSDKLIARKKDWDPKKYGGFDSPTVAYSVLVVAKVEKGKSKKLKSVKELLGITIMERSSFEKNPIDFLEAKGYKEVKKDLIIKLPKYSLFELENGRKRMLASAGELQKGNELALPSKYVNFLYLASHYEKLKGSPEDNEQKQLFVEQHKHYLDEIIEQISEFSKRVILADANLDKVLSAYNKHRDKPIREQAENIIHLFTLTNLGAPAAFKYFDTTIDRKRYTSTKEVLDATLIHQSITGLYETRIDLSQLGGDGGGGGEAAAKGGSGGLDDEYRLYSPLVKPDQNIQFWLEQFPQAWAETAGMGLAKQVPPQVIQLKASATPVSVRQYPLSKEAQEGIRPHVQRLIQQGILVPVQSPWNTPLLPVRKPGTNDYRPVQDLREVNKRVQDIHPTVPNPYNLLCALPPQRSWYTVLDLKDAFFCLRLHPTSQPLFAFEWRDPGTGRTGQLTWTRLPQGFKNSPTIFNEALHRDLANFRIQHPQVTLLQYVDDLLLAGATKQDCLEGTKALLLELSDLGYRASAKKAQICRREVTYLGYSLRDGQRWLTEARKKTVVQIPAPTTAKQVREFLGKAGFCRLFIPGFATLAAPLYPLTKPKGEFSWAPEHQKAFDAIKKALLSAPALALPDVTKPFTLYVDERKGVARGVLTQTLGPWRRPVAYLSKKLDPVASGWPVCLKAIAAVAILVKDADKLTLGQNITVIAPHALENIVRQPPDRWMTNARMTHYQSLLLTERVTFAPPAALNPATLLPEETDEPVTHDCHQLLIEETGVRKDLTDIPLTGEVLTWFTDGSSYVVEGKRMAGAAVVDGTRTIWASSLPEGTSAQKAELMALTQALRLAEGKSINIYTDSRYAFATAHVHGAIYKQRGWLTSAGREIKNKEEILSLLEALHLPKRLAIIHCPGHQKAKDPISRGNQMADRVAKQAAQGVNLLPAGKRTADGSEFEKRTADGSEFESPKKKAKVE

SEQ ID NO: 66 - protein, 2081 aa, synthetic construct
MPAAKRVKLDGGDKKYSIGLDIGTNSVGWAVITDEYKVPSKKFKVLGNTDRHSIKKNLIGALLFDSGETAEATRLKRTARRRYTRRKNRICYLQEIFSNEMAKVDDSFFHRLEESFLVEEDKKHERHPIFGNIVDEVAYHEKYPTIYHLRKKLVDSTDKADLRLIYLALAHMIKFRGHFLIEGDLNPDNSDVDKLFIQLVQTYNQLFEENPINASGVDAKAILSARLSKSRRLENLIAQLPGEKKNGLFGNLIALSLGLTPNFKSNFDLAEDAKLQLSKDTYDDDLDNLLAQIGDQYADLFLAAKNLSDAILLSDILRVNTEITKAPLSASMIKRYDEHHQDLTLLKALVRQQLPEKYKEIFFDQSKNGYAGYIDGGASQEEFYKFIKPILEKMDGTEELLVKLNREDLLRKQRTFDNGSIPHQIHLGELHAILRRQEDFYPFLKDNREKIEKILTFRIPYYVGPLARGNSRFAWMTRKSEETITPWNFEEVVDKGASAQSFIERMTNFDKNLPNEKVLPKHSLLYEYFTVYNELTKVKYVTEGMRKPAFLSGEQKKAIVDLLFKTNRKVTVKQLKEDYFKKIECFDSVEISGVEDRFNASLGTYHDLLKIIKDKDFLDNEENEDILEDIVLTLTLFEDREMIEERLKTYAHLFDDKVMKQLKRRRYTGWGRLSRKLINGIRDKQSGKTILDFLKSDGFANRNFMQLIHDDSLTFKEDIQKAQVSGQGDSLHEHIANLAGSPAIKKGILQTVKVVDELVKVMGRHKPENIVIEMARENQTTQKGQKNSRERMKRIEEGIKELGSQILKEHPVENTQLQNEKLYLYYLQNGRDMYVDQELDINRLSDYDVDHIVPQSFLKDDSIDNKVLTRSDKARGKSDNVPSEEVVKKMKNYWRQLLNAKLITQRKFDNLTKAERGGLSELDKAGFIKRQLVETRQITKHVAQILDSRMNTKYDENDKLIREVKVITLKSKLVSDFRKDFQFYKVREINNYHHAHDAYLNAVVGTALIKKYPKLESEFVYGDYKVYDVRKMIAKSEQEIGKATAKYFFYSNIMNFFKTEITLANGEIRKRPLIETNGETGEIVWDKGRDFATVRKVLSMPQVNIVKKTEVQTGGFSKESILPKRNSDKLIARKKDWDPKKYGGFDSPTVAYSVLVVAKVEKGKSKKLKSVKELLGITIMERSSFEKNPIDFLEAKGYKEVKKDLIIKLPKYSLFELENGRKRMLASAGELQKGNELALPSKYVNFLYLASHYEKLKGSPEDNEQKQLFVEQHKHYLDEIIEQISEFSKRVILADANLDKVLSAYNKHRDKPIREQAENIIHLFTLTNLGAPAAFKYFDTTIDRKRYTSTKEVLDATLIHQSITGLYETRIDLSQLGGDGGGGGGGGLDDEYRLYSPLVKPDQNIQFWLEQFPQAWAETAGMGLAKQVPPQVIQLKASATPVSVRQYPLSKEAQEGIRPHVQRLIQQGILVPVQSPWNTPLLPVRKPGTNDYRPVQDLREVNKRVQDIHPTVPNPYNLLCALPPQRSWYTVLDLKDAFFCLRLHPTSQPLFAFEWRDPGTGRTGQLTWTRLPQGFKNSPTIFNEALHRDLANFRIQHPQVTLLQYVDDLLLAGATKQDCLEGTKALLLELSDLGYRASAKKAQICRREVTYLGYSLRDGQRWLTEARKKTVVQIPAPTTAKQVREFLGKAGFCRLFIPGFATLAAPLYPLTKPKGEFSWAPEHQKAFDAIKKALLSAPALALPDVTKPFTLYVDERKGVARGVLTQTLGPWRRPVAYLSKKLDPVASGWPVCLKAIAAVAILVKDADKLTLGQNITVIAPHALENIVRQPPDRWMTNARMTHYQSLLLTERVTFAPPAALNPATLLPEETDEPVTHDCHQLLIEETGVRKDLTDIPLTGEVLTWFTDGSSYVVEGKRMAGAAVVDGTRTIWASSLPEGTSAQKAELMALTQALRLAEGKSINIYTDSRYAFATAHVHGAIYKQRGWLTSAGREIKNKEEILSLLEALHLPKRLAIIHCPGHQKAKDPISRGNQMADRVAKQAAQGVNLLPAGKRTADGSEFEKRTADGSEFESPKKKAKVE

SEQ ID NO: 67 - protein, 2089 aa, synthetic construct
MPAAKRVKLDGGDKKYSIGLDIGTNSVGWAVITDEYKVPSKKFKVLGNTDRHSIKKNLIGALLFDSGETAEATRLKRTARRRYTRRKNRICYLQEIFSNEMAKVDDSFFHRLEESFLVEEDKKHERHPIFGNIVDEVAYHEKYPTIYHLRKKLVDSTDKADLRLIYLALAHMIKFRGHFLIEGDLNPDNSDVDKLFIQLVQTYNQLFEENPINASGVDAKAILSARLSKSRRLENLIAQLPGEKKNGLFGNLIALSLGLTPNFKSNFDLAEDAKLQLSKDTYDDDLDNLLAQIGDQYADLFLAAKNLSDAILLSDILRVNTEITKAPLSASMIKRYDEHHQDLTLLKALVRQQLPEKYKEIFFDQSKNGYAGYIDGGASQEEFYKFIKPILEKMDGTEELLVKLNREDLLRKQRTFDNGSIPHQIHLGELHAILRRQEDFYPFLKDNREKIEKILTFRIPYYVGPLARGNSRFAWMTRKSEETITPWNFEEVVDKGASAQSFIERMTNFDKNLPNEKVLPKHSLLYEYFTVYNELTKVKYVTEGMRKPAFLSGEQKKAIVDLLFKTNRKVTVKQLKEDYFKKIECFDSVEISGVEDRFNASLGTYHDLLKIIKDKDFLDNEENEDILEDIVLTLTLFEDREMIEERLKTYAHLFDDKVMKQLKRRRYTGWGRLSRKLINGIRDKQSGKTILDFLKSDGFANRNFMQLIHDDSLTFKEDIQKAQVSGQGDSLHEHIANLAGSPAIKKGILQTVKVVDELVKVMGRHKPENIVIEMARENQTTQKGQKNSRERMKRIEEGIKELGSQILKEHPVENTQLQNEKLYLYYLQNGRDMYVDQELDINRLSDYDVDHIVPQSFLKDDSIDNKVLTRSDKARGKSDNVPSEEVVKKMKNYWRQLLNAKLITQRKFDNLTKAERGGLSELDKAGFIKRQLVETRQITKHVAQILDSRMNTKYDENDKLIREVKVITLKSKLVSDFRKDFQFYKVREINNYHHAHDAYLNAVVGTALIKKYPKLESEFVYGDYKVYDVRKMIAKSEQEIGKATAKYFFYSNIMNFFKTEITLANGEIRKRPLIETNGETGEIVWDKGRDFATVRKVLSMPQVNIVKKTEVQTGGFSKESILPKRNSDKLIARKKDWDPKKYGGFDSPTVAYSVLVVAKVEKGKSKKLKSVKELLGITIMERSSFEKNPIDFLEAKGYKEVKKDLIIKLPKYSLFELENGRKRMLASAGELQKGNELALPSKYVNFLYLASHYEKLKGSPEDNEQKQLFVEQHKHYLDEIIEQISEFSKRVILADANLDKVLSAYNKHRDKPIREQAENIIHLFTLTNLGAPAAFKYFDTTIDRKRYTSTKEVLDATLIHQSITGLYETRIDLSQLGGDGGGGSGGSGGSGGSGGLDDEYRLYSPLVKPDQNIQFWLEQFPQAWAETAGMGLAKQVPPQVIQLKASATPVSVRQYPLSKEAQEGIRPHVQRLIQQGILVPVQSPWNTPLLPVRKPGTNDYRPVQDLREVNKRVQDIHPTVPNPYNLLCALPPQRSWYTVLDLKDAFFCLRLHPTSQPLFAFEWRDPGTGRTGQLTWTRLPQGFKNSPTIFNEALHRDLANFRIQHPQVTLLQYVDDLLLAGATKQDCLEGTKALLLELSDLGYRASAKKAQICRREVTYLGYSLRDGQRWLTEARKKTVVQIPAPTTAKQVREFLGKAGFCRLFIPGFATLAAPLYPLTKPKGEFSWAPEHQKAFDAIKKALLSAPALALPDVTKPFTLYVDERKGVARGVLTQTLGPWRRPVAYLSKKLDPVASGWPVCLKAIAAVAILVKDADKLTLGQNITVIAPHALENIVRQPPDRWMTNARMTHYQSLLLTERVTFAPPAALNPATLLPEETDEPVTHDCHQLLIEETGVRKDLTDIPLTGEVLTWFTDGSSYVVEGKRMAGAAVVDGTRTIWASSLPEGTSAQKAELMALTQALRLAEGKSINIYTDSRYAFATAHVHGAIYKQRGWLTSAGREIKNKEEILSLLEALHLPKRLAIIHCPGHQKAKDPISRGNQMADRVAKQAAQGVNLLPAGKRTADGSEFEKRTADGSEFESPKKKAKVE

SEQ ID NO: 68 - protein, 2088 aa, synthetic construct
MPAAKRVKLDGGDKKYSIGLDIGTNSVGWAVITDEYKVPSKKFKVLGNTDRHSIKKNLIGALLFDSGETAEATRLKRTARRRYTRRKNRICYLQEIFSNEMAKVDDSFFHRLEESFLVEEDKKHERHPIFGNIVDEVAYHEKYPTIYHLRKKLVDSTDKADLRLIYLALAHMIKFRGHFLIEGDLNPDNSDVDKLFIQLVQTYNQLFEENPINASGVDAKAILSARLSKSRRLENLIAQLPGEKKNGLFGNLIALSLGLTPNFKSNFDLAEDAKLQLSKDTYDDDLDNLLAQIGDQYADLFLAAKNLSDAILLSDILRVNTEITKAPLSASMIKRYDEHHQDLTLLKALVRQQLPEKYKEIFFDQSKNGYAGYIDGGASQEEFYKFIKPILEKMDGTEELLVKLNREDLLRKQRTFDNGSIPHQIHLGELHAILRRQEDFYPFLKDNREKIEKILTFRIPYYVGPLARGNSRFAWMTRKSEETITPWNFEEVVDKGASAQSFIERMTNFDKNLPNEKVLPKHSLLYEYFTVYNELTKVKYVTEGMRKPAFLSGEQKKAIVDLLFKTNRKVTVKQLKEDYFKKIECFDSVEISGVEDRFNASLGTYHDLLKIIKDKDFLDNEENEDILEDIVLTLTLFEDREMIEERLKTYAHLFDDKVMKQLKRRRYTGWGRLSRKLINGIRDKQSGKTILDFLKSDGFANRNFMQLIHDDSLTFKEDIQKAQVSGQGDSLHEHIANLAGSPAIKKGILQTVKVVDELVKVMGRHKPENIVIEMARENQTTQKGQKNSRERMKRIEEGIKELGSQILKEHPVENTQLQNEKLYLYYLQNGRDMYVDQELDINRLSDYDVDHIVPQSFLKDDSIDNKVLTRSDKARGKSDNVPSEEVVKKMKNYWRQLLNAKLITQRKFDNLTKAERGGLSELDKAGFIKRQLVETRQITKHVAQILDSRMNTKYDENDKLIREVKVITLKSKLVSDFRKDFQFYKVREINNYHHAHDAYLNAVVGTALIKKYPKLESEFVYGDYKVYDVRKMIAKSEQEIGKATAKYFFYSNIMNFFKTEITLANGEIRKRPLIETNGETGEIVWDKGRDFATVRKVLSMPQVNIVKKTEVQTGGFSKESILPKRNSDKLIARKKDWDPKKYGGFDSPTVAYSVLVVAKVEKGKSKKLKSVKELLGITIMERSSFEKNPIDFLEAKGYKEVKKDLIIKLPKYSLFELENGRKRMLASAGELQKGNELALPSKYVNFLYLASHYEKLKGSPEDNEQKQLFVEQHKHYLDEIIEQISEFSKRVILADANLDKVLSAYNKHRDKPIREQAENIIHLFTLTNLGAPAAFKYFDTTIDRKRYTSTKEVLDATLIHQSITGLYETRIDLSQLGGDGGGGGGGSEAAAKGGLDDEYRLYSPLVKPDQNIQFWLEQFPQAWAETAGMGLAKQVPPQVIQLKASATPVSVRQYPLSKEAQEGIRPHVQRLIQQGILVPVQSPWNTPLLPVRKPGTNDYRPVQDLREVNKRVQDIHPTVPNPYNLLCALPPQRSWYTVLDLKDAFFCLRLHPTSQPLFAFEWRDPGTGRTGQLTWTRLPQGFKNSPTIFNEALHRDLANFRIQHPQVTLLQYVDDLLLAGATKQDCLEGTKALLLELSDLGYRASAKKAQICRREVTYLGYSLRDGQRWLTEARKKTVVQIPAPTTAKQVREFLGKAGFCRLFIPGFATLAAPLYPLTKPKGEFSWAPEHQKAFDAIKKALLSAPALALPDVTKPFTLYVDERKGVARGVLTQTLGPWRRPVAYLSKKLDPVASGWPVCLKAIAAVAILVKDADKLTLGQNITVIAPHALENIVRQPPDRWMTNARMTHYQSLLLTERVTFAPPAALNPATLLPEETDEPVTHDCHQLLIEETGVRKDLTDIPLTGEVLTWFTDGSSYVVEGKRMAGAAVVDGTRTIWASSLPEGTSAQKAELMALTQALRLAEGKSINIYTDSRYAFATAHVHGAIYKQRGWLTSAGREIKNKEEILSLLEALHLPKRLAIIHCPGHQKAKDPISRGNQMADRVAKQAAQGVNLLPAGKRTADGSEFEKRTADGSEFESPKKKAKVE

SEQ ID NO: 69 - protein, 2086 aa, synthetic construct
MPAAKRVKLDGGDKKYSIGLDIGTNSVGWAVITDEYKVPSKKFKVLGNTDRHSIKKNLIGALLFDSGETAEATRLKRTARRRYTRRKNRICYLQEIFSNEMAKVDDSFFHRLEESFLVEEDKKHERHPIFGNIVDEVAYHEKYPTIYHLRKKLVDSTDKADLRLIYLALAHMIKFRGHFLIEGDLNPDNSDVDKLFIQLVQTYNQLFEENPINASGVDAKAILSARLSKSRRLENLIAQLPGEKKNGLFGNLIALSLGLTPNFKSNFDLAEDAKLQLSKDTYDDDLDNLLAQIGDQYADLFLAAKNLSDAILLSDILRVNTEITKAPLSASMIKRYDEHHQDLTLLKALVRQQLPEKYKEIFFDQSKNGYAGYIDGGASQEEFYKFIKPILEKMDGTEELLVKLNREDLLRKQRTFDNGSIPHQIHLGELHAILRRQEDFYPFLKDNREKIEKILTFRIPYYVGPLARGNSRFAWMTRKSEETITPWNFEEVVDKGASAQSFIERMTNFDKNLPNEKVLPKHSLLYEYFTVYNELTKVKYVTEGMRKPAFLSGEQKKAIVDLLFKTNRKVTVKQLKEDYFKKIECFDSVEISGVEDRFNASLGTYHDLLKIIKDKDFLDNEENEDILEDIVLTLTLFEDREMIEERLKTYAHLFDDKVMKQLKRRRYTGWGRLSRKLINGIRDKQSGKTILDFLKSDGFANRNFMQLIHDDSLTFKEDIQKAQVSGQGDSLHEHIANLAGSPAIKKGILQTVKVVDELVKVMGRHKPENIVIEMARENQTTQKGQKNSRERMKRIEEGIKELGSQILKEHPVENTQLQNEKLYLYYLQNGRDMYVDQELDINRLSDYDVDHIVPQSFLKDDSIDNKVLTRSDKARGKSDNVPSEEVVKKMKNYWRQLLNAKLITQRKFDNLTKAERGGLSELDKAGFIKRQLVETRQITKHVAQILDSRMNTKYDENDKLIREVKVITLKSKLVSDFRKDFQFYKVREINNYHHAHDAYLNAVVGTALIKKYPKLESEFVYGDYKVYDVRKMIAKSEQEIGKATAKYFFYSNIMNFFKTEITLANGEIRKRPLIETNGETGEIVWDKGRDFATVRKVLSMPQVNIVKKTEVQTGGFSKESILPKRNSDKLIARKKDWDPKKYGGFDSPTVAYSVLVVAKVEKGKSKKLKSVKELLGITIMERSSFEKNPIDFLEAKGYKEVKKDLIIKLPKYSLFELENGRKRMLASAGELQKGNELALPSKYVNFLYLASHYEKLKGSPEDNEQKQLFVEQHKHYLDEIIEQISEFSKRVILADANLDKVLSAYNKHRDKPIREQAENIIHLFTLTNLGAPAAFKYFDTTIDRKRYTSTKEVLDATLIHQSITGLYETRIDLSQLGGDGGGSSPAPGGSGGLDDEYRLYSPLVKPDQNIQFWLEQFPQAWAETAGMGLAKQVPPQVIQLKASATPVSVRQYPLSKEAQEGIRPHVQRLIQQGILVPVQSPWNTPLLPVRKPGTNDYRPVQDLREVNKRVQDIHPTVPNPYNLLCALPPQRSWYTVLDLKDAFFCLRLHPTSQPLFAFEWRDPGTGRTGQLTWTRLPQGFKNSPTIFNEALHRDLANFRIQHPQVTLLQYVDDLLLAGATKQDCLEGTKALLLELSDLGYRASAKKAQICRREVTYLGYSLRDGQRWLTEARKKTVVQIPAPTTAKQVREFLGKAGFCRLFIPGFATLAAPLYPLTKPKGEFSWAPEHQKAFDAIKKALLSAPALALPDVTKPFTLYVDERKGVARGVLTQTLGPWRRPVAYLSKKLDPVASGWPVCLKAIAAVAILVKDADKLTLGQNITVIAPHALENIVRQPPDRWMTNARMTHYQSLLLTERVTFAPPAALNPATLLPEETDEPVTHDCHQLLIEETGVRKDLTDIPLTGEVLTWFTDGSSYVVEGKRMAGAAVVDGTRTIWASSLPEGTSAQKAELMALTQALRLAEGKSINIYTDSRYAFATAHVHGAIYKQRGWLTSAGREIKNKEEILSLLEALHLPKRLAIIHCPGHQKAKDPISRGNQMADRVAKQAAQGVNLLPAGKRTADGSEFEKRTADGSEFESPKKKAKVE

SEQ ID NO: 70 - protein, 2082 aa, synthetic construct
MPAAKRVKLDGGDKKYSIGLDIGTNSVGWAVITDEYKVPSKKFKVLGNTDRHSIKKNLIGALLFDSGETAEATRLKRTARRRYTRRKNRICYLQEIFSNEMAKVDDSFFHRLEESFLVEEDKKHERHPIFGNIVDEVAYHEKYPTIYHLRKKLVDSTDKADLRLIYLALAHMIKFRGHFLIEGDLNPDNSDVDKLFIQLVQTYNQLFEENPINASGVDAKAILSARLSKSRRLENLIAQLPGEKKNGLFGNLIALSLGLTPNFKSNFDLAEDAKLQLSKDTYDDDLDNLLAQIGDQYADLFLAAKNLSDAILLSDILRVNTEITKAPLSASMIKRYDEHHQDLTLLKALVRQQLPEKYKEIFFDQSKNGYAGYIDGGASQEEFYKFIKPILEKMDGTEELLVKLNREDLLRKQRTFDNGSIPHQIHLGELHAILRRQEDFYPFLKDNREKIEKILTFRIPYYVGPLARGNSRFAWMTRKSEETITPWNFEEVVDKGASAQSFIERMTNFDKNLPNEKVLPKHSLLYEYFTVYNELTKVKYVTEGMRKPAFLSGEQKKAIVDLLFKTNRKVTVKQLKEDYFKKIECFDSVEISGVEDRFNASLGTYHDLLKIIKDKDFLDNEENEDILEDIVLTLTLFEDREMIEERLKTYAHLFDDKVMKQLKRRRYTGWGRLSRKLINGIRDKQSGKTILDFLKSDGFANRNFMQLIHDDSLTFKEDIQKAQVSGQGDSLHEHIANLAGSPAIKKGILQTVKVVDELVKVMGRHKPENIVIEMARENQTTQKGQKNSRERMKRIEEGIKELGSQILKEHPVENTQLQNEKLYLYYLQNGRDMYVDQELDINRLSDYDVDHIVPQSFLKDDSIDNKVLTRSDKARGKSDNVPSEEVVKKMKNYWRQLLNAKLITQRKFDNLTKAERGGLSELDKAGFIKRQLVETRQITKHVAQILDSRMNTKYDENDKLIREVKVITLKSKLVSDFRKDFQFYKVREINNYHHAHDAYLNAVVGTALIKKYPKLESEFVYGDYKVYDVRKMIAKSEQEIGKATAKYFFYSNIMNFFKTEITLANGEIRKRPLIETNGETGEIVWDKGRDFATVRKVLSMPQVNIVKKTEVQTGGFSKESILPKRNSDKLIARKKDWDPKKYGGFDSPTVAYSVLVVAKVEKGKSKKLKSVKELLGITIMERSSFEKNPIDFLEAKGYKEVKKDLIIKLPKYSLFELENGRKRMLASAGELQKGNELALPSKYVNFLYLASHYEKLKGSPEDNEQKQLFVEQHKHYLDEIIEQISEFSKRVILADANLDKVLSAYNKHRDKPIREQAENIIHLFTLTNLGAPAAFKYFDTTIDRKRYTSTKEVLDATLIHQSITGLYETRIDLSQLGGDGGGGGGGGGLDDEYRLYSPLVKPDQNIQFWLEQFPQAWAETAGMGLAKQVPPQVIQLKASATPVSVRQYPLSKEAQEGIRPHVQRLIQQGILVPVQSPWNTPLLPVRKPGTNDYRPVQDLREVNKRVQDIHPTVPNPYNLLCALPPQRSWYTVLDLKDAFFCLRLHPTSQPLFAFEWRDPGTGRTGQLTWTRLPQGFKNSPTIFNEALHRDLANFRIQHPQVTLLQYVDDLLLAGATKQDCLEGTKALLLELSDLGYRASAKKAQICRREVTYLGYSLRDGQRWLTEARKKTVVQIPAPTTAKQVREFLGKAGFCRLFIPGFATLAAPLYPLTKPKGEFSWAPEHQKAFDAIKKALLSAPALALPDVTKPFTLYVDERKGVARGVLTQTLGPWRRPVAYLSKKLDPVASGWPVCLKAIAAVAILVKDADKLTLGQNITVIAPHALENIVRQPPDRWMTNARMTHYQSLLLTERVTFAPPAALNPATLLPEETDEPVTHDCHQLLIEETGVRKDLTDIPLTGEVLTWFTDGSSYVVEGKRMAGAAVVDGTRTIWASSLPEGTSAQKAELMALTQALRLAEGKSINIYTDSRYAFATAHVHGAIYKQRGWLTSAGREIKNKEEILSLLEALHLPKRLAIIHCPGHQKAKDPISRGNQMADRVAKQAAQGVNLLPAGKRTADGSEFEKRTADGSEFESPKKKAKVE

SEQ ID NO: 71 - protein, 2088 aa, synthetic construct
MPAAKRVKLDGGDKKYSIGLDIGTNSVGWAVITDEYKVPSKKFKVLGNTDRHSIKKNLIGALLFDSGETAEATRLKRTARRRYTRRKNRICYLQEIFSNEMAKVDDSFFHRLEESFLVEEDKKHERHPIFGNIVDEVAYHEKYPTIYHLRKKLVDSTDKADLRLIYLALAHMIKFRGHFLIEGDLNPDNSDVDKLFIQLVQTYNQLFEENPINASGVDAKAILSARLSKSRRLENLIAQLPGEKKNGLFGNLIALSLGLTPNFKSNFDLAEDAKLQLSKDTYDDDLDNLLAQIGDQYADLFLAAKNLSDAILLSDILRVNTEITKAPLSASMIKRYDEHHQDLTLLKALVRQQLPEKYKEIFFDQSKNGYAGYIDGGASQEEFYKFIKPILEKMDGTEELLVKLNREDLLRKQRTFDNGSIPHQIHLGELHAILRRQEDFYPFLKDNREKIEKILTFRIPYYVGPLARGNSRFAWMTRKSEETITPWNFEEVVDKGASAQSFIERMTNFDKNLPNEKVLPKHSLLYEYFTVYNELTKVKYVTEGMRKPAFLSGEQKKAIVDLLFKTNRKVTVKQLKEDYFKKIECFDSVEISGVEDRFNASLGTYHDLLKIIKDKDFLDNEENEDILEDIVLTLTLFEDREMIEERLKTYAHLFDDKVMKQLKRRRYTGWGRLSRKLINGIRDKQSGKTILDFLKSDGFANRNFMQLIHDDSLTFKEDIQKAQVSGQGDSLHEHIANLAGSPAIKKGILQTVKVVDELVKVMGRHKPENIVIEMARENQTTQKGQKNSRERMKRIEEGIKELGSQILKEHPVENTQLQNEKLYLYYLQNGRDMYVDQELDINRLSDYDVDHIVPQSFLKDDSIDNKVLTRSDKARGKSDNVPSEEVVKKMKNYWRQLLNAKLITQRKFDNLTKAERGGLSELDKAGFIKRQLVETRQITKHVAQILDSRMNTKYDENDKLIREVKVITLKSKLVSDFRKDFQFYKVREINNYHHAHDAYLNAVVGTALIKKYPKLESEFVYGDYKVYDVRKMIAKSEQEIGKATAKYFFYSNIMNFFKTEITLANGEIRKRPLIETNGETGEIVWDKGRDFATVRKVLSMPQVNIVKKTEVQTGGFSKESILPKRNSDKLIARKKDWDPKKYGGFDSPTVAYSVLVVAKVEKGKSKKLKSVKELLGITIMERSSFEKNPIDFLEAKGYKEVKKDLIIKLPKYSLFELENGRKRMLASAGELQKGNELALPSKYVNFLYLASHYEKLKGSPEDNEQKQLFVEQHKHYLDEIIEQISEFSKRVILADANLDKVLSAYNKHRDKPIREQAENIIHLFTLTNLGAPAAFKYFDTTIDRKRYTSTKEVLDATLIHQSITGLYETRIDLSQLGGDGGEAAAKGGSGSSGGLDDEYRLYSPLVKPDQNIQFWLEQFPQAWAETAGMGLAKQVPPQVIQLKASATPVSVRQYPLSKEAQEGIRPHVQRLIQQGILVPVQSPWNTPLLPVRKPGTNDYRPVQDLREVNKRVQDIHPTVPNPYNLLCALPPQRSWYTVLDLKDAFFCLRLHPTSQPLFAFEWRDPGTGRTGQLTWTRLPQGFKNSPTIFNEALHRDLANFRIQHPQVTLLQYVDDLLLAGATKQDCLEGTKALLLELSDLGYRASAKKAQICRREVTYLGYSLRDGQRWLTEARKKTVVQIPAPTTAKQVREFLGKAGFCRLFIPGFATLAAPLYPLTKPKGEFSWAPEHQKAFDAIKKALLSAPALALPDVTKPFTLYVDERKGVARGVLTQTLGPWRRPVAYLSKKLDPVASGWPVCLKAIAAVAILVKDADKLTLGQNITVIAPHALENIVRQPPDRWMTNARMTHYQSLLLTERVTFAPPAALNPATLLPEETDEPVTHDCHQLLIEETGVRKDLTDIPLTGEVLTWFTDGSSYVVEGKRMAGAAVVDGTRTIWASSLPEGTSAQKAELMALTQALRLAEGKSINIYTDSRYAFATAHVHGAIYKQRGWLTSAGREIKNKEEILSLLEALHLPKRLAIIHCPGHQKAKDPISRGNQMADRVAKQAAQGVNLLPAGKRTADGSEFEKRTADGSEFESPKKKAKVE

SEQ ID NO: 72 - protein, 2088 aa, synthetic construct
MPAAKRVKLDGGDKKYSIGLDIGTNSVGWAVITDEYKVPSKKFKVLGNTDRHSIKKNLIGALLFDSGETAEATRLKRTARRRYTRRKNRICYLQEIFSNEMAKVDDSFFHRLEESFLVEEDKKHERHPIFGNIVDEVAYHEKYPTIYHLRKKLVDSTDKADLRLIYLALAHMIKFRGHFLIEGDLNPDNSDVDKLFIQLVQTYNQLFEENPINASGVDAKAILSARLSKSRRLENLIAQLPGEKKNGLFGNLIALSLGLTPNFKSNFDLAEDAKLQLSKDTYDDDLDNLLAQIGDQYADLFLAAKNLSDAILLSDILRVNTEITKAPLSASMIKRYDEHHQDLTLLKALVRQQLPEKYKEIFFDQSKNGYAGYIDGGASQEEFYKFIKPILEKMDGTEELLVKLNREDLLRKQRTFDNGSIPHQIHLGELHAILRRQEDFYPFLKDNREKIEKILTFRIPYYVGPLARGNSRFAWMTRKSEETITPWNFEEVVDKGASAQSFIERMTNFDKNLPNEKVLPKHSLLYEYFTVYNELTKVKYVTEGMRKPAFLSGEQKKAIVDLLFKTNRKVTVKQLKEDYFKKIECFDSVEISGVEDRFNASLGTYHDLLKIIKDKDFLDNEENEDILEDIVLTLTLFEDREMIEERLKTYAHLFDDKVMKQLKRRRYTGWGRLSRKLINGIRDKQSGKTILDFLKSDGFANRNFMQLIHDDSLTFKEDIQKAQVSGQGDSLHEHIANLAGSPAIKKGILQTVKVVDELVKVMGRHKPENIVIEMARENQTTQKGQKNSRERMKRIEEGIKELGSQILKEHPVENTQLQNEKLYLYYLQNGRDMYVDQELDINRLSDYDVDHIVPQSFLKDDSIDNKVLTRSDKARGKSDNVPSEEVVKKMKNYWRQLLNAKLITQRKFDNLTKAERGGLSELDKAGFIKRQLVETRQITKHVAQILDSRMNTKYDENDKLIREVKVITLKSKLVSDFRKDFQFYKVREINNYHHAHDAYLNAVVGTALIKKYPKLESEFVYGDYKVYDVRKMIAKSEQEIGKATAKYFFYSNIMNFFKTEITLANGEIRKRPLIETNGETGEIVWDKGRDFATVRKVLSMPQVNIVKKTEVQTGGFSKESILPKRNSDKLIARKKDWDPKKYGGFDSPTVAYSVLVVAKVEKGKSKKLKSVKELLGITIMERSSFEKNPIDFLEAKGYKEVKKDLIIKLPKYSLFELENGRKRMLASAGELQKGNELALPSKYVNFLYLASHYEKLKGSPEDNEQKQLFVEQHKHYLDEIIEQISEFSKRVILADANLDKVLSAYNKHRDKPIREQAENIIHLFTLTNLGAPAAFKYFDTTIDRKRYTSTKEVLDATLIHQSITGLYETRIDLSQLGGDGGEAAAKGGSGGGGGLDDEYRLYSPLVKPDQNIQFWLEQFPQAWAETAGMGLAKQVPPQVIQLKASATPVSVRQYPLSKEAQEGIRPHVQRLIQQGILVPVQSPWNTPLLPVRKPGTNDYRPVQDLREVNKRVQDIHPTVPNPYNLLCALPPQRSWYTVLDLKDAFFCLRLHPTSQPLFAFEWRDPGTGRTGQLTWTRLPQGFKNSPTIFNEALHRDLANFRIQHPQVTLLQYVDDLLLAGATKQDCLEGTKALLLELSDLGYRASAKKAQICRREVTYLGYSLRDGQRWLTEARKKTVVQIPAPTTAKQVREFLGKAGFCRLFIPGFATLAAPLYPLTKPKGEFSWAPEHQKAFDAIKKALLSAPALALPDVTKPFTLYVDERKGVARGVLTQTLGPWRRPVAYLSKKLDPVASGWPVCLKAIAAVAILVKDADKLTLGQNITVIAPHALENIVRQPPDRWMTNARMTHYQSLLLTERVTFAPPAALNPATLLPEETDEPVTHDCHQLLIEETGVRKDLTDIPLTGEVLTWFTDGSSYVVEGKRMAGAAVVDGTRTIWASSLPEGTSAQKAELMALTQALRLAEGKSINIYTDSRYAFATAHVHGAIYKQRGWLTSAGREIKNKEEILSLLEALHLPKRLAIIHCPGHQKAKDPISRGNQMADRVAKQAAQGVNLLPAGKRTADGSEFEKRTADGSEFESPKKKAKVE

SEQ ID NO: 73 - protein, 2086 aa, synthetic construct
MPAAKRVKLDGGDKKYSIGLDIGTNSVGWAVITDEYKVPSKKFKVLGNTDRHSIKKNLIGALLFDSGETAEATRLKRTARRRYTRRKNRICYLQEIFSNEMAKVDDSFFHRLEESFLVEEDKKHERHPIFGNIVDEVAYHEKYPTIYHLRKKLVDSTDKADLRLIYLALAHMIKFRGHFLIEGDLNPDNSDVDKLFIQLVQTYNQLFEENPINASGVDAKAILSARLSKSRRLENLIAQLPGEKKNGLFGNLIALSLGLTPNFKSNFDLAEDAKLQLSKDTYDDDLDNLLAQIGDQYADLFLAAKNLSDAILLSDILRVNTEITKAPLSASMIKRYDEHHQDLTLLKALVRQQLPEKYKEIFFDQSKNGYAGYIDGGASQEEFYKFIKPILEKMDGTEELLVKLNREDLLRKQRTFDNGSIPHQIHLGELHAILRRQEDFYPFLKDNREKIEKILTFRIPYYVGPLARGNSRFAWMTRKSEETITPWNFEEVVDKGASAQSFIERMTNFDKNLPNEKVLPKHSLLYEYFTVYNELTKVKYVTEGMRKPAFLSGEQKKAIVDLLFKTNRKVTVKQLKEDYFKKIECFDSVEISGVEDRFNASLGTYHDLLKIIKDKDFLDNEENEDILEDIVLTLTLFEDREMIEERLKTYAHLFDDKVMKQLKRRRYTGWGRLSRKLINGIRDKQSGKTILDFLKSDGFANRNFMQLIHDDSLTFKEDIQKAQVSGQGDSLHEHIANLAGSPAIKKGILQTVKVVDELVKVMGRHKPENIVIEMARENQTTQKGQKNSRERMKRIEEGIKELGSQILKEHPVENTQLQNEKLYLYYLQNGRDMYVDQELDINRLSDYDVDHIVPQSFLKDDSIDNKVLTRSDKARGKSDNVPSEEVVKKMKNYWRQLLNAKLITQRKFDNLTKAERGGLSELDKAGFIKRQLVETRQITKHVAQILDSRMNTKYDENDKLIREVKVITLKSKLVSDFRKDFQFYKVREINNYHHAHDAYLNAVVGTALIKKYPKLESEFVYGDYKVYDVRKMIAKSEQEIGKATAKYFFYSNIMNFFKTEITLANGEIRKRPLIETNGETGEIVWDKGRDFATVRKVLSMPQVNIVKKTEVQTGGFSKESILPKRNSDKLIARKKDWDPKKYGGFDSPTVAYSVLVVAKVEKGKSKKLKSVKELLGITIMERSSFEKNPIDFLEAKGYKEVKKDLIIKLPKYSLFELENGRKRMLASAGELQKGNELALPSKYVNFLYLASHYEKLKGSPEDNEQKQLFVEQHKHYLDEIIEQISEFSKRVILADANLDKVLSAYNKHRDKPIREQAENIIHLFTLTNLGAPAAFKYFDTTIDRKRYTSTKEVLDATLIHQSITGLYETRIDLSQLGGDGGGSSPAPGGGGGLDDEYRLYSPLVKPDQNIQFWLEQFPQAWAETAGMGLAKQVPPQVIQLKASATPVSVRQYPLSKEAQEGIRPHVQRLIQQGILVPVQSPWNTPLLPVRKPGTNDYRPVQDLREVNKRVQDIHPTVPNPYNLLCALPPQRSWYTVLDLKDAFFCLRLHPTSQPLFAFEWRDPGTGRTGQLTWTRLPQGFKNSPTIFNEALHRDLANFRIQHPQVTLLQYVDDLLLAGATKQDCLEGTKALLLELSDLGYRASAKKAQICRREVTYLGYSLRDGQRWLTEARKKTVVQIPAPTTAKQVREFLGKAGFCRLFIPGFATLAAPLYPLTKPKGEFSWAPEHQKAFDAIKKALLSAPALALPDVTKPFTLYVDERKGVARGVLTQTLGPWRRPVAYLSKKLDPVASGWPVCLKAIAAVAILVKDADKLTLGQNITVIAPHALENIVRQPPDRWMTNARMTHYQSLLLTERVTFAPPAALNPATLLPEETDEPVTHDCHQLLIEETGVRKDLTDIPLTGEVLTWFTDGSSYVVEGKRMAGAAVVDGTRTIWASSLPEGTSAQKAELMALTQALRLAEGKSINIYTDSRYAFATAHVHGAIYKQRGWLTSAGREIKNKEEILSLLEALHLPKRLAIIHCPGHQKAKDPISRGNQMADRVAKQAAQGVNLLPAGKRTADGSEFEKRTADGSEFESPKKKAKVE

SEQ ID NO: 74 - protein, 2089 aa, synthetic construct
MPAAKRVKLDGGDKKYSIGLDIGTNSVGWAVITDEYKVPSKKFKVLGNTDRHSIKKNLIGALLFDSGETAEATRLKRTARRRYTRRKNRICYLQEIFSNEMAKVDDSFFHRLEESFLVEEDKKHERHPIFGNIVDEVAYHEKYPTIYHLRKKLVDSTDKADLRLIYLALAHMIKFRGHFLIEGDLNPDNSDVDKLFIQLVQTYNQLFEENPINASGVDAKAILSARLSKSRRLENLIAQLPGEKKNGLFGNLIALSLGLTPNFKSNFDLAEDAKLQLSKDTYDDDLDNLLAQIGDQYADLFLAAKNLSDAILLSDILRVNTEITKAPLSASMIKRYDEHHQDLTLLKALVRQQLPEKYKEIFFDQSKNGYAGYIDGGASQEEFYKFIKPILEKMDGTEELLVKLNREDLLRKQRTFDNGSIPHQIHLGELHAILRRQEDFYPFLKDNREKIEKILTFRIPYYVGPLARGNSRFAWMTRKSEETITPWNFEEVVDKGASAQSFIERMTNFDKNLPNEKVLPKHSLLYEYFTVYNELTKVKYVTEGMRKPAFLSGEQKKAIVDLLFKTNRKVTVKQLKEDYFKKIECFDSVEISGVEDRFNASLGTYHDLLKIIKDKDFLDNEENEDILEDIVLTLTLFEDREMIEERLKTYAHLFDDKVMKQLKRRRYTGWGRLSRKLINGIRDKQSGKTILDFLKSDGFANRNFMQLIHDDSLTFKEDIQKAQVSGQGDSLHEHIANLAGSPAIKKGILQTVKVVDELVKVMGRHKPENIVIEMARENQTTQKGQKNSRERMKRIEEGIKELGSQILKEHPVENTQLQNEKLYLYYLQNGRDMYVDQELDINRLSDYDVDHIVPQSFLKDDSIDNKVLTRSDKARGKSDNVPSEEVVKKMKNYWRQLLNAKLITQRKFDNLTKAERGGLSELDKAGFIKRQLVETRQITKHVAQILDSRMNTKYDENDKLIREVKVITLKSKLVSDFRKDFQFYKVREINNYHHAHDAYLNAVVGTALIKKYPKLESEFVYGDYKVYDVRKMIAKSEQEIGKATAKYFFYSNIMNFFKTEITLANGEIRKRPLIETNGETGEIVWDKGRDFATVRKVLSMPQVNIVKKTEVQTGGFSKESILPKRNSDKLIARKKDWDPKKYGGFDSPTVAYSVLVVAKVEKGKSKKLKSVKELLGITIMERSSFEKNPIDFLEAKGYKEVKKDLIIKLPKYSLFELENGRKRMLASAGELQKGNELALPSKYVNFLYLASHYEKLKGSPEDNEQKQLFVEQHKHYLDEIIEQISEFSKRVILADANLDKVLSAYNKHRDKPIREQAENIIHLFTLTNLGAPAAFKYFDTTIDRKRYTSTKEVLDATLIHQSITGLYETRIDLSQLGGDGGGSAGSAAGSGEFGGLDDEYRLYSPLVKPDQNIQFWLEQFPQAWAETAGMGLAKQVPPQVIQLKASATPVSVRQYPLSKEAQEGIRPHVQRLIQQGILVPVQSPWNTPLLPVRKPGTNDYRPVQDLREVNKRVQDIHPTVPNPYNLLCALPPQRSWYTVLDLKDAFFCLRLHPTSQPLFAFEWRDPGTGRTGQLTWTRLPQGFKNSPTIFNEALHRDLANFRIQHPQVTLLQYVDDLLLAGATKQDCLEGTKALLLELSDLGYRASAKKAQICRREVTYLGYSLRDGQRWLTEARKKTVVQIPAPTTAKQVREFLGKAGFCRLFIPGFATLAAPLYPLTKPKGEFSWAPEHQKAFDAIKKALLSAPALALPDVTKPFTLYVDERKGVARGVLTQTLGPWRRPVAYLSKKLDPVASGWPVCLKAIAAVAILVKDADKLTLGQNITVIAPHALENIVRQPPDRWMTNARMTHYQSLLLTERVTFAPPAALNPATLLPEETDEPVTHDCHQLLIEETGVRKDLTDIPLTGEVLTWFTDGSSYVVEGKRMAGAAVVDGTRTIWASSLPEGTSAQKAELMALTQALRLAEGKSINIYTDSRYAFATAHVHGAIYKQRGWLTSAGREIKNKEEILSLLEALHLPKRLAIIHCPGHQKAKDPISRGNQMADRVAKQAAQGVNLLPAGKRTADGSEFEKRTADGSEFESPKKKAKVE

SEQ ID NO: 75 - protein, 2092 aa, synthetic construct
MPAAKRVKLDGGDKKYSIGLDIGTNSVGWAVITDEYKVPSKKFKVLGNTDRHSIKKNLIGALLFDSGETAEATRLKRTARRRYTRRKNRICYLQEIFSNEMAKVDDSFFHRLEESFLVEEDKKHERHPIFGNIVDEVAYHEKYPTIYHLRKKLVDSTDKADLRLIYLALAHMIKFRGHFLIEGDLNPDNSDVDKLFIQLVQTYNQLFEENPINASGVDAKAILSARLSKSRRLENLIAQLPGEKKNGLFGNLIALSLGLTPNFKSNFDLAEDAKLQLSKDTYDDDLDNLLAQIGDQYADLFLAAKNLSDAILLSDILRVNTEITKAPLSASMIKRYDEHHQDLTLLKALVRQQLPEKYKEIFFDQSKNGYAGYIDGGASQEEFYKFIKPILEKMDGTEELLVKLNREDLLRKQRTFDNGSIPHQIHLGELHAILRRQEDFYPFLKDNREKIEKILTFRIPYYVGPLARGNSRFAWMTRKSEETITPWNFEEVVDKGASAQSFIERMTNFDKNLPNEKVLPKHSLLYEYFTVYNELTKVKYVTEGMRKPAFLSGEQKKAIVDLLFKTNRKVTVKQLKEDYFKKIECFDSVEISGVEDRFNASLGTYHDLLKIIKDKDFLDNEENEDILEDIVLTLTLFEDREMIEERLKTYAHLFDDKVMKQLKRRRYTGWGRLSRKLINGIRDKQSGKTILDFLKSDGFANRNFMQLIHDDSLTFKEDIQKAQVSGQGDSLHEHIANLAGSPAIKKGILQTVKVVDELVKVMGRHKPENIVIEMARENQTTQKGQKNSRERMKRIEEGIKELGSQILKEHPVENTQLQNEKLYLYYLQNGRDMYVDQELDINRLSDYDVDHIVPQSFLKDDSIDNKVLTRSDKARGKSDNVPSEEVVKKMKNYWRQLLNAKLITQRKFDNLTKAERGGLSELDKAGFIKRQLVETRQITKHVAQILDSRMNTKYDENDKLIREVKVITLKSKLVSDFRKDFQFYKVREINNYHHAHDAYLNAVVGTALIKKYPKLESEFVYGDYKVYDVRKMIAKSEQEIGKATAKYFFYSNIMNFFKTEITLANGEIRKRPLIETNGETGEIVWDKGRDFATVRKVLSMPQVNIVKKTEVQTGGFSKESILPKRNSDKLIARKKDWDPKKYGGFDSPTVAYSVLVVAKVEKGKSKKLKSVKELLGITIMERSSFEKNPIDFLEAKGYKEVKKDLIIKLPKYSLFELENGRKRMLASAGELQKGNELALPSKYVNFLYLASHYEKLKGSPEDNEQKQLFVEQHKHYLDEIIEQISEFSKRVILADANLDKVLSAYNKHRDKPIREQAENIIHLFTLTNLGAPAAFKYFDTTIDRKRYTSTKEVLDATLIHQSITGLYETRIDLSQLGGDGGGGGGSEAAAKGGGGSGGLDDEYRLYSPLVKPDQNIQFWLEQFPQAWAETAGMGLAKQVPPQVIQLKASATPVSVRQYPLSKEAQEGIRPHVQRLIQQGILVPVQSPWNTPLLPVRKPGTNDYRPVQDLREVNKRVQDIHPTVPNPYNLLCALPPQRSWYTVLDLKDAFFCLRLHPTSQPLFAFEWRDPGTGRTGQLTWTRLPQGFKNSPTIFNEALHRDLANFRIQHPQVTLLQYVDDLLLAGATKQDCLEGTKALLLELSDLGYRASAKKAQICRREVTYLGYSLRDGQRWLTEARKKTVVQIPAPTTAKQVREFLGKAGFCRLFIPGFATLAAPLYPLTKPKGEFSWAPEHQKAFDAIKKALLSAPALALPDVTKPFTLYVDERKGVARGVLTQTLGPWRRPVAYLSKKLDPVASGWPVCLKAIAAVAILVKDADKLTLGQNITVIAPHALENIVRQPPDRWMTNARMTHYQSLLLTERVTFAPPAALNPATLLPEETDEPVTHDCHQLLIEETGVRKDLTDIPLTGEVLTWFTDGSSYVVEGKRMAGAAVVDGTRTIWASSLPEGTSAQKAELMALTQALRLAEGKSINIYTDSRYAFATAHVHGAIYKQRGWLTSAGREIKNKEEILSLLEALHLPKRLAIIHCPGHQKAKDPISRGNQMADRVAKQAAQGVNLLPAGKRTADGSEFEKRTADGSEFESPKKKAKVE

SEQ ID NO: 76 - protein, 2083 aa, synthetic construct
MPAAKRVKLDGGDKKYSIGLDIGTNSVGWAVITDEYKVPSKKFKVLGNTDRHSIKKNLIGALLFDSGETAEATRLKRTARRRYTRRKNRICYLQEIFSNEMAKVDDSFFHRLEESFLVEEDKKHERHPIFGNIVDEVAYHEKYPTIYHLRKKLVDSTDKADLRLIYLALAHMIKFRGHFLIEGDLNPDNSDVDKLFIQLVQTYNQLFEENPINASGVDAKAILSARLSKSRRLENLIAQLPGEKKNGLFGNLIALSLGLTPNFKSNFDLAEDAKLQLSKDTYDDDLDNLLAQIGDQYADLFLAAKNLSDAILLSDILRVNTEITKAPLSASMIKRYDEHHQDLTLLKALVRQQLPEKYKEIFFDQSKNGYAGYIDGGASQEEFYKFIKPILEKMDGTEELLVKLNREDLLRKQRTFDNGSIPHQIHLGELHAILRRQEDFYPFLKDNREKIEKILTFRIPYYVGPLARGNSRFAWMTRKSEETITPWNFEEVVDKGASAQSFIERMTNFDKNLPNEKVLPKHSLLYEYFTVYNELTKVKYVTEGMRKPAFLSGEQKKAIVDLLFKTNRKVTVKQLKEDYFKKIECFDSVEISGVEDRFNASLGTYHDLLKIIKDKDFLDNEENEDILEDIVLTLTLFEDREMIEERLKTYAHLFDDKVMKQLKRRRYTGWGRLSRKLINGIRDKQSGKTILDFLKSDGFANRNFMQLIHDDSLTFKEDIQKAQVSGQGDSLHEHIANLAGSPAIKKGILQTVKVVDELVKVMGRHKPENIVIEMARENQTTQKGQKNSRERMKRIEEGIKELGSQILKEHPVENTQLQNEKLYLYYLQNGRDMYVDQELDINRLSDYDVDHIVPQSFLKDDSIDNKVLTRSDKARGKSDNVPSEEVVKKMKNYWRQLLNAKLITQRKFDNLTKAERGGLSELDKAGFIKRQLVETRQITKHVAQILDSRMNTKYDENDKLIREVKVITLKSKLVSDFRKDFQFYKVREINNYHHAHDAYLNAVVGTALIKKYPKLESEFVYGDYKVYDVRKMIAKSEQEIGKATAKYFFYSNIMNFFKTEITLANGEIRKRPLIETNGETGEIVWDKGRDFATVRKVLSMPQVNIVKKTEVQTGGFSKESILPKRNSDKLIARKKDWDPKKYGGFDSPTVAYSVLVVAKVEKGKSKKLKSVKELLGITIMERSSFEKNPIDFLEAKGYKEVKKDLIIKLPKYSLFELENGRKRMLASAGELQKGNELALPSKYVNFLYLASHYEKLKGSPEDNEQKQLFVEQHKHYLDEIIEQISEFSKRVILADANLDKVLSAYNKHRDKPIREQAENIIHLFTLTNLGAPAAFKYFDTTIDRKRYTSTKEVLDATLIHQSITGLYETRIDLSQLGGDGGGGGPAPGGLDDEYRLYSPLVKPDQNIQFWLEQFPQAWAETAGMGLAKQVPPQVIQLKASATPVSVRQYPLSKEAQEGIRPHVQRLIQQGILVPVQSPWNTPLLPVRKPGTNDYRPVQDLREVNKRVQDIHPTVPNPYNLLCALPPQRSWYTVLDLKDAFFCLRLHPTSQPLFAFEWRDPGTGRTGQLTWTRLPQGFKNSPTIFNEALHRDLANFRIQHPQVTLLQYVDDLLLAGATKQDCLEGTKALLLELSDLGYRASAKKAQICRREVTYLGYSLRDGQRWLTEARKKTVVQIPAPTTAKQVREFLGKAGFCRLFIPGFATLAAPLYPLTKPKGEFSWAPEHQKAFDAIKKALLSAPALALPDVTKPFTLYVDERKGVARGVLTQTLGPWRRPVAYLSKKLDPVASGWPVCLKAIAAVAILVKDADKLTLGQNITVIAPHALENIVRQPPDRWMTNARMTHYQSLLLTERVTFAPPAALNPATLLPEETDEPVTHDCHQLLIEETGVRKDLTDIPLTGEVLTWFTDGSSYVVEGKRMAGAAVVDGTRTIWASSLPEGTSAQKAELMALTQALRLAEGKSINIYTDSRYAFATAHVHGAIYKQRGWLTSAGREIKNKEEILSLLEALHLPKRLAIIHCPGHQKAKDPISRGNQMADRVAKQAAQGVNLLPAGKRTADGSEFEKRTADGSEFESPKKKAKVE

SEQ ID NO: 77 - protein, 2084 aa, synthetic construct
MPAAKRVKLDGGDKKYSIGLDIGTNSVGWAVITDEYKVPSKKFKVLGNTDRHSIKKNLIGALLFDSGETAEATRLKRTARRRYTRRKNRICYLQEIFSNEMAKVDDSFFHRLEESFLVEEDKKHERHPIFGNIVDEVAYHEKYPTIYHLRKKLVDSTDKADLRLIYLALAHMIKFRGHFLIEGDLNPDNSDVDKLFIQLVQTYNQLFEENPINASGVDAKAILSARLSKSRRLENLIAQLPGEKKNGLFGNLIALSLGLTPNFKSNFDLAEDAKLQLSKDTYDDDLDNLLAQIGDQYADLFLAAKNLSDAILLSDILRVNTEITKAPLSASMIKRYDEHHQDLTLLKALVRQQLPEKYKEIFFDQSKNGYAGYIDGGASQEEFYKFIKPILEKMDGTEELLVKLNREDLLRKQRTFDNGSIPHQIHLGELHAILRRQEDFYPFLKDNREKIEKILTFRIPYYVGPLARGNSRFAWMTRKSEETITPWNFEEVVDKGASAQSFIERMTNFDKNLPNEKVLPKHSLLYEYFTVYNELTKVKYVTEGMRKPAFLSGEQKKAIVDLLFKTNRKVTVKQLKEDYFKKIECFDSVEISGVEDRFNASLGTYHDLLKIIKDKDFLDNEENEDILEDIVLTLTLFEDREMIEERLKTYAHLFDDKVMKQLKRRRYTGWGRLSRKLINGIRDKQSGKTILDFLKSDGFANRNFMQLIHDDSLTFKEDIQKAQVSGQGDSLHEHIANLAGSPAIKKGILQTVKVVDELVKVMGRHKPENIVIEMARENQTTQKGQKNSRERMKRIEEGIKELGSQILKEHPVENTQLQNEKLYLYYLQNGRDMYVDQELDINRLSDYDVDHIVPQSFLKDDSIDNKVLTRSDKARGKSDNVPSEEVVKKMKNYWRQLLNAKLITQRKFDNLTKAERGGLSELDKAGFIKRQLVETRQITKHVAQILDSRMNTKYDENDKLIREVKVITLKSKLVSDFRKDFQFYKVREINNYHHAHDAYLNAVVGTALIKKYPKLESEFVYGDYKVYDVRKMIAKSEQEIGKATAKYFFYSNIMNFFKTEITLANGEIRKRPLIETNGETGEIVWDKGRDFATVRKVLSMPQVNIVKKTEVQTGGFSKESILPKRNSDKLIARKKDWDPKKYGGFDSPTVAYSVLVVAKVEKGKSKKLKSVKELLGITIMERSSFEKNPIDFLEAKGYKEVKKDLIIKLPKYSLFELENGRKRMLASAGELQKGNELALPSKYVNFLYLASHYEKLKGSPEDNEQKQLFVEQHKHYLDEIIEQISEFSKRVILADANLDKVLSAYNKHRDKPIREQAENIIHLFTLTNLGAPAAFKYFDTTIDRKRYTSTKEVLDATLIHQSITGLYETRIDLSQLGGDGGGGGGGGGGGLDDEYRLYSPLVKPDQNIQFWLEQFPQAWAETAGMGLAKQVPPQVIQLKASATPVSVRQYPLSKEAQEGIRPHVQRLIQQGILVPVQSPWNTPLLPVRKPGTNDYRPVQDLREVNKRVQDIHPTVPNPYNLLCALPPQRSWYTVLDLKDAFFCLRLHPTSQPLFAFEWRDPGTGRTGQLTWTRLPQGFKNSPTIFNEALHRDLANFRIQHPQVTLLQYVDDLLLAGATKQDCLEGTKALLLELSDLGYRASAKKAQICRREVTYLGYSLRDGQRWLTEARKKTVVQIPAPTTAKQVREFLGKAGFCRLFIPGFATLAAPLYPLTKPKGEFSWAPEHQKAFDAIKKALLSAPALALPDVTKPFTLYVDERKGVARGVLTQTLGPWRRPVAYLSKKLDPVASGWPVCLKAIAAVAILVKDADKLTLGQNITVIAPHALENIVRQPPDRWMTNARMTHYQSLLLTERVTFAPPAALNPATLLPEETDEPVTHDCHQLLIEETGVRKDLTDIPLTGEVLTWFTDGSSYVVEGKRMAGAAVVDGTRTIWASSLPEGTSAQKAELMALTQALRLAEGKSINIYTDSRYAFATAHVHGAIYKQRGWLTSAGREIKNKEEILSLLEALHLPKRLAIIHCPGHQKAKDPISRGNQMADRVAKQAAQGVNLLPAGKRTADGSEFEKRTADGSEFESPKKKAKVE

SEQ ID NO: 78 - protein, 2083 aa, synthetic construct
MPAAKRVKLDGGDKKYSIGLDIGTNSVGWAVITDEYKVPSKKFKVLGNTDRHSIKKNLIGALLFDSGETAEATRLKRTARRRYTRRKNRICYLQEIFSNEMAKVDDSFFHRLEESFLVEEDKKHERHPIFGNIVDEVAYHEKYPTIYHLRKKLVDSTDKADLRLIYLALAHMIKFRGHFLIEGDLNPDNSDVDKLFIQLVQTYNQLFEENPINASGVDAKAILSARLSKSRRLENLIAQLPGEKKNGLFGNLIALSLGLTPNFKSNFDLAEDAKLQLSKDTYDDDLDNLLAQIGDQYADLFLAAKNLSDAILLSDILRVNTEITKAPLSASMIKRYDEHHQDLTLLKALVRQQLPEKYKEIFFDQSKNGYAGYIDGGASQEEFYKFIKPILEKMDGTEELLVKLNREDLLRKQRTFDNGSIPHQIHLGELHAILRRQEDFYPFLKDNREKIEKILTFRIPYYVGPLARGNSRFAWMTRKSEETITPWNFEEVVDKGASAQSFIERMTNFDKNLPNEKVLPKHSLLYEYFTVYNELTKVKYVTEGMRKPAFLSGEQKKAIVDLLFKTNRKVTVKQLKEDYFKKIECFDSVEISGVEDRFNASLGTYHDLLKIIKDKDFLDNEENEDILEDIVLTLTLFEDREMIEERLKTYAHLFDDKVMKQLKRRRYTGWGRLSRKLINGIRDKQSGKTILDFLKSDGFANRNFMQLIHDDSLTFKEDIQKAQVSGQGDSLHEHIANLAGSPAIKKGILQTVKVVDELVKVMGRHKPENIVIEMARENQTTQKGQKNSRERMKRIEEGIKELGSQILKEHPVENTQLQNEKLYLYYLQNGRDMYVDQELDINRLSDYDVDHIVPQSFLKDDSIDNKVLTRSDKARGKSDNVPSEEVVKKMKNYWRQLLNAKLITQRKFDNLTKAERGGLSELDKAGFIKRQLVETRQITKHVAQILDSRMNTKYDENDKLIREVKVITLKSKLVSDFRKDFQFYKVREINNYHHAHDAYLNAVVGTALIKKYPKLESEFVYGDYKVYDVRKMIAKSEQEIGKATAKYFFYSNIMNFFKTEITLANGEIRKRPLIETNGETGEIVWDKGRDFATVRKVLSMPQVNIVKKTEVQTGGFSKESILPKRNSDKLIARKKDWDPKKYGGFDSPTVAYSVLVVAKVEKGKSKKLKSVKELLGITIMERSSFEKNPIDFLEAKGYKEVKKDLIIKLPKYSLFELENGRKRMLASAGELQKGNELALPSKYVNFLYLASHYEKLKGSPEDNEQKQLFVEQHKHYLDEIIEQISEFSKRVILADANLDKVLSAYNKHRDKPIREQAENIIHLFTLTNLGAPAAFKYFDTTIDRKRYTSTKEVLDATLIHQSITGLYETRIDLSQLGGDGGGGSPAPGGLDDEYRLYSPLVKPDQNIQFWLEQFPQAWAETAGMGLAKQVPPQVIQLKASATPVSVRQYPLSKEAQEGIRPHVQRLIQQGILVPVQSPWNTPLLPVRKPGTNDYRPVQDLREVNKRVQDIHPTVPNPYNLLCALPPQRSWYTVLDLKDAFFCLRLHPTSQPLFAFEWRDPGTGRTGQLTWTRLPQGFKNSPTIFNEALHRDLANFRIQHPQVTLLQYVDDLLLAGATKQDCLEGTKALLLELSDLGYRASAKKAQICRREVTYLGYSLRDGQRWLTEARKKTVVQIPAPTTAKQVREFLGKAGFCRLFIPGFATLAAPLYPLTKPKGEFSWAPEHQKAFDAIKKALLSAPALALPDVTKPFTLYVDERKGVARGVLTQTLGPWRRPVAYLSKKLDPVASGWPVCLKAIAAVAILVKDADKLTLGQNITVIAPHALENIVRQPPDRWMTNARMTHYQSLLLTERVTFAPPAALNPATLLPEETDEPVTHDCHQLLIEETGVRKDLTDIPLTGEVLTWFTDGSSYVVEGKRMAGAAVVDGTRTIWASSLPEGTSAQKAELMALTQALRLAEGKSINIYTDSRYAFATAHVHGAIYKQRGWLTSAGREIKNKEEILSLLEALHLPKRLAIIHCPGHQKAKDPISRGNQMADRVAKQAAQGVNLLPAGKRTADGSEFEKRTADGSEFESPKKKAKVE

SEQ ID NO: 79 - protein, 2083 aa, synthetic construct
MPAAKRVKLDGGDKKYSIGLDIGTNSVGWAVITDEYKVPSKKFKVLGNTDRHSIKKNLIGALLFDSGETAEATRLKRTARRRYTRRKNRICYLQEIFSNEMAKVDDSFFHRLEESFLVEEDKKHERHPIFGNIVDEVAYHEKYPTIYHLRKKLVDSTDKADLRLIYLALAHMIKFRGHFLIEGDLNPDNSDVDKLFIQLVQTYNQLFEENPINASGVDAKAILSARLSKSRRLENLIAQLPGEKKNGLFGNLIALSLGLTPNFKSNFDLAEDAKLQLSKDTYDDDLDNLLAQIGDQYADLFLAAKNLSDAILLSDILRVNTEITKAPLSASMIKRYDEHHQDLTLLKALVRQQLPEKYKEIFFDQSKNGYAGYIDGGASQEEFYKFIKPILEKMDGTEELLVKLNREDLLRKQRTFDNGSIPHQIHLGELHAILRRQEDFYPFLKDNREKIEKILTFRIPYYVGPLARGNSRFAWMTRKSEETITPWNFEEVVDKGASAQSFIERMTNFDKNLPNEKVLPKHSLLYEYFTVYNELTKVKYVTEGMRKPAFLSGEQKKAIVDLLFKTNRKVTVKQLKEDYFKKIECFDSVEISGVEDRFNASLGTYHDLLKIIKDKDFLDNEENEDILEDIVLTLTLFEDREMIEERLKTYAHLFDDKVMKQLKRRRYTGWGRLSRKLINGIRDKQSGKTILDFLKSDGFANRNFMQLIHDDSLTFKEDIQKAQVSGQGDSLHEHIANLAGSPAIKKGILQTVKVVDELVKVMGRHKPENIVIEMARENQTTQKGQKNSRERMKRIEEGIKELGSQILKEHPVENTQLQNEKLYLYYLQNGRDMYVDQELDINRLSDYDVDHIVPQSFLKDDSIDNKVLTRSDKARGKSDNVPSEEVVKKMKNYWRQLLNAKLITQRKFDNLTKAERGGLSELDKAGFIKRQLVETRQITKHVAQILDSRMNTKYDENDKLIREVKVITLKSKLVSDFRKDFQFYKVREINNYHHAHDAYLNAVVGTALIKKYPKLESEFVYGDYKVYDVRKMIAKSEQEIGKATAKYFFYSNIMNFFKTEITLANGEIRKRPLIETNGETGEIVWDKGRDFATVRKVLSMPQVNIVKKTEVQTGGFSKESILPKRNSDKLIARKKDWDPKKYGGFDSPTVAYSVLVVAKVEKGKSKKLKSVKELLGITIMERSSFEKNPIDFLEAKGYKEVKKDLIIKLPKYSLFELENGRKRMLASAGELQKGNELALPSKYVNFLYLASHYEKLKGSPEDNEQKQLFVEQHKHYLDEIIEQISEFSKRVILADANLDKVLSAYNKHRDKPIREQAENIIHLFTLTNLGAPAAFKYFDTTIDRKRYTSTKEVLDATLIHQSITGLYETRIDLSQLGGDGGPAPGGGGGLDDEYRLYSPLVKPDQNIQFWLEQFPQAWAETAGMGLAKQVPPQVIQLKASATPVSVRQYPLSKEAQEGIRPHVQRLIQQGILVPVQSPWNTPLLPVRKPGTNDYRPVQDLREVNKRVQDIHPTVPNPYNLLCALPPQRSWYTVLDLKDAFFCLRLHPTSQPLFAFEWRDPGTGRTGQLTWTRLPQGFKNSPTIFNEALHRDLANFRIQHPQVTLLQYVDDLLLAGATKQDCLEGTKALLLELSDLGYRASAKKAQICRREVTYLGYSLRDGQRWLTEARKKTVVQIPAPTTAKQVREFLGKAGFCRLFIPGFATLAAPLYPLTKPKGEFSWAPEHQKAFDAIKKALLSAPALALPDVTKPFTLYVDERKGVARGVLTQTLGPWRRPVAYLSKKLDPVASGWPVCLKAIAAVAILVKDADKLTLGQNITVIAPHALENIVRQPPDRWMTNARMTHYQSLLLTERVTFAPPAALNPATLLPEETDEPVTHDCHQLLIEETGVRKDLTDIPLTGEVLTWFTDGSSYVVEGKRMAGAAVVDGTRTIWASSLPEGTSAQKAELMALTQALRLAEGKSINIYTDSRYAFATAHVHGAIYKQRGWLTSAGREIKNKEEILSLLEALHLPKRLAIIHCPGHQKAKDPISRGNQMADRVAKQAAQGVNLLPAGKRTADGSEFEKRTADGSEFESPKKKAKVE

SEQ ID NO: 80 - protein, 2088 aa, synthetic construct
MPAAKRVKLDGGDKKYSIGLDIGTNSVGWAVITDEYKVPSKKFKVLGNTDRHSIKKNLIGALLFDSGETAEATRLKRTARRRYTRRKNRICYLQEIFSNEMAKVDDSFFHRLEESFLVEEDKKHERHPIFGNIVDEVAYHEKYPTIYHLRKKLVDSTDKADLRLIYLALAHMIKFRGHFLIEGDLNPDNSDVDKLFIQLVQTYNQLFEENPINASGVDAKAILSARLSKSRRLENLIAQLPGEKKNGLFGNLIALSLGLTPNFKSNFDLAEDAKLQLSKDTYDDDLDNLLAQIGDQYADLFLAAKNLSDAILLSDILRVNTEITKAPLSASMIKRYDEHHQDLTLLKALVRQQLPEKYKEIFFDQSKNGYAGYIDGGASQEEFYKFIKPILEKMDGTEELLVKLNREDLLRKQRTFDNGSIPHQIHLGELHAILRRQEDFYPFLKDNREKIEKILTFRIPYYVGPLARGNSRFAWMTRKSEETITPWNFEEVVDKGASAQSFIERMTNFDKNLPNEKVLPKHSLLYEYFTVYNELTKVKYVTEGMRKPAFLSGEQKKAIVDLLFKTNRKVTVKQLKEDYFKKIECFDSVEISGVEDRFNASLGTYHDLLKIIKDKDFLDNEENEDILEDIVLTLTLFEDREMIEERLKTYAHLFDDKVMKQLKRRRYTGWGRLSRKLINGIRDKQSGKTILDFLKSDGFANRNFMQLIHDDSLTFKEDIQKAQVSGQGDSLHEHIANLAGSPAIKKGILQTVKVVDELVKVMGRHKPENIVIEMARENQTTQKGQKNSRERMKRIEEGIKELGSQILKEHPVENTQLQNEKLYLYYLQNGRDMYVDQELDINRLSDYDVDHIVPQSFLKDDSIDNKVLTRSDKARGKSDNVPSEEVVKKMKNYWRQLLNAKLITQRKFDNLTKAERGGLSELDKAGFIKRQLVETRQITKHVAQILDSRMNTKYDENDKLIREVKVITLKSKLVSDFRKDFQFYKVREINNYHHAHDAYLNAVVGTALIKKYPKLESEFVYGDYKVYDVRKMIAKSEQEIGKATAKYFFYSNIMNFFKTEITLANGEIRKRPLIETNGETGEIVWDKGRDFATVRKVLSMPQVNIVKKTEVQTGGFSKESILPKRNSDKLIARKKDWDPKKYGGFDSPTVAYSVLVVAKVEKGKSKKLKSVKELLGITIMERSSFEKNPIDFLEAKGYKEVKKDLIIKLPKYSLFELENGRKRMLASAGELQKGNELALPSKYVNFLYLASHYEKLKGSPEDNEQKQLFVEQHKHYLDEIIEQISEFSKRVILADANLDKVLSAYNKHRDKPIREQAENIIHLFTLTNLGAPAAFKYFDTTIDRKRYTSTKEVLDATLIHQSITGLYETRIDLSQLGGDGGGGSGSSEAAAKGGLDDEYRLYSPLVKPDQNIQFWLEQFPQAWAETAGMGLAKQVPPQVIQLKASATPVSVRQYPLSKEAQEGIRPHVQRLIQQGILVPVQSPWNTPLLPVRKPGTNDYRPVQDLREVNKRVQDIHPTVPNPYNLLCALPPQRSWYTVLDLKDAFFCLRLHPTSQPLFAFEWRDPGTGRTGQLTWTRLPQGFKNSPTIFNEALHRDLANFRIQHPQVTLLQYVDDLLLAGATKQDCLEGTKALLLELSDLGYRASAKKAQICRREVTYLGYSLRDGQRWLTEARKKTVVQIPAPTTAKQVREFLGKAGFCRLFIPGFATLAAPLYPLTKPKGEFSWAPEHQKAFDAIKKALLSAPALALPDVTKPFTLYVDERKGVARGVLTQTLGPWRRPVAYLSKKLDPVASGWPVCLKAIAAVAILVKDADKLTLGQNITVIAPHALENIVRQPPDRWMTNARMTHYQSLLLTERVTFAPPAALNPATLLPEETDEPVTHDCHQLLIEETGVRKDLTDIPLTGEVLTWFTDGSSYVVEGKRMAGAAVVDGTRTIWASSLPEGTSAQKAELMALTQALRLAEGKSINIYTDSRYAFATAHVHGAIYKQRGWLTSAGREIKNKEEILSLLEALHLPKRLAIIHCPGHQKAKDPISRGNQMADRVAKQAAQGVNLLPAGKRTADGSEFEKRTADGSEFESPKKKAKVE

SEQ ID NO: 81 - protein, 2083 aa, synthetic construct
MPAAKRVKLDGGDKKYSIGLDIGTNSVGWAVITDEYKVPSKKFKVLGNTDRHSIKKNLIGALLFDSGETAEATRLKRTARRRYTRRKNRICYLQEIFSNEMAKVDDSFFHRLEESFLVEEDKKHERHPIFGNIVDEVAYHEKYPTIYHLRKKLVDSTDKADLRLIYLALAHMIKFRGHFLIEGDLNPDNSDVDKLFIQLVQTYNQLFEENPINASGVDAKAILSARLSKSRRLENLIAQLPGEKKNGLFGNLIALSLGLTPNFKSNFDLAEDAKLQLSKDTYDDDLDNLLAQIGDQYADLFLAAKNLSDAILLSDILRVNTEITKAPLSASMIKRYDEHHQDLTLLKALVRQQLPEKYKEIFFDQSKNGYAGYIDGGASQEEFYKFIKPILEKMDGTEELLVKLNREDLLRKQRTFDNGSIPHQIHLGELHAILRRQEDFYPFLKDNREKIEKILTFRIPYYVGPLARGNSRFAWMTRKSEETITPWNFEEVVDKGASAQSFIERMTNFDKNLPNEKVLPKHSLLYEYFTVYNELTKVKYVTEGMRKPAFLSGEQKKAIVDLLFKTNRKVTVKQLKEDYFKKIECFDSVEISGVEDRFNASLGTYHDLLKIIKDKDFLDNEENEDILEDIVLTLTLFEDREMIEERLKTYAHLFDDKVMKQLKRRRYTGWGRLSRKLINGIRDKQSGKTILDFLKSDGFANRNFMQLIHDDSLTFKEDIQKAQVSGQGDSLHEHIANLAGSPAIKKGILQTVKVVDELVKVMGRHKPENIVIEMARENQTTQKGQKNSRERMKRIEEGIKELGSQILKEHPVENTQLQNEKLYLYYLQNGRDMYVDQELDINRLSDYDVDHIVPQSFLKDDSIDNKVLTRSDKARGKSDNVPSEEVVKKMKNYWRQLLNAKLITQRKFDNLTKAERGGLSELDKAGFIKRQLVETRQITKHVAQILDSRMNTKYDENDKLIREVKVITLKSKLVSDFRKDFQFYKVREINNYHHAHDAYLNAVVGTALIKKYPKLESEFVYGDYKVYDVRKMIAKSEQEIGKATAKYFFYSNIMNFFKTEITLANGEIRKRPLIETNGETGEIVWDKGRDFATVRKVLSMPQVNIVKKTEVQTGGFSKESILPKRNSDKLIARKKDWDPKKYGGFDSPTVAYSVLVVAKVEKGKSKKLKSVKELLGITIMERSSFEKNPIDFLEAKGYKEVKKDLIIKLPKYSLFELENGRKRMLASAGELQKGNELALPSKYVNFLYLASHYEKLKGSPEDNEQKQLFVEQHKHYLDEIIEQISEFSKRVILADANLDKVLSAYNKHRDKPIREQAENIIHLFTLTNLGAPAAFKYFDTTIDRKRYTSTKEVLDATLIHQSITGLYETRIDLSQLGGDGGGSSGGGGGLDDEYRLYSPLVKPDQNIQFWLEQFPQAWAETAGMGLAKQVPPQVIQLKASATPVSVRQYPLSKEAQEGIRPHVQRLIQQGILVPVQSPWNTPLLPVRKPGTNDYRPVQDLREVNKRVQDIHPTVPNPYNLLCALPPQRSWYTVLDLKDAFFCLRLHPTSQPLFAFEWRDPGTGRTGQLTWTRLPQGFKNSPTIFNEALHRDLANFRIQHPQVTLLQYVDDLLLAGATKQDCLEGTKALLLELSDLGYRASAKKAQICRREVTYLGYSLRDGQRWLTEARKKTVVQIPAPTTAKQVREFLGKAGFCRLFIPGFATLAAPLYPLTKPKGEFSWAPEHQKAFDAIKKALLSAPALALPDVTKPFTLYVDERKGVARGVLTQTLGPWRRPVAYLSKKLDPVASGWPVCLKAIAAVAILVKDADKLTLGQNITVIAPHALENIVRQPPDRWMTNARMTHYQSLLLTERVTFAPPAALNPATLLPEETDEPVTHDCHQLLIEETGVRKDLTDIPLTGEVLTWFTDGSSYVVEGKRMAGAAVVDGTRTIWASSLPEGTSAQKAELMALTQALRLAEGKSINIYTDSRYAFATAHVHGAIYKQRGWLTSAGREIKNKEEILSLLEALHLPKRLAIIHCPGHQKAKDPISRGNQMADRVAKQAAQGVNLLPAGKRTADGSEFEKRTADGSEFESPKKKAKVE

SEQ ID NO: 82 - protein, 2086 aa, synthetic construct
MPAAKRVKLDGGDKKYSIGLDIGTNSVGWAVITDEYKVPSKKFKVLGNTDRHSIKKNLIGALLFDSGETAEATRLKRTARRRYTRRKNRICYLQEIFSNEMAKVDDSFFHRLEESFLVEEDKKHERHPIFGNIVDEVAYHEKYPTIYHLRKKLVDSTDKADLRLIYLALAHMIKFRGHFLIEGDLNPDNSDVDKLFIQLVQTYNQLFEENPINASGVDAKAILSARLSKSRRLENLIAQLPGEKKNGLFGNLIALSLGLTPNFKSNFDLAEDAKLQLSKDTYDDDLDNLLAQIGDQYADLFLAAKNLSDAILLSDILRVNTEITKAPLSASMIKRYDEHHQDLTLLKALVRQQLPEKYKEIFFDQSKNGYAGYIDGGASQEEFYKFIKPILEKMDGTEELLVKLNREDLLRKQRTFDNGSIPHQIHLGELHAILRRQEDFYPFLKDNREKIEKILTFRIPYYVGPLARGNSRFAWMTRKSEETITPWNFEEVVDKGASAQSFIERMTNFDKNLPNEKVLPKHSLLYEYFTVYNELTKVKYVTEGMRKPAFLSGEQKKAIVDLLFKTNRKVTVKQLKEDYFKKIECFDSVEISGVEDRFNASLGTYHDLLKIIKDKDFLDNEENEDILEDIVLTLTLFEDREMIEERLKTYAHLFDDKVMKQLKRRRYTGWGRLSRKLINGIRDKQSGKTILDFLKSDGFANRNFMQLIHDDSLTFKEDIQKAQVSGQGDSLHEHIANLAGSPAIKKGILQTVKVVDELVKVMGRHKPENIVIEMARENQTTQKGQKNSRERMKRIEEGIKELGSQILKEHPVENTQLQNEKLYLYYLQNGRDMYVDQELDINRLSDYDVDHIVPQSFLKDDSIDNKVLTRSDKARGKSDNVPSEEVVKKMKNYWRQLLNAKLITQRKFDNLTKAERGGLSELDKAGFIKRQLVETRQITKHVAQILDSRMNTKYDENDKLIREVKVITLKSKLVSDFRKDFQFYKVREINNYHHAHDAYLNAVVGTALIKKYPKLESEFVYGDYKVYDVRKMIAKSEQEIGKATAKYFFYSNIMNFFKTEITLANGEIRKRPLIETNGETGEIVWDKGRDFATVRKVLSMPQVNIVKKTEVQTGGFSKESILPKRNSDKLIARKKDWDPKKYGGFDSPTVAYSVLVVAKVEKGKSKKLKSVKELLGITIMERSSFEKNPIDFLEAKGYKEVKKDLIIKLPKYSLFELENGRKRMLASAGELQKGNELALPSKYVNFLYLASHYEKLKGSPEDNEQKQLFVEQHKHYLDEIIEQISEFSKRVILADANLDKVLSAYNKHRDKPIREQAENIIHLFTLTNLGAPAAFKYFDTTIDRKRYTSTKEVLDATLIHQSITGLYETRIDLSQLGGDGGPAPGSSGGSGGLDDEYRLYSPLVKPDQNIQFWLEQFPQAWAETAGMGLAKQVPPQVIQLKASATPVSVRQYPLSKEAQEGIRPHVQRLIQQGILVPVQSPWNTPLLPVRKPGTNDYRPVQDLREVNKRVQDIHPTVPNPYNLLCALPPQRSWYTVLDLKDAFFCLRLHPTSQPLFAFEWRDPGTGRTGQLTWTRLPQGFKNSPTIFNEALHRDLANFRIQHPQVTLLQYVDDLLLAGATKQDCLEGTKALLLELSDLGYRASAKKAQICRREVTYLGYSLRDGQRWLTEARKKTVVQIPAPTTAKQVREFLGKAGFCRLFIPGFATLAAPLYPLTKPKGEFSWAPEHQKAFDAIKKALLSAPALALPDVTKPFTLYVDERKGVARGVLTQTLGPWRRPVAYLSKKLDPVASGWPVCLKAIAAVAILVKDADKLTLGQNITVIAPHALENIVRQPPDRWMTNARMTHYQSLLLTERVTFAPPAALNPATLLPEETDEPVTHDCHQLLIEETGVRKDLTDIPLTGEVLTWFTDGSSYVVEGKRMAGAAVVDGTRTIWASSLPEGTSAQKAELMALTQALRLAEGKSINIYTDSRYAFATAHVHGAIYKQRGWLTSAGREIKNKEEILSLLEALHLPKRLAIIHCPGHQKAKDPISRGNQMADRVAKQAAQGVNLLPAGKRTADGSEFEKRTADGSEFESPKKKAKVE

SEQ ID NO: 83 - protein, 2088 aa, synthetic construct
MPAAKRVKLDGGDKKYSIGLDIGTNSVGWAVITDEYKVPSKKFKVLGNTDRHSIKKNLIGALLFDSGETAEATRLKRTARRRYTRRKNRICYLQEIFSNEMAKVDDSFFHRLEESFLVEEDKKHERHPIFGNIVDEVAYHEKYPTIYHLRKKLVDSTDKADLRLIYLALAHMIKFRGHFLIEGDLNPDNSDVDKLFIQLVQTYNQLFEENPINASGVDAKAILSARLSKSRRLENLIAQLPGEKKNGLFGNLIALSLGLTPNFKSNFDLAEDAKLQLSKDTYDDDLDNLLAQIGDQYADLFLAAKNLSDAILLSDILRVNTEITKAPLSASMIKRYDEHHQDLTLLKALVRQQLPEKYKEIFFDQSKNGYAGYIDGGASQEEFYKFIKPILEKMDGTEELLVKLNREDLLRKQRTFDNGSIPHQIHLGELHAILRRQEDFYPFLKDNREKIEKILTFRIPYYVGPLARGNSRFAWMTRKSEETITPWNFEEVVDKGASAQSFIERMTNFDKNLPNEKVLPKHSLLYEYFTVYNELTKVKYVTEGMRKPAFLSGEQKKAIVDLLFKTNRKVTVKQLKEDYFKKIECFDSVEISGVEDRFNASLGTYHDLLKIIKDKDFLDNEENEDILEDIVLTLTLFEDREMIEERLKTYAHLFDDKVMKQLKRRRYTGWGRLSRKLINGIRDKQSGKTILDFLKSDGFANRNFMQLIHDDSLTFKEDIQKAQVSGQGDSLHEHIANLAGSPAIKKGILQTVKVVDELVKVMGRHKPENIVIEMARENQTTQKGQKNSRERMKRIEEGIKELGSQILKEHPVENTQLQNEKLYLYYLQNGRDMYVDQELDINRLSDYDVDHIVPQSFLKDDSIDNKVLTRSDKARGKSDNVPSEEVVKKMKNYWRQLLNAKLITQRKFDNLTKAERGGLSELDKAGFIKRQLVETRQITKHVAQILDSRMNTKYDENDKLIREVKVITLKSKLVSDFRKDFQFYKVREINNYHHAHDAYLNAVVGTALIKKYPKLESEFVYGDYKVYDVRKMIAKSEQEIGKATAKYFFYSNIMNFFKTEITLANGEIRKRPLIETNGETGEIVWDKGRDFATVRKVLSMPQVNIVKKTEVQTGGFSKESILPKRNSDKLIARKKDWDPKKYGGFDSPTVAYSVLVVAKVEKGKSKKLKSVKELLGITIMERSSFEKNPIDFLEAKGYKEVKKDLIIKLPKYSLFELENGRKRMLASAGELQKGNELALPSKYVNFLYLASHYEKLKGSPEDNEQKQLFVEQHKHYLDEIIEQISEFSKRVILADANLDKVLSAYNKHRDKPIREQAENIIHLFTLTNLGAPAAFKYFDTTIDRKRYTSTKEVLDATLIHQSITGLYETRIDLSQLGGDGGEAAAKGSSGGSGGLDDEYRLYSPLVKPDQNIQFWLEQFPQAWAETAGMGLAKQVPPQVIQLKASATPVSVRQYPLSKEAQEGIRPHVQRLIQQGILVPVQSPWNTPLLPVRKPGTNDYRPVQDLREVNKRVQDIHPTVPNPYNLLCALPPQRSWYTVLDLKDAFFCLRLHPTSQPLFAFEWRDPGTGRTGQLTWTRLPQGFKNSPTIFNEALHRDLANFRIQHPQVTLLQYVDDLLLAGATKQDCLEGTKALLLELSDLGYRASAKKAQICRREVTYLGYSLRDGQRWLTEARKKTVVQIPAPTTAKQVREFLGKAGFCRLFIPGFATLAAPLYPLTKPKGEFSWAPEHQKAFDAIKKALLSAPALALPDVTKPFTLYVDERKGVARGVLTQTLGPWRRPVAYLSKKLDPVASGWPVCLKAIAAVAILVKDADKLTLGQNITVIAPHALENIVRQPPDRWMTNARMTHYQSLLLTERVTFAPPAALNPATLLPEETDEPVTHDCHQLLIEETGVRKDLTDIPLTGEVLTWFTDGSSYVVEGKRMAGAAVVDGTRTIWASSLPEGTSAQKAELMALTQALRLAEGKSINIYTDSRYAFATAHVHGAIYKQRGWLTSAGREIKNKEEILSLLEALHLPKRLAIIHCPGHQKAKDPISRGNQMADRVAKQAAQGVNLLPAGKRTADGSEFEKRTADGSEFESPKKKAKVE

SEQ ID NO: 84 - protein, 2082 aa, synthetic construct
MPAAKRVKLDGGDKKYSIGLDIGTNSVGWAVITDEYKVPSKKFKVLGNTDRHSIKKNLIGALLFDSGETAEATRLKRTARRRYTRRKNRICYLQEIFSNEMAKVDDSFFHRLEESFLVEEDKKHERHPIFGNIVDEVAYHEKYPTIYHLRKKLVDSTDKADLRLIYLALAHMIKFRGHFLIEGDLNPDNSDVDKLFIQLVQTYNQLFEENPINASGVDAKAILSARLSKSRRLENLIAQLPGEKKNGLFGNLIALSLGLTPNFKSNFDLAEDAKLQLSKDTYDDDLDNLLAQIGDQYADLFLAAKNLSDAILLSDILRVNTEITKAPLSASMIKRYDEHHQDLTLLKALVRQQLPEKYKEIFFDQSKNGYAGYIDGGASQEEFYKFIKPILEKMDGTEELLVKLNREDLLRKQRTFDNGSIPHQIHLGELHAILRRQEDFYPFLKDNREKIEKILTFRIPYYVGPLARGNSRFAWMTRKSEETITPWNFEEVVDKGASAQSFIERMTNFDKNLPNEKVLPKHSLLYEYFTVYNELTKVKYVTEGMRKPAFLSGEQKKAIVDLLFKTNRKVTVKQLKEDYFKKIECFDSVEISGVEDRFNASLGTYHDLLKIIKDKDFLDNEENEDILEDIVLTLTLFEDREMIEERLKTYAHLFDDKVMKQLKRRRYTGWGRLSRKLINGIRDKQSGKTILDFLKSDGFANRNFMQLIHDDSLTFKEDIQKAQVSGQGDSLHEHIANLAGSPAIKKGILQTVKVVDELVKVMGRHKPENIVIEMARENQTTQKGQKNSRERMKRIEEGIKELGSQILKEHPVENTQLQNEKLYLYYLQNGRDMYVDQELDINRLSDYDVDHIVPQSFLKDDSIDNKVLTRSDKARGKSDNVPSEEVVKKMKNYWRQLLNAKLITQRKFDNLTKAERGGLSELDKAGFIKRQLVETRQITKHVAQILDSRMNTKYDENDKLIREVKVITLKSKLVSDFRKDFQFYKVREINNYHHAHDAYLNAVVGTALIKKYPKLESEFVYGDYKVYDVRKMIAKSEQEIGKATAKYFFYSNIMNFFKTEITLANGEIRKRPLIETNGETGEIVWDKGRDFATVRKVLSMPQVNIVKKTEVQTGGFSKESILPKRNSDKLIARKKDWDPKKYGGFDSPTVAYSVLVVAKVEKGKSKKLKSVKELLGITIMERSSFEKNPIDFLEAKGYKEVKKDLIIKLPKYSLFELENGRKRMLASAGELQKGNELALPSKYVNFLYLASHYEKLKGSPEDNEQKQLFVEQHKHYLDEIIEQISEFSKRVILADANLDKVLSAYNKHRDKPIREQAENIIHLFTLTNLGAPAAFKYFDTTIDRKRYTSTKEVLDATLIHQSITGLYETRIDLSQLGGDGGGGGGSGGLDDEYRLYSPLVKPDQNIQFWLEQFPQAWAETAGMGLAKQVPPQVIQLKASATPVSVRQYPLSKEAQEGIRPHVQRLIQQGILVPVQSPWNTPLLPVRKPGTNDYRPVQDLREVNKRVQDIHPTVPNPYNLLCALPPQRSWYTVLDLKDAFFCLRLHPTSQPLFAFEWRDPGTGRTGQLTWTRLPQGFKNSPTIFNEALHRDLANFRIQHPQVTLLQYVDDLLLAGATKQDCLEGTKALLLELSDLGYRASAKKAQICRREVTYLGYSLRDGQRWLTEARKKTVVQIPAPTTAKQVREFLGKAGFCRLFIPGFATLAAPLYPLTKPKGEFSWAPEHQKAFDAIKKALLSAPALALPDVTKPFTLYVDERKGVARGVLTQTLGPWRRPVAYLSKKLDPVASGWPVCLKAIAAVAILVKDADKLTLGQNITVIAPHALENIVRQPPDRWMTNARMTHYQSLLLTERVTFAPPAALNPATLLPEETDEPVTHDCHQLLIEETGVRKDLTDIPLTGEVLTWFTDGSSYVVEGKRMAGAAVVDGTRTIWASSLPEGTSAQKAELMALTQALRLAEGKSINIYTDSRYAFATAHVHGAIYKQRGWLTSAGREIKNKEEILSLLEALHLPKRLAIIHCPGHQKAKDPISRGNQMADRVAKQAAQGVNLLPAGKRTADGSEFEKRTADGSEFESPKKKAKVE

SEQ ID NO: 85 - protein, 2086 aa, synthetic construct
MPAAKRVKLDGGDKKYSIGLDIGTNSVGWAVITDEYKVPSKKFKVLGNTDRHSIKKNLIGALLFDSGETAEATRLKRTARRRYTRRKNRICYLQEIFSNEMAKVDDSFFHRLEESFLVEEDKKHERHPIFGNIVDEVAYHEKYPTIYHLRKKLVDSTDKADLRLIYLALAHMIKFRGHFLIEGDLNPDNSDVDKLFIQLVQTYNQLFEENPINASGVDAKAILSARLSKSRRLENLIAQLPGEKKNGLFGNLIALSLGLTPNFKSNFDLAEDAKLQLSKDTYDDDLDNLLAQIGDQYADLFLAAKNLSDAILLSDILRVNTEITKAPLSASMIKRYDEHHQDLTLLKALVRQQLPEKYKEIFFDQSKNGYAGYIDGGASQEEFYKFIKPILEKMDGTEELLVKLNREDLLRKQRTFDNGSIPHQIHLGELHAILRRQEDFYPFLKDNREKIEKILTFRIPYYVGPLARGNSRFAWMTRKSEETITPWNFEEVVDKGASAQSFIERMTNFDKNLPNEKVLPKHSLLYEYFTVYNELTKVKYVTEGMRKPAFLSGEQKKAIVDLLFKTNRKVTVKQLKEDYFKKIECFDSVEISGVEDRFNASLGTYHDLLKIIKDKDFLDNEENEDILEDIVLTLTLFEDREMIEERLKTYAHLFDDKVMKQLKRRRYTGWGRLSRKLINGIRDKQSGKTILDFLKSDGFANRNFMQLIHDDSLTFKEDIQKAQVSGQGDSLHEHIANLAGSPAIKKGILQTVKVVDELVKVMGRHKPENIVIEMARENQTTQKGQKNSRERMKRIEEGIKELGSQILKEHPVENTQLQNEKLYLYYLQNGRDMYVDQELDINRLSDYDVDHIVPQSFLKDDSIDNKVLTRSDKARGKSDNVPSEEVVKKMKNYWRQLLNAKLITQRKFDNLTKAERGGLSELDKAGFIKRQLVETRQITKHVAQILDSRMNTKYDENDKLIREVKVITLKSKLVSDFRKDFQFYKVREINNYHHAHDAYLNAVVGTALIKKYPKLESEFVYGDYKVYDVRKMIAKSEQEIGKATAKYFFYSNIMNFFKTEITLANGEIRKRPLIETNGETGEIVWDKGRDFATVRKVLSMPQVNIVKKTEVQTGGFSKESILPKRNSDKLIARKKDWDPKKYGGFDSPTVAYSVLVVAKVEKGKSKKLKSVKELLGITIMERSSFEKNPIDFLEAKGYKEVKKDLIIKLPKYSLFELENGRKRMLASAGELQKGNELALPSKYVNFLYLASHYEKLKGSPEDNEQKQLFVEQHKHYLDEIIEQISEFSKRVILADANLDKVLSAYNKHRDKPIREQAENIIHLFTLTNLGAPAAFKYFDTTIDRKRYTSTKEVLDATLIHQSITGLYETRIDLSQLGGDGGGSSGGSGGGGGLDDEYRLYSPLVKPDQNIQFWLEQFPQAWAETAGMGLAKQVPPQVIQLKASATPVSVRQYPLSKEAQEGIRPHVQRLIQQGILVPVQSPWNTPLLPVRKPGTNDYRPVQDLREVNKRVQDIHPTVPNPYNLLCALPPQRSWYTVLDLKDAFFCLRLHPTSQPLFAFEWRDPGTGRTGQLTWTRLPQGFKNSPTIFNEALHRDLANFRIQHPQVTLLQYVDDLLLAGATKQDCLEGTKALLLELSDLGYRASAKKAQICRREVTYLGYSLRDGQRWLTEARKKTVVQIPAPTTAKQVREFLGKAGFCRLFIPGFATLAAPLYPLTKPKGEFSWAPEHQKAFDAIKKALLSAPALALPDVTKPFTLYVDERKGVARGVLTQTLGPWRRPVAYLSKKLDPVASGWPVCLKAIAAVAILVKDADKLTLGQNITVIAPHALENIVRQPPDRWMTNARMTHYQSLLLTERVTFAPPAALNPATLLPEETDEPVTHDCHQLLIEETGVRKDLTDIPLTGEVLTWFTDGSSYVVEGKRMAGAAVVDGTRTIWASSLPEGTSAQKAELMALTQALRLAEGKSINIYTDSRYAFATAHVHGAIYKQRGWLTSAGREIKNKEEILSLLEALHLPKRLAIIHCPGHQKAKDPISRGNQMADRVAKQAAQGVNLLPAGKRTADGSEFEKRTADGSEFESPKKKAKVE

SEQ ID NO: 86 - protein, 2088 aa, synthetic construct
MPAAKRVKLDGGDKKYSIGLDIGTNSVGWAVITDEYKVPSKKFKVLGNTDRHSIKKNLIGALLFDSGETAEATRLKRTARRRYTRRKNRICYLQEIFSNEMAKVDDSFFHRLEESFLVEEDKKHERHPIFGNIVDEVAYHEKYPTIYHLRKKLVDSTDKADLRLIYLALAHMIKFRGHFLIEGDLNPDNSDVDKLFIQLVQTYNQLFEENPINASGVDAKAILSARLSKSRRLENLIAQLPGEKKNGLFGNLIALSLGLTPNFKSNFDLAEDAKLQLSKDTYDDDLDNLLAQIGDQYADLFLAAKNLSDAILLSDILRVNTEITKAPLSASMIKRYDEHHQDLTLLKALVRQQLPEKYKEIFFDQSKNGYAGYIDGGASQEEFYKFIKPILEKMDGTEELLVKLNREDLLRKQRTFDNGSIPHQIHLGELHAILRRQEDFYPFLKDNREKIEKILTFRIPYYVGPLARGNSRFAWMTRKSEETITPWNFEEVVDKGASAQSFIERMTNFDKNLPNEKVLPKHSLLYEYFTVYNELTKVKYVTEGMRKPAFLSGEQKKAIVDLLFKTNRKVTVKQLKEDYFKKIECFDSVEISGVEDRFNASLGTYHDLLKIIKDKDFLDNEENEDILEDIVLTLTLFEDREMIEERLKTYAHLFDDKVMKQLKRRRYTGWGRLSRKLINGIRDKQSGKTILDFLKSDGFANRNFMQLIHDDSLTFKEDIQKAQVSGQGDSLHEHIANLAGSPAIKKGILQTVKVVDELVKVMGRHKPENIVIEMARENQTTQKGQKNSRERMKRIEEGIKELGSQILKEHPVENTQLQNEKLYLYYLQNGRDMYVDQELDINRLSDYDVDHIVPQSFLKDDSIDNKVLTRSDKARGKSDNVPSEEVVKKMKNYWRQLLNAKLITQRKFDNLTKAERGGLSELDKAGFIKRQLVETRQITKHVAQILDSRMNTKYDENDKLIREVKVITLKSKLVSDFRKDFQFYKVREINNYHHAHDAYLNAVVGTALIKKYPKLESEFVYGDYKVYDVRKMIAKSEQEIGKATAKYFFYSNIMNFFKTEITLANGEIRKRPLIETNGETGEIVWDKGRDFATVRKVLSMPQVNIVKKTEVQTGGFSKESILPKRNSDKLIARKKDWDPKKYGGFDSPTVAYSVLVVAKVEKGKSKKLKSVKELLGITIMERSSFEKNPIDFLEAKGYKEVKKDLIIKLPKYSLFELENGRKRMLASAGELQKGNELALPSKYVNFLYLASHYEKLKGSPEDNEQKQLFVEQHKHYLDEIIEQISEFSKRVILADANLDKVLSAYNKHRDKPIREQAENIIHLFTLTNLGAPAAFKYFDTTIDRKRYTSTKEVLDATLIHQSITGLYETRIDLSQLGGDGGGSSPAPEAAAKGGLDDEYRLYSPLVKPDQNIQFWLEQFPQAWAETAGMGLAKQVPPQVIQLKASATPVSVRQYPLSKEAQEGIRPHVQRLIQQGILVPVQSPWNTPLLPVRKPGTNDYRPVQDLREVNKRVQDIHPTVPNPYNLLCALPPQRSWYTVLDLKDAFFCLRLHPTSQPLFAFEWRDPGTGRTGQLTWTRLPQGFKNSPTIFNEALHRDLANFRIQHPQVTLLQYVDDLLLAGATKQDCLEGTKALLLELSDLGYRASAKKAQICRREVTYLGYSLRDGQRWLTEARKKTVVQIPAPTTAKQVREFLGKAGFCRLFIPGFATLAAPLYPLTKPKGEFSWAPEHQKAFDAIKKALLSAPALALPDVTKPFTLYVDERKGVARGVLTQTLGPWRRPVAYLSKKLDPVASGWPVCLKAIAAVAILVKDADKLTLGQNITVIAPHALENIVRQPPDRWMTNARMTHYQSLLLTERVTFAPPAALNPATLLPEETDEPVTHDCHQLLIEETGVRKDLTDIPLTGEVLTWFTDGSSYVVEGKRMAGAAVVDGTRTIWASSLPEGTSAQKAELMALTQALRLAEGKSINIYTDSRYAFATAHVHGAIYKQRGWLTSAGREIKNKEEILSLLEALHLPKRLAIIHCPGHQKAKDPISRGNQMADRVAKQAAQGVNLLPAGKRTADGSEFEKRTADGSEFESPKKKAKVE

SEQ ID NO: 87 - protein, 2083 aa, synthetic construct
MPAAKRVKLDGGDKKYSIGLDIGTNSVGWAVITDEYKVPSKKFKVLGNTDRHSIKKNLIGALLFDSGETAEATRLKRTARRRYTRRKNRICYLQEIFSNEMAKVDDSFFHRLEESFLVEEDKKHERHPIFGNIVDEVAYHEKYPTIYHLRKKLVDSTDKADLRLIYLALAHMIKFRGHFLIEGDLNPDNSDVDKLFIQLVQTYNQLFEENPINASGVDAKAILSARLSKSRRLENLIAQLPGEKKNGLFGNLIALSLGLTPNFKSNFDLAEDAKLQLSKDTYDDDLDNLLAQIGDQYADLFLAAKNLSDAILLSDILRVNTEITKAPLSASMIKRYDEHHQDLTLLKALVRQQLPEKYKEIFFDQSKNGYAGYIDGGASQEEFYKFIKPILEKMDGTEELLVKLNREDLLRKQRTFDNGSIPHQIHLGELHAILRRQEDFYPFLKDNREKIEKILTFRIPYYVGPLARGNSRFAWMTRKSEETITPWNFEEVVDKGASAQSFIERMTNFDKNLPNEKVLPKHSLLYEYFTVYNELTKVKYVTEGMRKPAFLSGEQKKAIVDLLFKTNRKVTVKQLKEDYFKKIECFDSVEISGVEDRFNASLGTYHDLLKIIKDKDFLDNEENEDILEDIVLTLTLFEDREMIEERLKTYAHLFDDKVMKQLKRRRYTGWGRLSRKLINGIRDKQSGKTILDFLKSDGFANRNFMQLIHDDSLTFKEDIQKAQVSGQGDSLHEHIANLAGSPAIKKGILQTVKVVDELVKVMGRHKPENIVIEMARENQTTQKGQKNSRERMKRIEEGIKELGSQILKEHPVENTQLQNEKLYLYYLQNGRDMYVDQELDINRLSDYDVDHIVPQSFLKDDSIDNKVLTRSDKARGKSDNVPSEEVVKKMKNYWRQLLNAKLITQRKFDNLTKAERGGLSELDKAGFIKRQLVETRQITKHVAQILDSRMNTKYDENDKLIREVKVITLKSKLVSDFRKDFQFYKVREINNYHHAHDAYLNAVVGTALIKKYPKLESEFVYGDYKVYDVRKMIAKSEQEIGKATAKYFFYSNIMNFFKTEITLANGEIRKRPLIETNGETGEIVWDKGRDFATVRKVLSMPQVNIVKKTEVQTGGFSKESILPKRNSDKLIARKKDWDPKKYGGFDSPTVAYSVLVVAKVEKGKSKKLKSVKELLGITIMERSSFEKNPIDFLEAKGYKEVKKDLIIKLPKYSLFELENGRKRMLASAGELQKGNELALPSKYVNFLYLASHYEKLKGSPEDNEQKQLFVEQHKHYLDEIIEQISEFSKRVILADANLDKVLSAYNKHRDKPIREQAENIIHLFTLTNLGAPAAFKYFDTTIDRKRYTSTKEVLDATLIHQSITGLYETRIDLSQLGGDGGGGGGGSGGLDDEYRLYSPLVKPDQNIQFWLEQFPQAWAETAGMGLAKQVPPQVIQLKASATPVSVRQYPLSKEAQEGIRPHVQRLIQQGILVPVQSPWNTPLLPVRKPGTNDYRPVQDLREVNKRVQDIHPTVPNPYNLLCALPPQRSWYTVLDLKDAFFCLRLHPTSQPLFAFEWRDPGTGRTGQLTWTRLPQGFKNSPTIFNEALHRDLANFRIQHPQVTLLQYVDDLLLAGATKQDCLEGTKALLLELSDLGYRASAKKAQICRREVTYLGYSLRDGQRWLTEARKKTVVQIPAPTTAKQVREFLGKAGFCRLFIPGFATLAAPLYPLTKPKGEFSWAPEHQKAFDAIKKALLSAPALALPDVTKPFTLYVDERKGVARGVLTQTLGPWRRPVAYLSKKLDPVASGWPVCLKAIAAVAILVKDADKLTLGQNITVIAPHALENIVRQPPDRWMTNARMTHYQSLLLTERVTFAPPAALNPATLLPEETDEPVTHDCHQLLIEETGVRKDLTDIPLTGEVLTWFTDGSSYVVEGKRMAGAAVVDGTRTIWASSLPEGTSAQKAELMALTQALRLAEGKSINIYTDSRYAFATAHVHGAIYKQRGWLTSAGREIKNKEEILSLLEALHLPKRLAIIHCPGHQKAKDPISRGNQMADRVAKQAAQGVNLLPAGKRTADGSEFEKRTADGSEFESPKKKAKVE

SEQ ID NO: 88 - protein, 2083 aa, synthetic construct
MPAAKRVKLDGGDKKYSIGLDIGTNSVGWAVITDEYKVPSKKFKVLGNTDRHSIKKNLIGALLFDSGETAEATRLKRTARRRYTRRKNRICYLQEIFSNEMAKVDDSFFHRLEESFLVEEDKKHERHPIFGNIVDEVAYHEKYPTIYHLRKKLVDSTDKADLRLIYLALAHMIKFRGHFLIEGDLNPDNSDVDKLFIQLVQTYNQLFEENPINASGVDAKAILSARLSKSRRLENLIAQLPGEKKNGLFGNLIALSLGLTPNFKSNFDLAEDAKLQLSKDTYDDDLDNLLAQIGDQYADLFLAAKNLSDAILLSDILRVNTEITKAPLSASMIKRYDEHHQDLTLLKALVRQQLPEKYKEIFFDQSKNGYAGYIDGGASQEEFYKFIKPILEKMDGTEELLVKLNREDLLRKQRTFDNGSIPHQIHLGELHAILRRQEDFYPFLKDNREKIEKILTFRIPYYVGPLARGNSRFAWMTRKSEETITPWNFEEVVDKGASAQSFIERMTNFDKNLPNEKVLPKHSLLYEYFTVYNELTKVKYVTEGMRKPAFLSGEQKKAIVDLLFKTNRKVTVKQLKEDYFKKIECFDSVEISGVEDRFNASLGTYHDLLKIIKDKDFLDNEENEDILEDIVLTLTLFEDREMIEERLKTYAHLFDDKVMKQLKRRRYTGWGRLSRKLINGIRDKQSGKTILDFLKSDGFANRNFMQLIHDDSLTFKEDIQKAQVSGQGDSLHEHIANLAGSPAIKKGILQTVKVVDELVKVMGRHKPENIVIEMARENQTTQKGQKNSRERMKRIEEGIKELGSQILKEHPVENTQLQNEKLYLYYLQNGRDMYVDQELDINRLSDYDVDHIVPQSFLKDDSIDNKVLTRSDKARGKSDNVPSEEVVKKMKNYWRQLLNAKLITQRKFDNLTKAERGGLSELDKAGFIKRQLVETRQITKHVAQILDSRMNTKYDENDKLIREVKVITLKSKLVSDFRKDFQFYKVREINNYHHAHDAYLNAVVGTALIKKYPKLESEFVYGDYKVYDVRKMIAKSEQEIGKATAKYFFYSNIMNFFKTEITLANGEIRKRPLIETNGETGEIVWDKGRDFATVRKVLSMPQVNIVKKTEVQTGGFSKESILPKRNSDKLIARKKDWDPKKYGGFDSPTVAYSVLVVAKVEKGKSKKLKSVKELLGITIMERSSFEKNPIDFLEAKGYKEVKKDLIIKLPKYSLFELENGRKRMLASAGELQKGNELALPSKYVNFLYLASHYEKLKGSPEDNEQKQLFVEQHKHYLDEIIEQISEFSKRVILADANLDKVLSAYNKHRDKPIREQAENIIHLFTLTNLGAPAAFKYFDTTIDRKRYTSTKEVLDATLIHQSITGLYETRIDLSQLGGDGGGSSGGSGGLDDEYRLYSPLVKPDQNIQFWLEQFPQAWAETAGMGLAKQVPPQVIQLKASATPVSVRQYPLSKEAQEGIRPHVQRLIQQGILVPVQSPWNTPLLPVRKPGTNDYRPVQDLREVNKRVQDIHPTVPNPYNLLCALPPQRSWYTVLDLKDAFFCLRLHPTSQPLFAFEWRDPGTGRTGQLTWTRLPQGFKNSPTIFNEALHRDLANFRIQHPQVTLLQYVDDLLLAGATKQDCLEGTKALLLELSDLGYRASAKKAQICRREVTYLGYSLRDGQRWLTEARKKTVVQIPAPTTAKQVREFLGKAGFCRLFIPGFATLAAPLYPLTKPKGEFSWAPEHQKAFDAIKKALLSAPALALPDVTKPFTLYVDERKGVARGVLTQTLGPWRRPVAYLSKKLDPVASGWPVCLKAIAAVAILVKDADKLTLGQNITVIAPHALENIVRQPPDRWMTNARMTHYQSLLLTERVTFAPPAALNPATLLPEETDEPVTHDCHQLLIEETGVRKDLTDIPLTGEVLTWFTDGSSYVVEGKRMAGAAVVDGTRTIWASSLPEGTSAQKAELMALTQALRLAEGKSINIYTDSRYAFATAHVHGAIYKQRGWLTSAGREIKNKEEILSLLEALHLPKRLAIIHCPGHQKAKDPISRGNQMADRVAKQAAQGVNLLPAGKRTADGSEFEKRTADGSEFESPKKKAKVE

SEQ ID NO: 89 - protein, 2086 aa, synthetic construct
MPAAKRVKLDGGDKKYSIGLDIGTNSVGWAVITDEYKVPSKKFKVLGNTDRHSIKKNLIGALLFDSGETAEATRLKRTARRRYTRRKNRICYLQEIFSNEMAKVDDSFFHRLEESFLVEEDKKHERHPIFGNIVDEVAYHEKYPTIYHLRKKLVDSTDKADLRLIYLALAHMIKFRGHFLIEGDLNPDNSDVDKLFIQLVQTYNQLFEENPINASGVDAKAILSARLSKSRRLENLIAQLPGEKKNGLFGNLIALSLGLTPNFKSNFDLAEDAKLQLSKDTYDDDLDNLLAQIGDQYADLFLAAKNLSDAILLSDILRVNTEITKAPLSASMIKRYDEHHQDLTLLKALVRQQLPEKYKEIFFDQSKNGYAGYIDGGASQEEFYKFIKPILEKMDGTEELLVKLNREDLLRKQRTFDNGSIPHQIHLGELHAILRRQEDFYPFLKDNREKIEKILTFRIPYYVGPLARGNSRFAWMTRKSEETITPWNFEEVVDKGASAQSFIERMTNFDKNLPNEKVLPKHSLLYEYFTVYNELTKVKYVTEGMRKPAFLSGEQKKAIVDLLFKTNRKVTVKQLKEDYFKKIECFDSVEISGVEDRFNASLGTYHDLLKIIKDKDFLDNEENEDILEDIVLTLTLFEDREMIEERLKTYAHLFDDKVMKQLKRRRYTGWGRLSRKLINGIRDKQSGKTILDFLKSDGFANRNFMQLIHDDSLTFKEDIQKAQVSGQGDSLHEHIANLAGSPAIKKGILQTVKVVDELVKVMGRHKPENIVIEMARENQTTQKGQKNSRERMKRIEEGIKELGSQILKEHPVENTQLQNEKLYLYYLQNGRDMYVDQELDINRLSDYDVDHIVPQSFLKDDSIDNKVLTRSDKARGKSDNVPSEEVVKKMKNYWRQLLNAKLITQRKFDNLTKAERGGLSELDKAGFIKRQLVETRQITKHVAQILDSRMNTKYDENDKLIREVKVITLKSKLVSDFRKDFQFYKVREINNYHHAHDAYLNAVVGTALIKKYPKLESEFVYGDYKVYDVRKMIAKSEQEIGKATAKYFFYSNIMNFFKTEITLANGEIRKRPLIETNGETGEIVWDKGRDFATVRKVLSMPQVNIVKKTEVQTGGFSKESILPKRNSDKLIARKKDWDPKKYGGFDSPTVAYSVLVVAKVEKGKSKKLKSVKELLGITIMERSSFEKNPIDFLEAKGYKEVKKDLIIKLPKYSLFELENGRKRMLASAGELQKGNELALPSKYVNFLYLASHYEKLKGSPEDNEQKQLFVEQHKHYLDEIIEQISEFSKRVILADANLDKVLSAYNKHRDKPIREQAENIIHLFTLTNLGAPAAFKYFDTTIDRKRYTSTKEVLDATLIHQSITGLYETRIDLSQLGGDGGPAPGSSGGGGGLDDEYRLYSPLVKPDQNIQFWLEQFPQAWAETAGMGLAKQVPPQVIQLKASATPVSVRQYPLSKEAQEGIRPHVQRLIQQGILVPVQSPWNTPLLPVRKPGTNDYRPVQDLREVNKRVQDIHPTVPNPYNLLCALPPQRSWYTVLDLKDAFFCLRLHPTSQPLFAFEWRDPGTGRTGQLTWTRLPQGFKNSPTIFNEALHRDLANFRIQHPQVTLLQYVDDLLLAGATKQDCLEGTKALLLELSDLGYRASAKKAQICRREVTYLGYSLRDGQRWLTEARKKTVVQIPAPTTAKQVREFLGKAGFCRLFIPGFATLAAPLYPLTKPKGEFSWAPEHQKAFDAIKKALLSAPALALPDVTKPFTLYVDERKGVARGVLTQTLGPWRRPVAYLSKKLDPVASGWPVCLKAIAAVAILVKDADKLTLGQNITVIAPHALENIVRQPPDRWMTNARMTHYQSLLLTERVTFAPPAALNPATLLPEETDEPVTHDCHQLLIEETGVRKDLTDIPLTGEVLTWFTDGSSYVVEGKRMAGAAVVDGTRTIWASSLPEGTSAQKAELMALTQALRLAEGKSINIYTDSRYAFATAHVHGAIYKQRGWLTSAGREIKNKEEILSLLEALHLPKRLAIIHCPGHQKAKDPISRGNQMADRVAKQAAQGVNLLPAGKRTADGSEFEKRTADGSEFESPKKKAKVE

SEQ ID NO: 90 - protein, 2093 aa, synthetic construct
MPAAKRVKLDGGDKKYSIGLDIGTNSVGWAVITDEYKVPSKKFKVLGNTDRHSIKKNLIGALLFDSGETAEATRLKRTARRRYTRRKNRICYLQEIFSNEMAKVDDSFFHRLEESFLVEEDKKHERHPIFGNIVDEVAYHEKYPTIYHLRKKLVDSTDKADLRLIYLALAHMIKFRGHFLIEGDLNPDNSDVDKLFIQLVQTYNQLFEENPINASGVDAKAILSARLSKSRRLENLIAQLPGEKKNGLFGNLIALSLGLTPNFKSNFDLAEDAKLQLSKDTYDDDLDNLLAQIGDQYADLFLAAKNLSDAILLSDILRVNTEITKAPLSASMIKRYDEHHQDLTLLKALVRQQLPEKYKEIFFDQSKNGYAGYIDGGASQEEFYKFIKPILEKMDGTEELLVKLNREDLLRKQRTFDNGSIPHQIHLGELHAILRRQEDFYPFLKDNREKIEKILTFRIPYYVGPLARGNSRFAWMTRKSEETITPWNFEEVVDKGASAQSFIERMTNFDKNLPNEKVLPKHSLLYEYFTVYNELTKVKYVTEGMRKPAFLSGEQKKAIVDLLFKTNRKVTVKQLKEDYFKKIECFDSVEISGVEDRFNASLGTYHDLLKIIKDKDFLDNEENEDILEDIVLTLTLFEDREMIEERLKTYAHLFDDKVMKQLKRRRYTGWGRLSRKLINGIRDKQSGKTILDFLKSDGFANRNFMQLIHDDSLTFKEDIQKAQVSGQGDSLHEHIANLAGSPAIKKGILQTVKVVDELVKVMGRHKPENIVIEMARENQTTQKGQKNSRERMKRIEEGIKELGSQILKEHPVENTQLQNEKLYLYYLQNGRDMYVDQELDINRLSDYDVDHIVPQSFLKDDSIDNKVLTRSDKARGKSDNVPSEEVVKKMKNYWRQLLNAKLITQRKFDNLTKAERGGLSELDKAGFIKRQLVETRQITKHVAQILDSRMNTKYDENDKLIREVKVITLKSKLVSDFRKDFQFYKVREINNYHHAHDAYLNAVVGTALIKKYPKLESEFVYGDYKVYDVRKMIAKSEQEIGKATAKYFFYSNIMNFFKTEITLANGEIRKRPLIETNGETGEIVWDKGRDFATVRKVLSMPQVNIVKKTEVQTGGFSKESILPKRNSDKLIARKKDWDPKKYGGFDSPTVAYSVLVVAKVEKGKSKKLKSVKELLGITIMERSSFEKNPIDFLEAKGYKEVKKDLIIKLPKYSLFELENGRKRMLASAGELQKGNELALPSKYVNFLYLASHYEKLKGSPEDNEQKQLFVEQHKHYLDEIIEQISEFSKRVILADANLDKVLSAYNKHRDKPIREQAENIIHLFTLTNLGAPAAFKYFDTTIDRKRYTSTKEVLDATLIHQSITGLYETRIDLSQLGGDGGSGSETPGTSESATPESGGLDDEYRLYSPLVKPDQNIQFWLEQFPQAWAETAGMGLAKQVPPQVIQLKASATPVSVRQYPLSKEAQEGIRPHVQRLIQQGILVPVQSPWNTPLLPVRKPGTNDYRPVQDLREVNKRVQDIHPTVPNPYNLLCALPPQRSWYTVLDLKDAFFCLRLHPTSQPLFAFEWRDPGTGRTGQLTWTRLPQGFKNSPTIFNEALHRDLANFRIQHPQVTLLQYVDDLLLAGATKQDCLEGTKALLLELSDLGYRASAKKAQICRREVTYLGYSLRDGQRWLTEARKKTVVQIPAPTTAKQVREFLGKAGFCRLFIPGFATLAAPLYPLTKPKGEFSWAPEHQKAFDAIKKALLSAPALALPDVTKPFTLYVDERKGVARGVLTQTLGPWRRPVAYLSKKLDPVASGWPVCLKAIAAVAILVKDADKLTLGQNITVIAPHALENIVRQPPDRWMTNARMTHYQSLLLTERVTFAPPAALNPATLLPEETDEPVTHDCHQLLIEETGVRKDLTDIPLTGEVLTWFTDGSSYVVEGKRMAGAAVVDGTRTIWASSLPEGTSAQKAELMALTQALRLAEGKSINIYTDSRYAFATAHVHGAIYKQRGWLTSAGREIKNKEEILSLLEALHLPKRLAIIHCPGHQKAKDPISRGNQMADRVAKQAAQGVNLLPAGKRTADGSEFEKRTADGSEFESPKKKAKVE

SEQ ID NO: 91 - protein, 2086 aa, synthetic construct
MPAAKRVKLDGGDKKYSIGLDIGTNSVGWAVITDEYKVPSKKFKVLGNTDRHSIKKNLIGALLFDSGETAEATRLKRTARRRYTRRKNRICYLQEIFSNEMAKVDDSFFHRLEESFLVEEDKKHERHPIFGNIVDEVAYHEKYPTIYHLRKKLVDSTDKADLRLIYLALAHMIKFRGHFLIEGDLNPDNSDVDKLFIQLVQTYNQLFEENPINASGVDAKAILSARLSKSRRLENLIAQLPGEKKNGLFGNLIALSLGLTPNFKSNFDLAEDAKLQLSKDTYDDDLDNLLAQIGDQYADLFLAAKNLSDAILLSDILRVNTEITKAPLSASMIKRYDEHHQDLTLLKALVRQQLPEKYKEIFFDQSKNGYAGYIDGGASQEEFYKFIKPILEKMDGTEELLVKLNREDLLRKQRTFDNGSIPHQIHLGELHAILRRQEDFYPFLKDNREKIEKILTFRIPYYVGPLARGNSRFAWMTRKSEETITPWNFEEVVDKGASAQSFIERMTNFDKNLPNEKVLPKHSLLYEYFTVYNELTKVKYVTEGMRKPAFLSGEQKKAIVDLLFKTNRKVTVKQLKEDYFKKIECFDSVEISGVEDRFNASLGTYHDLLKIIKDKDFLDNEENEDILEDIVLTLTLFEDREMIEERLKTYAHLFDDKVMKQLKRRRYTGWGRLSRKLINGIRDKQSGKTILDFLKSDGFANRNFMQLIHDDSLTFKEDIQKAQVSGQGDSLHEHIANLAGSPAIKKGILQTVKVVDELVKVMGRHKPENIVIEMARENQTTQKGQKNSRERMKRIEEGIKELGSQILKEHPVENTQLQNEKLYLYYLQNGRDMYVDQELDINRLSDYDVDHIVPQSFLKDDSIDNKVLTRSDKARGKSDNVPSEEVVKKMKNYWRQLLNAKLITQRKFDNLTKAERGGLSELDKAGFIKRQLVETRQITKHVAQILDSRMNTKYDENDKLIREVKVITLKSKLVSDFRKDFQFYKVREINNYHHAHDAYLNAVVGTALIKKYPKLESEFVYGDYKVYDVRKMIAKSEQEIGKATAKYFFYSNIMNFFKTEITLANGEIRKRPLIETNGETGEIVWDKGRDFATVRKVLSMPQVNIVKKTEVQTGGFSKESILPKRNSDKLIARKKDWDPKKYGGFDSPTVAYSVLVVAKVEKGKSKKLKSVKELLGITIMERSSFEKNPIDFLEAKGYKEVKKDLIIKLPKYSLFELENGRKRMLASAGELQKGNELALPSKYVNFLYLASHYEKLKGSPEDNEQKQLFVEQHKHYLDEIIEQISEFSKRVILADANLDKVLSAYNKHRDKPIREQAENIIHLFTLTNLGAPAAFKYFDTTIDRKRYTSTKEVLDATLIHQSITGLYETRIDLSQLGGDGGGSSGGGPAPGGLDDEYRLYSPLVKPDQNIQFWLEQFPQAWAETAGMGLAKQVPPQVIQLKASATPVSVRQYPLSKEAQEGIRPHVQRLIQQGILVPVQSPWNTPLLPVRKPGTNDYRPVQDLREVNKRVQDIHPTVPNPYNLLCALPPQRSWYTVLDLKDAFFCLRLHPTSQPLFAFEWRDPGTGRTGQLTWTRLPQGFKNSPTIFNEALHRDLANFRIQHPQVTLLQYVDDLLLAGATKQDCLEGTKALLLELSDLGYRASAKKAQICRREVTYLGYSLRDGQRWLTEARKKTVVQIPAPTTAKQVREFLGKAGFCRLFIPGFATLAAPLYPLTKPKGEFSWAPEHQKAFDAIKKALLSAPALALPDVTKPFTLYVDERKGVARGVLTQTLGPWRRPVAYLSKKLDPVASGWPVCLKAIAAVAILVKDADKLTLGQNITVIAPHALENIVRQPPDRWMTNARMTHYQSLLLTERVTFAPPAALNPATLLPEETDEPVTHDCHQLLIEETGVRKDLTDIPLTGEVLTWFTDGSSYVVEGKRMAGAAVVDGTRTIWASSLPEGTSAQKAELMALTQALRLAEGKSINIYTDSRYAFATAHVHGAIYKQRGWLTSAGREIKNKEEILSLLEALHLPKRLAIIHCPGHQKAKDPISRGNQMADRVAKQAAQGVNLLPAGKRTADGSEFEKRTADGSEFESPKKKAKVE

SEQ ID NO: 92 - protein, 2088 aa, synthetic construct
MPAAKRVKLDGGDKKYSIGLDIGTNSVGWAVITDEYKVPSKKFKVLGNTDRHSIKKNLIGALLFDSGETAEATRLKRTARRRYTRRKNRICYLQEIFSNEMAKVDDSFFHRLEESFLVEEDKKHERHPIFGNIVDEVAYHEKYPTIYHLRKKLVDSTDKADLRLIYLALAHMIKFRGHFLIEGDLNPDNSDVDKLFIQLVQTYNQLFEENPINASGVDAKAILSARLSKSRRLENLIAQLPGEKKNGLFGNLIALSLGLTPNFKSNFDLAEDAKLQLSKDTYDDDLDNLLAQIGDQYADLFLAAKNLSDAILLSDILRVNTEITKAPLSASMIKRYDEHHQDLTLLKALVRQQLPEKYKEIFFDQSKNGYAGYIDGGASQEEFYKFIKPILEKMDGTEELLVKLNREDLLRKQRTFDNGSIPHQIHLGELHAILRRQEDFYPFLKDNREKIEKILTFRIPYYVGPLARGNSRFAWMTRKSEETITPWNFEEVVDKGASAQSFIERMTNFDKNLPNEKVLPKHSLLYEYFTVYNELTKVKYVTEGMRKPAFLSGEQKKAIVDLLFKTNRKVTVKQLKEDYFKKIECFDSVEISGVEDRFNASLGTYHDLLKIIKDKDFLDNEENEDILEDIVLTLTLFEDREMIEERLKTYAHLFDDKVMKQLKRRRYTGWGRLSRKLINGIRDKQSGKTILDFLKSDGFANRNFMQLIHDDSLTFKEDIQKAQVSGQGDSLHEHIANLAGSPAIKKGILQTVKVVDELVKVMGRHKPENIVIEMARENQTTQKGQKNSRERMKRIEEGIKELGSQILKEHPVENTQLQNEKLYLYYLQNGRDMYVDQELDINRLSDYDVDHIVPQSFLKDDSIDNKVLTRSDKARGKSDNVPSEEVVKKMKNYWRQLLNAKLITQRKFDNLTKAERGGLSELDKAGFIKRQLVETRQITKHVAQILDSRMNTKYDENDKLIREVKVITLKSKLVSDFRKDFQFYKVREINNYHHAHDAYLNAVVGTALIKKYPKLESEFVYGDYKVYDVRKMIAKSEQEIGKATAKYFFYSNIMNFFKTEITLANGEIRKRPLIETNGETGEIVWDKGRDFATVRKVLSMPQVNIVKKTEVQTGGFSKESILPKRNSDKLIARKKDWDPKKYGGFDSPTVAYSVLVVAKVEKGKSKKLKSVKELLGITIMERSSFEKNPIDFLEAKGYKEVKKDLIIKLPKYSLFELENGRKRMLASAGELQKGNELALPSKYVNFLYLASHYEKLKGSPEDNEQKQLFVEQHKHYLDEIIEQISEFSKRVILADANLDKVLSAYNKHRDKPIREQAENIIHLFTLTNLGAPAAFKYFDTTIDRKRYTSTKEVLDATLIHQSITGLYETRIDLSQLGGDGGGGSEAAAKGSSGGLDDEYRLYSPLVKPDQNIQFWLEQFPQAWAETAGMGLAKQVPPQVIQLKASATPVSVRQYPLSKEAQEGIRPHVQRLIQQGILVPVQSPWNTPLLPVRKPGTNDYRPVQDLREVNKRVQDIHPTVPNPYNLLCALPPQRSWYTVLDLKDAFFCLRLHPTSQPLFAFEWRDPGTGRTGQLTWTRLPQGFKNSPTIFNEALHRDLANFRIQHPQVTLLQYVDDLLLAGATKQDCLEGTKALLLELSDLGYRASAKKAQICRREVTYLGYSLRDGQRWLTEARKKTVVQIPAPTTAKQVREFLGKAGFCRLFIPGFATLAAPLYPLTKPKGEFSWAPEHQKAFDAIKKALLSAPALALPDVTKPFTLYVDERKGVARGVLTQTLGPWRRPVAYLSKKLDPVASGWPVCLKAIAAVAILVKDADKLTLGQNITVIAPHALENIVRQPPDRWMTNARMTHYQSLLLTERVTFAPPAALNPATLLPEETDEPVTHDCHQLLIEETGVRKDLTDIPLTGEVLTWFTDGSSYVVEGKRMAGAAVVDGTRTIWASSLPEGTSAQKAELMALTQALRLAEGKSINIYTDSRYAFATAHVHGAIYKQRGWLTSAGREIKNKEEILSLLEALHLPKRLAIIHCPGHQKAKDPISRGNQMADRVAKQAAQGVNLLPAGKRTADGSEFEKRTADGSEFESPKKKAKVE

SEQ ID NO: 93 - protein, 2088 aa, synthetic construct
MPAAKRVKLDGGDKKYSIGLDIGTNSVGWAVITDEYKVPSKKFKVLGNTDRHSIKKNLIGALLFDSGETAEATRLKRTARRRYTRRKNRICYLQEIFSNEMAKVDDSFFHRLEESFLVEEDKKHERHPIFGNIVDEVAYHEKYPTIYHLRKKLVDSTDKADLRLIYLALAHMIKFRGHFLIEGDLNPDNSDVDKLFIQLVQTYNQLFEENPINASGVDAKAILSARLSKSRRLENLIAQLPGEKKNGLFGNLIALSLGLTPNFKSNFDLAEDAKLQLSKDTYDDDLDNLLAQIGDQYADLFLAAKNLSDAILLSDILRVNTEITKAPLSASMIKRYDEHHQDLTLLKALVRQQLPEKYKEIFFDQSKNGYAGYIDGGASQEEFYKFIKPILEKMDGTEELLVKLNREDLLRKQRTFDNGSIPHQIHLGELHAILRRQEDFYPFLKDNREKIEKILTFRIPYYVGPLARGNSRFAWMTRKSEETITPWNFEEVVDKGASAQSFIERMTNFDKNLPNEKVLPKHSLLYEYFTVYNELTKVKYVTEGMRKPAFLSGEQKKAIVDLLFKTNRKVTVKQLKEDYFKKIECFDSVEISGVEDRFNASLGTYHDLLKIIKDKDFLDNEENEDILEDIVLTLTLFEDREMIEERLKTYAHLFDDKVMKQLKRRRYTGWGRLSRKLINGIRDKQSGKTILDFLKSDGFANRNFMQLIHDDSLTFKEDIQKAQVSGQGDSLHEHIANLAGSPAIKKGILQTVKVVDELVKVMGRHKPENIVIEMARENQTTQKGQKNSRERMKRIEEGIKELGSQILKEHPVENTQLQNEKLYLYYLQNGRDMYVDQELDINRLSDYDVDHIVPQSFLKDDSIDNKVLTRSDKARGKSDNVPSEEVVKKMKNYWRQLLNAKLITQRKFDNLTKAERGGLSELDKAGFIKRQLVETRQITKHVAQILDSRMNTKYDENDKLIREVKVITLKSKLVSDFRKDFQFYKVREINNYHHAHDAYLNAVVGTALIKKYPKLESEFVYGDYKVYDVRKMIAKSEQEIGKATAKYFFYSNIMNFFKTEITLANGEIRKRPLIETNGETGEIVWDKGRDFATVRKVLSMPQVNIVKKTEVQTGGFSKESILPKRNSDKLIARKKDWDPKKYGGFDSPTVAYSVLVVAKVEKGKSKKLKSVKELLGITIMERSSFEKNPIDFLEAKGYKEVKKDLIIKLPKYSLFELENGRKRMLASAGELQKGNELALPSKYVNFLYLASHYEKLKGSPEDNEQKQLFVEQHKHYLDEIIEQISEFSKRVILADANLDKVLSAYNKHRDKPIREQAENIIHLFTLTNLGAPAAFKYFDTTIDRKRYTSTKEVLDATLIHQSITGLYETRIDLSQLGGDGGPAPEAAAKGSSGGLDDEYRLYSPLVKPDQNIQFWLEQFPQAWAETAGMGLAKQVPPQVIQLKASATPVSVRQYPLSKEAQEGIRPHVQRLIQQGILVPVQSPWNTPLLPVRKPGTNDYRPVQDLREVNKRVQDIHPTVPNPYNLLCALPPQRSWYTVLDLKDAFFCLRLHPTSQPLFAFEWRDPGTGRTGQLTWTRLPQGFKNSPTIFNEALHRDLANFRIQHPQVTLLQYVDDLLLAGATKQDCLEGTKALLLELSDLGYRASAKKAQICRREVTYLGYSLRDGQRWLTEARKKTVVQIPAPTTAKQVREFLGKAGFCRLFIPGFATLAAPLYPLTKPKGEFSWAPEHQKAFDAIKKALLSAPALALPDVTKPFTLYVDERKGVARGVLTQTLGPWRRPVAYLSKKLDPVASGWPVCLKAIAAVAILVKDADKLTLGQNITVIAPHALENIVRQPPDRWMTNARMTHYQSLLLTERVTFAPPAALNPATLLPEETDEPVTHDCHQLLIEETGVRKDLTDIPLTGEVLTWFTDGSSYVVEGKRMAGAAVVDGTRTIWASSLPEGTSAQKAELMALTQALRLAEGKSINIYTDSRYAFATAHVHGAIYKQRGWLTSAGREIKNKEEILSLLEALHLPKRLAIIHCPGHQKAKDPISRGNQMADRVAKQAAQGVNLLPAGKRTADGSEFEKRTADGSEFESPKKKAKVE

SEQ ID NO: 94 - protein, 2088 aa, synthetic construct
MPAAKRVKLDGGDKKYSIGLDIGTNSVGWAVITDEYKVPSKKFKVLGNTDRHSIKKNLIGALLFDSGETAEATRLKRTARRRYTRRKNRICYLQEIFSNEMAKVDDSFFHRLEESFLVEEDKKHERHPIFGNIVDEVAYHEKYPTIYHLRKKLVDSTDKADLRLIYLALAHMIKFRGHFLIEGDLNPDNSDVDKLFIQLVQTYNQLFEENPINASGVDAKAILSARLSKSRRLENLIAQLPGEKKNGLFGNLIALSLGLTPNFKSNFDLAEDAKLQLSKDTYDDDLDNLLAQIGDQYADLFLAAKNLSDAILLSDILRVNTEITKAPLSASMIKRYDEHHQDLTLLKALVRQQLPEKYKEIFFDQSKNGYAGYIDGGASQEEFYKFIKPILEKMDGTEELLVKLNREDLLRKQRTFDNGSIPHQIHLGELHAILRRQEDFYPFLKDNREKIEKILTFRIPYYVGPLARGNSRFAWMTRKSEETITPWNFEEVVDKGASAQSFIERMTNFDKNLPNEKVLPKHSLLYEYFTVYNELTKVKYVTEGMRKPAFLSGEQKKAIVDLLFKTNRKVTVKQLKEDYFKKIECFDSVEISGVEDRFNASLGTYHDLLKIIKDKDFLDNEENEDILEDIVLTLTLFEDREMIEERLKTYAHLFDDKVMKQLKRRRYTGWGRLSRKLINGIRDKQSGKTILDFLKSDGFANRNFMQLIHDDSLTFKEDIQKAQVSGQGDSLHEHIANLAGSPAIKKGILQTVKVVDELVKVMGRHKPENIVIEMARENQTTQKGQKNSRERMKRIEEGIKELGSQILKEHPVENTQLQNEKLYLYYLQNGRDMYVDQELDINRLSDYDVDHIVPQSFLKDDSIDNKVLTRSDKARGKSDNVPSEEVVKKMKNYWRQLLNAKLITQRKFDNLTKAERGGLSELDKAGFIKRQLVETRQITKHVAQILDSRMNTKYDENDKLIREVKVITLKSKLVSDFRKDFQFYKVREINNYHHAHDAYLNAVVGTALIKKYPKLESEFVYGDYKVYDVRKMIAKSEQEIGKATAKYFFYSNIMNFFKTEITLANGEIRKRPLIETNGETGEIVWDKGRDFATVRKVLSMPQVNIVKKTEVQTGGFSKESILPKRNSDKLIARKKDWDPKKYGGFDSPTVAYSVLVVAKVEKGKSKKLKSVKELLGITIMERSSFEKNPIDFLEAKGYKEVKKDLIIKLPKYSLFELENGRKRMLASAGELQKGNELALPSKYVNFLYLASHYEKLKGSPEDNEQKQLFVEQHKHYLDEIIEQISEFSKRVILADANLDKVLSAYNKHRDKPIREQAENIIHLFTLTNLGAPAAFKYFDTTIDRKRYTSTKEVLDATLIHQSITGLYETRIDLSQLGGDGGGGSGGGEAAAKGGLDDEYRLYSPLVKPDQNIQFWLEQFPQAWAETAGMGLAKQVPPQVIQLKASATPVSVRQYPLSKEAQEGIRPHVQRLIQQGILVPVQSPWNTPLLPVRKPGTNDYRPVQDLREVNKRVQDIHPTVPNPYNLLCALPPQRSWYTVLDLKDAFFCLRLHPTSQPLFAFEWRDPGTGRTGQLTWTRLPQGFKNSPTIFNEALHRDLANFRIQHPQVTLLQYVDDLLLAGATKQDCLEGTKALLLELSDLGYRASAKKAQICRREVTYLGYSLRDGQRWLTEARKKTVVQIPAPTTAKQVREFLGKAGFCRLFIPGFATLAAPLYPLTKPKGEFSWAPEHQKAFDAIKKALLSAPALALPDVTKPFTLYVDERKGVARGVLTQTLGPWRRPVAYLSKKLDPVASGWPVCLKAIAAVAILVKDADKLTLGQNITVIAPHALENIVRQPPDRWMTNARMTHYQSLLLTERVTFAPPAALNPATLLPEETDEPVTHDCHQLLIEETGVRKDLTDIPLTGEVLTWFTDGSSYVVEGKRMAGAAVVDGTRTIWASSLPEGTSAQKAELMALTQALRLAEGKSINIYTDSRYAFATAHVHGAIYKQRGWLTSAGREIKNKEEILSLLEALHLPKRLAIIHCPGHQKAKDPISRGNQMADRVAKQAAQGVNLLPAGKRTADGSEFEKRTADGSEFESPKKKAKVE

SEQ ID NO: 95 - protein, 2086 aa, synthetic construct
MPAAKRVKLDGGDKKYSIGLDIGTNSVGWAVITDEYKVPSKKFKVLGNTDRHSIKKNLIGALLFDSGETAEATRLKRTARRRYTRRKNRICYLQEIFSNEMAKVDDSFFHRLEESFLVEEDKKHERHPIFGNIVDEVAYHEKYPTIYHLRKKLVDSTDKADLRLIYLALAHMIKFRGHFLIEGDLNPDNSDVDKLFIQLVQTYNQLFEENPINASGVDAKAILSARLSKSRRLENLIAQLPGEKKNGLFGNLIALSLGLTPNFKSNFDLAEDAKLQLSKDTYDDDLDNLLAQIGDQYADLFLAAKNLSDAILLSDILRVNTEITKAPLSASMIKRYDEHHQDLTLLKALVRQQLPEKYKEIFFDQSKNGYAGYIDGGASQEEFYKFIKPILEKMDGTEELLVKLNREDLLRKQRTFDNGSIPHQIHLGELHAILRRQEDFYPFLKDNREKIEKILTFRIPYYVGPLARGNSRFAWMTRKSEETITPWNFEEVVDKGASAQSFIERMTNFDKNLPNEKVLPKHSLLYEYFTVYNELTKVKYVTEGMRKPAFLSGEQKKAIVDLLFKTNRKVTVKQLKEDYFKKIECFDSVEISGVEDRFNASLGTYHDLLKIIKDKDFLDNEENEDILEDIVLTLTLFEDREMIEERLKTYAHLFDDKVMKQLKRRRYTGWGRLSRKLINGIRDKQSGKTILDFLKSDGFANRNFMQLIHDDSLTFKEDIQKAQVSGQGDSLHEHIANLAGSPAIKKGILQTVKVVDELVKVMGRHKPENIVIEMARENQTTQKGQKNSRERMKRIEEGIKELGSQILKEHPVENTQLQNEKLYLYYLQNGRDMYVDQELDINRLSDYDVDHIVPQSFLKDDSIDNKVLTRSDKARGKSDNVPSEEVVKKMKNYWRQLLNAKLITQRKFDNLTKAERGGLSELDKAGFIKRQLVETRQITKHVAQILDSRMNTKYDENDKLIREVKVITLKSKLVSDFRKDFQFYKVREINNYHHAHDAYLNAVVGTALIKKYPKLESEFVYGDYKVYDVRKMIAKSEQEIGKATAKYFFYSNIMNFFKTEITLANGEIRKRPLIETNGETGEIVWDKGRDFATVRKVLSMPQVNIVKKTEVQTGGFSKESILPKRNSDKLIARKKDWDPKKYGGFDSPTVAYSVLVVAKVEKGKSKKLKSVKELLGITIMERSSFEKNPIDFLEAKGYKEVKKDLIIKLPKYSLFELENGRKRMLASAGELQKGNELALPSKYVNFLYLASHYEKLKGSPEDNEQKQLFVEQHKHYLDEIIEQISEFSKRVILADANLDKVLSAYNKHRDKPIREQAENIIHLFTLTNLGAPAAFKYFDTTIDRKRYTSTKEVLDATLIHQSITGLYETRIDLSQLGGDGGGGGGSSGGSGGLDDEYRLYSPLVKPDQNIQFWLEQFPQAWAETAGMGLAKQVPPQVIQLKASATPVSVRQYPLSKEAQEGIRPHVQRLIQQGILVPVQSPWNTPLLPVRKPGTNDYRPVQDLREVNKRVQDIHPTVPNPYNLLCALPPQRSWYTVLDLKDAFFCLRLHPTSQPLFAFEWRDPGTGRTGQLTWTRLPQGFKNSPTIFNEALHRDLANFRIQHPQVTLLQYVDDLLLAGATKQDCLEGTKALLLELSDLGYRASAKKAQICRREVTYLGYSLRDGQRWLTEARKKTVVQIPAPTTAKQVREFLGKAGFCRLFIPGFATLAAPLYPLTKPKGEFSWAPEHQKAFDAIKKALLSAPALALPDVTKPFTLYVDERKGVARGVLTQTLGPWRRPVAYLSKKLDPVASGWPVCLKAIAAVAILVKDADKLTLGQNITVIAPHALENIVRQPPDRWMTNARMTHYQSLLLTERVTFAPPAALNPATLLPEETDEPVTHDCHQLLIEETGVRKDLTDIPLTGEVLTWFTDGSSYVVEGKRMAGAAVVDGTRTIWASSLPEGTSAQKAELMALTQALRLAEGKSINIYTDSRYAFATAHVHGAIYKQRGWLTSAGREIKNKEEILSLLEALHLPKRLAIIHCPGHQKAKDPISRGNQMADRVAKQAAQGVNLLPAGKRTADGSEFEKRTADGSEFESPKKKAKVE

SEQ ID NO: 96 - protein, 2104 aa, synthetic construct
MPAAKRVKLDGGDKKYSIGLDIGTNSVGWAVITDEYKVPSKKFKVLGNTDRHSIKKNLIGALLFDSGETAEATRLKRTARRRYTRRKNRICYLQEIFSNEMAKVDDSFFHRLEESFLVEEDKKHERHPIFGNIVDEVAYHEKYPTIYHLRKKLVDSTDKADLRLIYLALAHMIKFRGHFLIEGDLNPDNSDVDKLFIQLVQTYNQLFEENPINASGVDAKAILSARLSKSRRLENLIAQLPGEKKNGLFGNLIALSLGLTPNFKSNFDLAEDAKLQLSKDTYDDDLDNLLAQIGDQYADLFLAAKNLSDAILLSDILRVNTEITKAPLSASMIKRYDEHHQDLTLLKALVRQQLPEKYKEIFFDQSKNGYAGYIDGGASQEEFYKFIKPILEKMDGTEELLVKLNREDLLRKQRTFDNGSIPHQIHLGELHAILRRQEDFYPFLKDNREKIEKILTFRIPYYVGPLARGNSRFAWMTRKSEETITPWNFEEVVDKGASAQSFIERMTNFDKNLPNEKVLPKHSLLYEYFTVYNELTKVKYVTEGMRKPAFLSGEQKKAIVDLLFKTNRKVTVKQLKEDYFKKIECFDSVEISGVEDRFNASLGTYHDLLKIIKDKDFLDNEENEDILEDIVLTLTLFEDREMIEERLKTYAHLFDDKVMKQLKRRRYTGWGRLSRKLINGIRDKQSGKTILDFLKSDGFANRNFMQLIHDDSLTFKEDIQKAQVSGQGDSLHEHIANLAGSPAIKKGILQTVKVVDELVKVMGRHKPENIVIEMARENQTTQKGQKNSRERMKRIEEGIKELGSQILKEHPVENTQLQNEKLYLYYLQNGRDMYVDQELDINRLSDYDVDHIVPQSFLKDDSIDNKVLTRSDKARGKSDNVPSEEVVKKMKNYWRQLLNAKLITQRKFDNLTKAERGGLSELDKAGFIKRQLVETRQITKHVAQILDSRMNTKYDENDKLIREVKVITLKSKLVSDFRKDFQFYKVREINNYHHAHDAYLNAVVGTALIKKYPKLESEFVYGDYKVYDVRKMIAKSEQEIGKATAKYFFYSNIMNFFKTEITLANGEIRKRPLIETNGETGEIVWDKGRDFATVRKVLSMPQVNIVKKTEVQTGGFSKESILPKRNSDKLIARKKDWDPKKYGGFDSPTVAYSVLVVAKVEKGKSKKLKSVKELLGITIMERSSFEKNPIDFLEAKGYKEVKKDLIIKLPKYSLFELENGRKRMLASAGELQKGNELALPSKYVNFLYLASHYEKLKGSPEDNEQKQLFVEQHKHYLDEIIEQISEFSKRVILADANLDKVLSAYNKHRDKPIREQAENIIHLFTLTNLGAPAAFKYFDTTIDRKRYTSTKEVLDATLIHQSITGLYETRIDLSQLGGDGGEAAAKEAAAKEAAAKEAAAKEAAAKGGTLQLDDEYRLYSPLVKPDQNIQFWLEQFPQAWAETAGMGLAKQVPPQVIQLKASATPVSVRQYPLSKEAQEGIRPHVQRLIQQGILVPVQSPWNTPLLPVRKPGTNDYRPVQDLREVNKRVQDIHPTVPNPYNLLCALPPQRSWYTVLDLKDAFFCLRLHPTSQPLFAFEWRDPGTGRTGQLTWTRLPQGFKNSPTIFDEALHRDLANFRIQHPQVTLLQYVDDLLLAGATKQDCLEGTKALLLELSDLGYRASAKKAQICRREVTYLGYSLRDGQRWLTEARKKTVVQIPAPTTAKQVREFLGTAGFCRLWIPGFATLAAPLYPLTKEKGEFSWAPEHQKAFDAIKKALLSAPALALPDVTKPFTLYVDERKGVARGVLTQTLGPWRRPVAYLSKKLDPVASGWPVCLKAIAAVAILVKDADKLTLGQNITVIAPHALENIVRQPPDRWMTNARMTHYQSLLLTERVTFAPPAALNPATLLPEETDEPVTHDCHQLLIEETGVRKDLTDIPLTGEVLTWFTDGSSYVVEGKRMAGAAVVDGTRTIWASSLPEGTSAQKAELMALTQALRLAEGKSINIYTDSRYAFATAHVHGAIYKQRGLLTSAGREIKNKEEILSLLEALHLPKRLAIIHCPGHQKAKDPISRGNQMADRVAKQAAQGVNLLAGKRTADGSEFEKRTADGSEFESPKKKAKVE

SEQ ID NO: 97 - protein, 2094 aa, synthetic construct
MPAAKRVKLDGGDKKYSIGLDIGTNSVGWAVITDEYKVPSKKFKVLGNTDRHSIKKNLIGALLFDSGETAEATRLKRTARRRYTRRKNRICYLQEIFSNEMAKVDDSFFHRLEESFLVEEDKKHERHPIFGNIVDEVAYHEKYPTIYHLRKKLVDSTDKADLRLIYLALAHMIKFRGHFLIEGDLNPDNSDVDKLFIQLVQTYNQLFEENPINASGVDAKAILSARLSKSRRLENLIAQLPGEKKNGLFGNLIALSLGLTPNFKSNFDLAEDAKLQLSKDTYDDDLDNLLAQIGDQYADLFLAAKNLSDAILLSDILRVNTEITKAPLSASMIKRYDEHHQDLTLLKALVRQQLPEKYKEIFFDQSKNGYAGYIDGGASQEEFYKFIKPILEKMDGTEELLVKLNREDLLRKQRTFDNGSIPHQIHLGELHAILRRQEDFYPFLKDNREKIEKILTFRIPYYVGPLARGNSRFAWMTRKSEETITPWNFEEVVDKGASAQSFIERMTNFDKNLPNEKVLPKHSLLYEYFTVYNELTKVKYVTEGMRKPAFLSGEQKKAIVDLLFKTNRKVTVKQLKEDYFKKIECFDSVEISGVEDRFNASLGTYHDLLKIIKDKDFLDNEENEDILEDIVLTLTLFEDREMIEERLKTYAHLFDDKVMKQLKRRRYTGWGRLSRKLINGIRDKQSGKTILDFLKSDGFANRNFMQLIHDDSLTFKEDIQKAQVSGQGDSLHEHIANLAGSPAIKKGILQTVKVVDELVKVMGRHKPENIVIEMARENQTTQKGQKNSRERMKRIEEGIKELGSQILKEHPVENTQLQNEKLYLYYLQNGRDMYVDQELDINRLSDYDVDHIVPQSFLKDDSIDNKVLTRSDKARGKSDNVPSEEVVKKMKNYWRQLLNAKLITQRKFDNLTKAERGGLSELDKAGFIKRQLVETRQITKHVAQILDSRMNTKYDENDKLIREVKVITLKSKLVSDFRKDFQFYKVREINNYHHAHDAYLNAVVGTALIKKYPKLESEFVYGDYKVYDVRKMIAKSEQEIGKATAKYFFYSNIMNFFKTEITLANGEIRKRPLIETNGETGEIVWDKGRDFATVRKVLSMPQVNIVKKTEVQTGGFSKESILPKRNSDKLIARKKDWDPKKYGGFDSPTVAYSVLVVAKVEKGKSKKLKSVKELLGITIMERSSFEKNPIDFLEAKGYKEVKKDLIIKLPKYSLFELENGRKRMLASAGELQKGNELALPSKYVNFLYLASHYEKLKGSPEDNEQKQLFVEQHKHYLDEIIEQISEFSKRVILADANLDKVLSAYNKHRDKPIREQAENIIHLFTLTNLGAPAAFKYFDTTIDRKRYTSTKEVLDATLIHQSITGLYETRIDLSQLGGDGGEAAAKGGGGSEAAAKGGTLQLDDEYRLYSPLVKPDQNIQFWLEQFPQAWAETAGMGLAKQVPPQVIQLKASATPVSVRQYPLSKEAQEGIRPHVQRLIQQGILVPVQSPWNTPLLPVRKPGTNDYRPVQDLREVNKRVQDIHPTVPNPYNLLCALPPQRSWYTVLDLKDAFFCLRLHPTSQPLFAFEWRDPGTGRTGQLTWTRLPQGFKNSPTIFDEALHRDLANFRIQHPQVTLLQYVDDLLLAGATKQDCLEGTKALLLELSDLGYRASAKKAQICRREVTYLGYSLRDGQRWLTEARKKTVVQIPAPTTAKQVREFLGTAGFCRLWIPGFATLAAPLYPLTKEKGEFSWAPEHQKAFDAIKKALLSAPALALPDVTKPFTLYVDERKGVARGVLTQTLGPWRRPVAYLSKKLDPVASGWPVCLKAIAAVAILVKDADKLTLGQNITVIAPHALENIVRQPPDRWMTNARMTHYQSLLLTERVTFAPPAALNPATLLPEETDEPVTHDCHQLLIEETGVRKDLTDIPLTGEVLTWFTDGSSYVVEGKRMAGAAVVDGTRTIWASSLPEGTSAQKAELMALTQALRLAEGKSINIYTDSRYAFATAHVHGAIYKQRGLLTSAGREIKNKEEILSLLEALHLPKRLAIIHCPGHQKAKDPISRGNQMADRVAKQAAQGVNLLAGKRTADGSEFEKRTADGSEFESPKKKAKVE

SEQ ID NO: 98 - protein, 2125 aa, synthetic construct
MPAAKRVKLDGGDKKYSIGLDIGTNSVGWAVITDEYKVPSKKFKVLGNTDRHSIKKNLIGALLFDSGETAEATRLKRTARRRYTRRKNRICYLQEIFSNEMAKVDDSFFHRLEESFLVEEDKKHERHPIFGNIVDEVAYHEKYPTIYHLRKKLVDSTDKADLRLIYLALAHMIKFRGHFLIEGDLNPDNSDVDKLFIQLVQTYNQLFEENPINASGVDAKAILSARLSKSRRLENLIAQLPGEKKNGLFGNLIALSLGLTPNFKSNFDLAEDAKLQLSKDTYDDDLDNLLAQIGDQYADLFLAAKNLSDAILLSDILRVNTEITKAPLSASMIKRYDEHHQDLTLLKALVRQQLPEKYKEIFFDQSKNGYAGYIDGGASQEEFYKFIKPILEKMDGTEELLVKLNREDLLRKQRTFDNGSIPHQIHLGELHAILRRQEDFYPFLKDNREKIEKILTFRIPYYVGPLARGNSRFAWMTRKSEETITPWNFEEVVDKGASAQSFIERMTNFDKNLPNEKVLPKHSLLYEYFTVYNELTKVKYVTEGMRKPAFLSGEQKKAIVDLLFKTNRKVTVKQLKEDYFKKIECFDSVEISGVEDRFNASLGTYHDLLKIIKDKDFLDNEENEDILEDIVLTLTLFEDREMIEERLKTYAHLFDDKVMKQLKRRRYTGWGRLSRKLINGIRDKQSGKTILDFLKSDGFANRNFMQLIHDDSLTFKEDIQKAQVSGQGDSLHEHIANLAGSPAIKKGILQTVKVVDELVKVMGRHKPENIVIEMARENQTTQKGQKNSRERMKRIEEGIKELGSQILKEHPVENTQLQNEKLYLYYLQNGRDMYVDQELDINRLSDYDVDHIVPQSFLKDDSIDNKVLTRSDKARGKSDNVPSEEVVKKMKNYWRQLLNAKLITQRKFDNLTKAERGGLSELDKAGFIKRQLVETRQITKHVAQILDSRMNTKYDENDKLIREVKVITLKSKLVSDFRKDFQFYKVREINNYHHAHDAYLNAVVGTALIKKYPKLESEFVYGDYKVYDVRKMIAKSEQEIGKATAKYFFYSNIMNFFKTEITLANGEIRKRPLIETNGETGEIVWDKGRDFATVRKVLSMPQVNIVKKTEVQTGGFSKESILPKRNSDKLIARKKDWDPKKYGGFDSPTVAYSVLVVAKVEKGKSKKLKSVKELLGITIMERSSFEKNPIDFLEAKGYKEVKKDLIIKLPKYSLFELENGRKRMLASAGELQKGNELALPSKYVNFLYLASHYEKLKGSPEDNEQKQLFVEQHKHYLDEIIEQISEFSKRVILADANLDKVLSAYNKHRDKPIREQAENIIHLFTLTNLGAPAAFKYFDTTIDRKRYTSTKEVLDATLIHQSITGLYETRIDLSQLGGDGGAEAAAKEAAAKEAAAKEAAAKALEAEAAAKEAAAKEAAAKEAAAKAGGTLQLDDEYRLYSPLVKPDQNIQFWLEQFPQAWAETAGMGLAKQVPPQVIQLKASATPVSVRQYPLSKEAQEGIRPHVQRLIQQGILVPVQSPWNTPLLPVRKPGTNDYRPVQDLREVNKRVQDIHPTVPNPYNLLCALPPQRSWYTVLDLKDAFFCLRLHPTSQPLFAFEWRDPGTGRTGQLTWTRLPQGFKNSPTIFDEALHRDLANFRIQHPQVTLLQYVDDLLLAGATKQDCLEGTKALLLELSDLGYRASAKKAQICRREVTYLGYSLRDGQRWLTEARKKTVVQIPAPTTAKQVREFLGTAGFCRLWIPGFATLAAPLYPLTKEKGEFSWAPEHQKAFDAIKKALLSAPALALPDVTKPFTLYVDERKGVARGVLTQTLGPWRRPVAYLSKKLDPVASGWPVCLKAIAAVAILVKDADKLTLGQNITVIAPHALENIVRQPPDRWMTNARMTHYQSLLLTERVTFAPPAALNPATLLPEETDEPVTHDCHQLLIEETGVRKDLTDIPLTGEVLTWFTDGSSYVVEGKRMAGAAVVDGTRTIWASSLPEGTSAQKAELMALTQALRLAEGKSINIYTDSRYAFATAHVHGAIYKQRGLLTSAGREIKNKEEILSLLEALHLPKRLAIIHCPGHQKAKDPISRGNQMADRVAKQAAQGVNLLAGKRTADGSEFEKRTADGSEFESPKKKAKVE

SEQ ID NO: 99 - protein, 2094 aa, synthetic construct
MPAAKRVKLDGGDKKYSIGLDIGTNSVGWAVITDEYKVPSKKFKVLGNTDRHSIKKNLIGALLFDSGETAEATRLKRTARRRYTRRKNRICYLQEIFSNEMAKVDDSFFHRLEESFLVEEDKKHERHPIFGNIVDEVAYHEKYPTIYHLRKKLVDSTDKADLRLIYLALAHMIKFRGHFLIEGDLNPDNSDVDKLFIQLVQTYNQLFEENPINASGVDAKAILSARLSKSRRLENLIAQLPGEKKNGLFGNLIALSLGLTPNFKSNFDLAEDAKLQLSKDTYDDDLDNLLAQIGDQYADLFLAAKNLSDAILLSDILRVNTEITKAPLSASMIKRYDEHHQDLTLLKALVRQQLPEKYKEIFFDQSKNGYAGYIDGGASQEEFYKFIKPILEKMDGTEELLVKLNREDLLRKQRTFDNGSIPHQIHLGELHAILRRQEDFYPFLKDNREKIEKILTFRIPYYVGPLARGNSRFAWMTRKSEETITPWNFEEVVDKGASAQSFIERMTNFDKNLPNEKVLPKHSLLYEYFTVYNELTKVKYVTEGMRKPAFLSGEQKKAIVDLLFKTNRKVTVKQLKEDYFKKIECFDSVEISGVEDRFNASLGTYHDLLKIIKDKDFLDNEENEDILEDIVLTLTLFEDREMIEERLKTYAHLFDDKVMKQLKRRRYTGWGRLSRKLINGIRDKQSGKTILDFLKSDGFANRNFMQLIHDDSLTFKEDIQKAQVSGQGDSLHEHIANLAGSPAIKKGILQTVKVVDELVKVMGRHKPENIVIEMARENQTTQKGQKNSRERMKRIEEGIKELGSQILKEHPVENTQLQNEKLYLYYLQNGRDMYVDQELDINRLSDYDVDHIVPQSFLKDDSIDNKVLTRSDKARGKSDNVPSEEVVKKMKNYWRQLLNAKLITQRKFDNLTKAERGGLSELDKAGFIKRQLVETRQITKHVAQILDSRMNTKYDENDKLIREVKVITLKSKLVSDFRKDFQFYKVREINNYHHAHDAYLNAVVGTALIKKYPKLESEFVYGDYKVYDVRKMIAKSEQEIGKATAKYFFYSNIMNFFKTEITLANGEIRKRPLIETNGETGEIVWDKGRDFATVRKVLSMPQVNIVKKTEVQTGGFSKESILPKRNSDKLIARKKDWDPKKYGGFDSPTVAYSVLVVAKVEKGKSKKLKSVKELLGITIMERSSFEKNPIDFLEAKGYKEVKKDLIIKLPKYSLFELENGRKRMLASAGELQKGNELALPSKYVNFLYLASHYEKLKGSPEDNEQKQLFVEQHKHYLDEIIEQISEFSKRVILADANLDKVLSAYNKHRDKPIREQAENIIHLFTLTNLGAPAAFKYFDTTIDRKRYTSTKEVLDATLIHQSITGLYETRIDLSQLGGDGGGSSGSSGSSGSSGSSGGTLQLDDEYRLYSPLVKPDQNIQFWLEQFPQAWAETAGMGLAKQVPPQVIQLKASATPVSVRQYPLSKEAQEGIRPHVQRLIQQGILVPVQSPWNTPLLPVRKPGTNDYRPVQDLREVNKRVQDIHPTVPNPYNLLCALPPQRSWYTVLDLKDAFFCLRLHPTSQPLFAFEWRDPGTGRTGQLTWTRLPQGFKNSPTIFDEALHRDLANFRIQHPQVTLLQYVDDLLLAGATKQDCLEGTKALLLELSDLGYRASAKKAQICRREVTYLGYSLRDGQRWLTEARKKTVVQIPAPTTAKQVREFLGTAGFCRLWIPGFATLAAPLYPLTKEKGEFSWAPEHQKAFDAIKKALLSAPALALPDVTKPFTLYVDERKGVARGVLTQTLGPWRRPVAYLSKKLDPVASGWPVCLKAIAAVAILVKDADKLTLGQNITVIAPHALENIVRQPPDRWMTNARMTHYQSLLLTERVTFAPPAALNPATLLPEETDEPVTHDCHQLLIEETGVRKDLTDIPLTGEVLTWFTDGSSYVVEGKRMAGAAVVDGTRTIWASSLPEGTSAQKAELMALTQALRLAEGKSINIYTDSRYAFATAHVHGAIYKQRGLLTSAGREIKNKEEILSLLEALHLPKRLAIIHCPGHQKAKDPISRGNQMADRVAKQAAQGVNLLAGKRTADGSEFEKRTADGSEFESPKKKAKVE

SEQ ID NO: 100 - protein, 2085 aa, synthetic construct
MPAAKRVKLDGGDKKYSIGLDIGTNSVGWAVITDEYKVPSKKFKVLGNTDRHSIKKNLIGALLFDSGETAEATRLKRTARRRYTRRKNRICYLQEIFSNEMAKVDDSFFHRLEESFLVEEDKKHERHPIFGNIVDEVAYHEKYPTIYHLRKKLVDSTDKADLRLIYLALAHMIKFRGHFLIEGDLNPDNSDVDKLFIQLVQTYNQLFEENPINASGVDAKAILSARLSKSRRLENLIAQLPGEKKNGLFGNLIALSLGLTPNFKSNFDLAEDAKLQLSKDTYDDDLDNLLAQIGDQYADLFLAAKNLSDAILLSDILRVNTEITKAPLSASMIKRYDEHHQDLTLLKALVRQQLPEKYKEIFFDQSKNGYAGYIDGGASQEEFYKFIKPILEKMDGTEELLVKLNREDLLRKQRTFDNGSIPHQIHLGELHAILRRQEDFYPFLKDNREKIEKILTFRIPYYVGPLARGNSRFAWMTRKSEETITPWNFEEVVDKGASAQSFIERMTNFDKNLPNEKVLPKHSLLYEYFTVYNELTKVKYVTEGMRKPAFLSGEQKKAIVDLLFKTNRKVTVKQLKEDYFKKIECFDSVEISGVEDRFNASLGTYHDLLKIIKDKDFLDNEENEDILEDIVLTLTLFEDREMIEERLKTYAHLFDDKVMKQLKRRRYTGWGRLSRKLINGIRDKQSGKTILDFLKSDGFANRNFMQLIHDDSLTFKEDIQKAQVSGQGDSLHEHIANLAGSPAIKKGILQTVKVVDELVKVMGRHKPENIVIEMARENQTTQKGQKNSRERMKRIEEGIKELGSQILKEHPVENTQLQNEKLYLYYLQNGRDMYVDQELDINRLSDYDVDHIVPQSFLKDDSIDNKVLTRSDKARGKSDNVPSEEVVKKMKNYWRQLLNAKLITQRKFDNLTKAERGGLSELDKAGFIKRQLVETRQITKHVAQILDSRMNTKYDENDKLIREVKVITLKSKLVSDFRKDFQFYKVREINNYHHAHDAYLNAVVGTALIKKYPKLESEFVYGDYKVYDVRKMIAKSEQEIGKATAKYFFYSNIMNFFKTEITLANGEIRKRPLIETNGETGEIVWDKGRDFATVRKVLSMPQVNIVKKTEVQTGGFSKESILPKRNSDKLIARKKDWDPKKYGGFDSPTVAYSVLVVAKVEKGKSKKLKSVKELLGITIMERSSFEKNPIDFLEAKGYKEVKKDLIIKLPKYSLFELENGRKRMLASAGELQKGNELALPSKYVNFLYLASHYEKLKGSPEDNEQKQLFVEQHKHYLDEIIEQISEFSKRVILADANLDKVLSAYNKHRDKPIREQAENIIHLFTLTNLGAPAAFKYFDTTIDRKRYTSTKEVLDATLIHQSITGLYETRIDLSQLGGDGGGGGGSSGGTLQLDDEYRLYSPLVKPDQNIQFWLEQFPQAWAETAGMGLAKQVPPQVIQLKASATPVSVRQYPLSKEAQEGIRPHVQRLIQQGILVPVQSPWNTPLLPVRKPGTNDYRPVQDLREVNKRVQDIHPTVPNPYNLLCALPPQRSWYTVLDLKDAFFCLRLHPTSQPLFAFEWRDPGTGRTGQLTWTRLPQGFKNSPTIFDEALHRDLANFRIQHPQVTLLQYVDDLLLAGATKQDCLEGTKALLLELSDLGYRASAKKAQICRREVTYLGYSLRDGQRWLTEARKKTVVQIPAPTTAKQVREFLGTAGFCRLWIPGFATLAAPLYPLTKEKGEFSWAPEHQKAFDAIKKALLSAPALALPDVTKPFTLYVDERKGVARGVLTQTLGPWRRPVAYLSKKLDPVASGWPVCLKAIAAVAILVKDADKLTLGQNITVIAPHALENIVRQPPDRWMTNARMTHYQSLLLTERVTFAPPAALNPATLLPEETDEPVTHDCHQLLIEETGVRKDLTDIPLTGEVLTWFTDGSSYVVEGKRMAGAAVVDGTRTIWASSLPEGTSAQKAELMALTQALRLAEGKSINIYTDSRYAFATAHVHGAIYKQRGLLTSAGREIKNKEEILSLLEALHLPKRLAIIHCPGHQKAKDPISRGNQMADRVAKQAAQGVNLLAGKRTADGSEFEKRTADGSEFESPKKKAKVE

SEQ ID NO: 101 - protein, 2088 aa, synthetic construct
MPAAKRVKLDGGDKKYSIGLDIGTNSVGWAVITDEYKVPSKKFKVLGNTDRHSIKKNLIGALLFDSGETAEATRLKRTARRRYTRRKNRICYLQEIFSNEMAKVDDSFFHRLEESFLVEEDKKHERHPIFGNIVDEVAYHEKYPTIYHLRKKLVDSTDKADLRLIYLALAHMIKFRGHFLIEGDLNPDNSDVDKLFIQLVQTYNQLFEENPINASGVDAKAILSARLSKSRRLENLIAQLPGEKKNGLFGNLIALSLGLTPNFKSNFDLAEDAKLQLSKDTYDDDLDNLLAQIGDQYADLFLAAKNLSDAILLSDILRVNTEITKAPLSASMIKRYDEHHQDLTLLKALVRQQLPEKYKEIFFDQSKNGYAGYIDGGASQEEFYKFIKPILEKMDGTEELLVKLNREDLLRKQRTFDNGSIPHQIHLGELHAILRRQEDFYPFLKDNREKIEKILTFRIPYYVGPLARGNSRFAWMTRKSEETITPWNFEEVVDKGASAQSFIERMTNFDKNLPNEKVLPKHSLLYEYFTVYNELTKVKYVTEGMRKPAFLSGEQKKAIVDLLFKTNRKVTVKQLKEDYFKKIECFDSVEISGVEDRFNASLGTYHDLLKIIKDKDFLDNEENEDILEDIVLTLTLFEDREMIEERLKTYAHLFDDKVMKQLKRRRYTGWGRLSRKLINGIRDKQSGKTILDFLKSDGFANRNFMQLIHDDSLTFKEDIQKAQVSGQGDSLHEHIANLAGSPAIKKGILQTVKVVDELVKVMGRHKPENIVIEMARENQTTQKGQKNSRERMKRIEEGIKELGSQILKEHPVENTQLQNEKLYLYYLQNGRDMYVDQELDINRLSDYDVDHIVPQSFLKDDSIDNKVLTRSDKARGKSDNVPSEEVVKKMKNYWRQLLNAKLITQRKFDNLTKAERGGLSELDKAGFIKRQLVETRQITKHVAQILDSRMNTKYDENDKLIREVKVITLKSKLVSDFRKDFQFYKVREINNYHHAHDAYLNAVVGTALIKKYPKLESEFVYGDYKVYDVRKMIAKSEQEIGKATAKYFFYSNIMNFFKTEITLANGEIRKRPLIETNGETGEIVWDKGRDFATVRKVLSMPQVNIVKKTEVQTGGFSKESILPKRNSDKLIARKKDWDPKKYGGFDSPTVAYSVLVVAKVEKGKSKKLKSVKELLGITIMERSSFEKNPIDFLEAKGYKEVKKDLIIKLPKYSLFELENGRKRMLASAGELQKGNELALPSKYVNFLYLASHYEKLKGSPEDNEQKQLFVEQHKHYLDEIIEQISEFSKRVILADANLDKVLSAYNKHRDKPIREQAENIIHLFTLTNLGAPAAFKYFDTTIDRKRYTSTKEVLDATLIHQSITGLYETRIDLSQLGGDGGGSSGGSPAPGGTLQLDDEYRLYSPLVKPDQNIQFWLEQFPQAWAETAGMGLAKQVPPQVIQLKASATPVSVRQYPLSKEAQEGIRPHVQRLIQQGILVPVQSPWNTPLLPVRKPGTNDYRPVQDLREVNKRVQDIHPTVPNPYNLLCALPPQRSWYTVLDLKDAFFCLRLHPTSQPLFAFEWRDPGTGRTGQLTWTRLPQGFKNSPTIFDEALHRDLANFRIQHPQVTLLQYVDDLLLAGATKQDCLEGTKALLLELSDLGYRASAKKAQICRREVTYLGYSLRDGQRWLTEARKKTVVQIPAPTTAKQVREFLGTAGFCRLWIPGFATLAAPLYPLTKEKGEFSWAPEHQKAFDAIKKALLSAPALALPDVTKPFTLYVDERKGVARGVLTQTLGPWRRPVAYLSKKLDPVASGWPVCLKAIAAVAILVKDADKLTLGQNITVIAPHALENIVRQPPDRWMTNARMTHYQSLLLTERVTFAPPAALNPATLLPEETDEPVTHDCHQLLIEETGVRKDLTDIPLTGEVLTWFTDGSSYVVEGKRMAGAAVVDGTRTIWASSLPEGTSAQKAELMALTQALRLAEGKSINIYTDSRYAFATAHVHGAIYKQRGLLTSAGREIKNKEEILSLLEALHLPKRLAIIHCPGHQKAKDPISRGNQMADRVAKQAAQGVNLLAGKRTADGSEFEKRTADGSEFESPKKKAKVE

SEQ ID NO: 102 - protein, 2089 aa, synthetic construct
MPAAKRVKLDGGDKKYSIGLDIGTNSVGWAVITDEYKVPSKKFKVLGNTDRHSIKKNLIGALLFDSGETAEATRLKRTARRRYTRRKNRICYLQEIFSNEMAKVDDSFFHRLEESFLVEEDKKHERHPIFGNIVDEVAYHEKYPTIYHLRKKLVDSTDKADLRLIYLALAHMIKFRGHFLIEGDLNPDNSDVDKLFIQLVQTYNQLFEENPINASGVDAKAILSARLSKSRRLENLIAQLPGEKKNGLFGNLIALSLGLTPNFKSNFDLAEDAKLQLSKDTYDDDLDNLLAQIGDQYADLFLAAKNLSDAILLSDILRVNTEITKAPLSASMIKRYDEHHQDLTLLKALVRQQLPEKYKEIFFDQSKNGYAGYIDGGASQEEFYKFIKPILEKMDGTEELLVKLNREDLLRKQRTFDNGSIPHQIHLGELHAILRRQEDFYPFLKDNREKIEKILTFRIPYYVGPLARGNSRFAWMTRKSEETITPWNFEEVVDKGASAQSFIERMTNFDKNLPNEKVLPKHSLLYEYFTVYNELTKVKYVTEGMRKPAFLSGEQKKAIVDLLFKTNRKVTVKQLKEDYFKKIECFDSVEISGVEDRFNASLGTYHDLLKIIKDKDFLDNEENEDILEDIVLTLTLFEDREMIEERLKTYAHLFDDKVMKQLKRRRYTGWGRLSRKLINGIRDKQSGKTILDFLKSDGFANRNFMQLIHDDSLTFKEDIQKAQVSGQGDSLHEHIANLAGSPAIKKGILQTVKVVDELVKVMGRHKPENIVIEMARENQTTQKGQKNSRERMKRIEEGIKELGSQILKEHPVENTQLQNEKLYLYYLQNGRDMYVDQELDINRLSDYDVDHIVPQSFLKDDSIDNKVLTRSDKARGKSDNVPSEEVVKKMKNYWRQLLNAKLITQRKFDNLTKAERGGLSELDKAGFIKRQLVETRQITKHVAQILDSRMNTKYDENDKLIREVKVITLKSKLVSDFRKDFQFYKVREINNYHHAHDAYLNAVVGTALIKKYPKLESEFVYGDYKVYDVRKMIAKSEQEIGKATAKYFFYSNIMNFFKTEITLANGEIRKRPLIETNGETGEIVWDKGRDFATVRKVLSMPQVNIVKKTEVQTGGFSKESILPKRNSDKLIARKKDWDPKKYGGFDSPTVAYSVLVVAKVEKGKSKKLKSVKELLGITIMERSSFEKNPIDFLEAKGYKEVKKDLIIKLPKYSLFELENGRKRMLASAGELQKGNELALPSKYVNFLYLASHYEKLKGSPEDNEQKQLFVEQHKHYLDEIIEQISEFSKRVILADANLDKVLSAYNKHRDKPIREQAENIIHLFTLTNLGAPAAFKYFDTTIDRKRYTSTKEVLDATLIHQSITGLYETRIDLSQLGGDGGGGGGSGGGGSGGTLQLDDEYRLYSPLVKPDQNIQFWLEQFPQAWAETAGMGLAKQVPPQVIQLKASATPVSVRQYPLSKEAQEGIRPHVQRLIQQGILVPVQSPWNTPLLPVRKPGTNDYRPVQDLREVNKRVQDIHPTVPNPYNLLCALPPQRSWYTVLDLKDAFFCLRLHPTSQPLFAFEWRDPGTGRTGQLTWTRLPQGFKNSPTIFDEALHRDLANFRIQHPQVTLLQYVDDLLLAGATKQDCLEGTKALLLELSDLGYRASAKKAQICRREVTYLGYSLRDGQRWLTEARKKTVVQIPAPTTAKQVREFLGTAGFCRLWIPGFATLAAPLYPLTKEKGEFSWAPEHQKAFDAIKKALLSAPALALPDVTKPFTLYVDERKGVARGVLTQTLGPWRRPVAYLSKKLDPVASGWPVCLKAIAAVAILVKDADKLTLGQNITVIAPHALENIVRQPPDRWMTNARMTHYQSLLLTERVTFAPPAALNPATLLPEETDEPVTHDCHQLLIEETGVRKDLTDIPLTGEVLTWFTDGSSYVVEGKRMAGAAVVDGTRTIWASSLPEGTSAQKAELMALTQALRLAEGKSINIYTDSRYAFATAHVHGAIYKQRGLLTSAGREIKNKEEILSLLEALHLPKRLAIIHCPGHQKAKDPISRGNQMADRVAKQAAQGVNLLAGKRTADGSEFEKRTADGSEFESPKKKAKVE

SEQ ID NO: 103 - protein, 2091 aa, synthetic construct
MPAAKRVKLDGGDKKYSIGLDIGTNSVGWAVITDEYKVPSKKFKVLGNTDRHSIKKNLIGALLFDSGETAEATRLKRTARRRYTRRKNRICYLQEIFSNEMAKVDDSFFHRLEESFLVEEDKKHERHPIFGNIVDEVAYHEKYPTIYHLRKKLVDSTDKADLRLIYLALAHMIKFRGHFLIEGDLNPDNSDVDKLFIQLVQTYNQLFEENPINASGVDAKAILSARLSKSRRLENLIAQLPGEKKNGLFGNLIALSLGLTPNFKSNFDLAEDAKLQLSKDTYDDDLDNLLAQIGDQYADLFLAAKNLSDAILLSDILRVNTEITKAPLSASMIKRYDEHHQDLTLLKALVRQQLPEKYKEIFFDQSKNGYAGYIDGGASQEEFYKFIKPILEKMDGTEELLVKLNREDLLRKQRTFDNGSIPHQIHLGELHAILRRQEDFYPFLKDNREKIEKILTFRIPYYVGPLARGNSRFAWMTRKSEETITPWNFEEVVDKGASAQSFIERMTNFDKNLPNEKVLPKHSLLYEYFTVYNELTKVKYVTEGMRKPAFLSGEQKKAIVDLLFKTNRKVTVKQLKEDYFKKIECFDSVEISGVEDRFNASLGTYHDLLKIIKDKDFLDNEENEDILEDIVLTLTLFEDREMIEERLKTYAHLFDDKVMKQLKRRRYTGWGRLSRKLINGIRDKQSGKTILDFLKSDGFANRNFMQLIHDDSLTFKEDIQKAQVSGQGDSLHEHIANLAGSPAIKKGILQTVKVVDELVKVMGRHKPENIVIEMARENQTTQKGQKNSRERMKRIEEGIKELGSQILKEHPVENTQLQNEKLYLYYLQNGRDMYVDQELDINRLSDYDVDHIVPQSFLKDDSIDNKVLTRSDKARGKSDNVPSEEVVKKMKNYWRQLLNAKLITQRKFDNLTKAERGGLSELDKAGFIKRQLVETRQITKHVAQILDSRMNTKYDENDKLIREVKVITLKSKLVSDFRKDFQFYKVREINNYHHAHDAYLNAVVGTALIKKYPKLESEFVYGDYKVYDVRKMIAKSEQEIGKATAKYFFYSNIMNFFKTEITLANGEIRKRPLIETNGETGEIVWDKGRDFATVRKVLSMPQVNIVKKTEVQTGGFSKESILPKRNSDKLIARKKDWDPKKYGGFDSPTVAYSVLVVAKVEKGKSKKLKSVKELLGITIMERSSFEKNPIDFLEAKGYKEVKKDLIIKLPKYSLFELENGRKRMLASAGELQKGNELALPSKYVNFLYLASHYEKLKGSPEDNEQKQLFVEQHKHYLDEIIEQISEFSKRVILADANLDKVLSAYNKHRDKPIREQAENIIHLFTLTNLGAPAAFKYFDTTIDRKRYTSTKEVLDATLIHQSITGLYETRIDLSQLGGDGGGSSGSSGSSGSSGGTLQLDDEYRLYSPLVKPDQNIQFWLEQFPQAWAETAGMGLAKQVPPQVIQLKASATPVSVRQYPLSKEAQEGIRPHVQRLIQQGILVPVQSPWNTPLLPVRKPGTNDYRPVQDLREVNKRVQDIHPTVPNPYNLLCALPPQRSWYTVLDLKDAFFCLRLHPTSQPLFAFEWRDPGTGRTGQLTWTRLPQGFKNSPTIFDEALHRDLANFRIQHPQVTLLQYVDDLLLAGATKQDCLEGTKALLLELSDLGYRASAKKAQICRREVTYLGYSLRDGQRWLTEARKKTVVQIPAPTTAKQVREFLGTAGFCRLWIPGFATLAAPLYPLTKEKGEFSWAPEHQKAFDAIKKALLSAPALALPDVTKPFTLYVDERKGVARGVLTQTLGPWRRPVAYLSKKLDPVASGWPVCLKAIAAVAILVKDADKLTLGQNITVIAPHALENIVRQPPDRWMTNARMTHYQSLLLTERVTFAPPAALNPATLLPEETDEPVTHDCHQLLIEETGVRKDLTDIPLTGEVLTWFTDGSSYVVEGKRMAGAAVVDGTRTIWASSLPEGTSAQKAELMALTQALRLAEGKSINIYTDSRYAFATAHVHGAIYKQRGLLTSAGREIKNKEEILSLLEALHLPKRLAIIHCPGHQKAKDPISRGNQMADRVAKQAAQGVNLLAGKRTADGSEFEKRTADGSEFESPKKKAKVE

SEQ ID NO: 104 - protein, 2090 aa, synthetic construct
MPAAKRVKLDGGDKKYSIGLDIGTNSVGWAVITDEYKVPSKKFKVLGNTDRHSIKKNLIGALLFDSGETAEATRLKRTARRRYTRRKNRICYLQEIFSNEMAKVDDSFFHRLEESFLVEEDKKHERHPIFGNIVDEVAYHEKYPTIYHLRKKLVDSTDKADLRLIYLALAHMIKFRGHFLIEGDLNPDNSDVDKLFIQLVQTYNQLFEENPINASGVDAKAILSARLSKSRRLENLIAQLPGEKKNGLFGNLIALSLGLTPNFKSNFDLAEDAKLQLSKDTYDDDLDNLLAQIGDQYADLFLAAKNLSDAILLSDILRVNTEITKAPLSASMIKRYDEHHQDLTLLKALVRQQLPEKYKEIFFDQSKNGYAGYIDGGASQEEFYKFIKPILEKMDGTEELLVKLNREDLLRKQRTFDNGSIPHQIHLGELHAILRRQEDFYPFLKDNREKIEKILTFRIPYYVGPLARGNSRFAWMTRKSEETITPWNFEEVVDKGASAQSFIERMTNFDKNLPNEKVLPKHSLLYEYFTVYNELTKVKYVTEGMRKPAFLSGEQKKAIVDLLFKTNRKVTVKQLKEDYFKKIECFDSVEISGVEDRFNASLGTYHDLLKIIKDKDFLDNEENEDILEDIVLTLTLFEDREMIEERLKTYAHLFDDKVMKQLKRRRYTGWGRLSRKLINGIRDKQSGKTILDFLKSDGFANRNFMQLIHDDSLTFKEDIQKAQVSGQGDSLHEHIANLAGSPAIKKGILQTVKVVDELVKVMGRHKPENIVIEMARENQTTQKGQKNSRERMKRIEEGIKELGSQILKEHPVENTQLQNEKLYLYYLQNGRDMYVDQELDINRLSDYDVDHIVPQSFLKDDSIDNKVLTRSDKARGKSDNVPSEEVVKKMKNYWRQLLNAKLITQRKFDNLTKAERGGLSELDKAGFIKRQLVETRQITKHVAQILDSRMNTKYDENDKLIREVKVITLKSKLVSDFRKDFQFYKVREINNYHHAHDAYLNAVVGTALIKKYPKLESEFVYGDYKVYDVRKMIAKSEQEIGKATAKYFFYSNIMNFFKTEITLANGEIRKRPLIETNGETGEIVWDKGRDFATVRKVLSMPQVNIVKKTEVQTGGFSKESILPKRNSDKLIARKKDWDPKKYGGFDSPTVAYSVLVVAKVEKGKSKKLKSVKELLGITIMERSSFEKNPIDFLEAKGYKEVKKDLIIKLPKYSLFELENGRKRMLASAGELQKGNELALPSKYVNFLYLASHYEKLKGSPEDNEQKQLFVEQHKHYLDEIIEQISEFSKRVILADANLDKVLSAYNKHRDKPIREQAENIIHLFTLTNLGAPAAFKYFDTTIDRKRYTSTKEVLDATLIHQSITGLYETRIDLSQLGGDGGPAPGSSEAAAKGGTLQLDDEYRLYSPLVKPDQNIQFWLEQFPQAWAETAGMGLAKQVPPQVIQLKASATPVSVRQYPLSKEAQEGIRPHVQRLIQQGILVPVQSPWNTPLLPVRKPGTNDYRPVQDLREVNKRVQDIHPTVPNPYNLLCALPPQRSWYTVLDLKDAFFCLRLHPTSQPLFAFEWRDPGTGRTGQLTWTRLPQGFKNSPTIFDEALHRDLANFRIQHPQVTLLQYVDDLLLAGATKQDCLEGTKALLLELSDLGYRASAKKAQICRREVTYLGYSLRDGQRWLTEARKKTVVQIPAPTTAKQVREFLGTAGFCRLWIPGFATLAAPLYPLTKEKGEFSWAPEHQKAFDAIKKALLSAPALALPDVTKPFTLYVDERKGVARGVLTQTLGPWRRPVAYLSKKLDPVASGWPVCLKAIAAVAILVKDADKLTLGQNITVIAPHALENIVRQPPDRWMTNARMTHYQSLLLTERVTFAPPAALNPATLLPEETDEPVTHDCHQLLIEETGVRKDLTDIPLTGEVLTWFTDGSSYVVEGKRMAGAAVVDGTRTIWASSLPEGTSAQKAELMALTQALRLAEGKSINIYTDSRYAFATAHVHGAIYKQRGLLTSAGREIKNKEEILSLLEALHLPKRLAIIHCPGHQKAKDPISRGNQMADRVAKQAAQGVNLLAGKRTADGSEFEKRTADGSEFESPKKKAKVE

SEQ ID NO: 105 - protein, 2085 aa, synthetic construct
MPAAKRVKLDGGDKKYSIGLDIGTNSVGWAVITDEYKVPSKKFKVLGNTDRHSIKKNLIGALLFDSGETAEATRLKRTARRRYTRRKNRICYLQEIFSNEMAKVDDSFFHRLEESFLVEEDKKHERHPIFGNIVDEVAYHEKYPTIYHLRKKLVDSTDKADLRLIYLALAHMIKFRGHFLIEGDLNPDNSDVDKLFIQLVQTYNQLFEENPINASGVDAKAILSARLSKSRRLENLIAQLPGEKKNGLFGNLIALSLGLTPNFKSNFDLAEDAKLQLSKDTYDDDLDNLLAQIGDQYADLFLAAKNLSDAILLSDILRVNTEITKAPLSASMIKRYDEHHQDLTLLKALVRQQLPEKYKEIFFDQSKNGYAGYIDGGASQEEFYKFIKPILEKMDGTEELLVKLNREDLLRKQRTFDNGSIPHQIHLGELHAILRRQEDFYPFLKDNREKIEKILTFRIPYYVGPLARGNSRFAWMTRKSEETITPWNFEEVVDKGASAQSFIERMTNFDKNLPNEKVLPKHSLLYEYFTVYNELTKVKYVTEGMRKPAFLSGEQKKAIVDLLFKTNRKVTVKQLKEDYFKKIECFDSVEISGVEDRFNASLGTYHDLLKIIKDKDFLDNEENEDILEDIVLTLTLFEDREMIEERLKTYAHLFDDKVMKQLKRRRYTGWGRLSRKLINGIRDKQSGKTILDFLKSDGFANRNFMQLIHDDSLTFKEDIQKAQVSGQGDSLHEHIANLAGSPAIKKGILQTVKVVDELVKVMGRHKPENIVIEMARENQTTQKGQKNSRERMKRIEEGIKELGSQILKEHPVENTQLQNEKLYLYYLQNGRDMYVDQELDINRLSDYDVDHIVPQSFLKDDSIDNKVLTRSDKARGKSDNVPSEEVVKKMKNYWRQLLNAKLITQRKFDNLTKAERGGLSELDKAGFIKRQLVETRQITKHVAQILDSRMNTKYDENDKLIREVKVITLKSKLVSDFRKDFQFYKVREINNYHHAHDAYLNAVVGTALIKKYPKLESEFVYGDYKVYDVRKMIAKSEQEIGKATAKYFFYSNIMNFFKTEITLANGEIRKRPLIETNGETGEIVWDKGRDFATVRKVLSMPQVNIVKKTEVQTGGFSKESILPKRNSDKLIARKKDWDPKKYGGFDSPTVAYSVLVVAKVEKGKSKKLKSVKELLGITIMERSSFEKNPIDFLEAKGYKEVKKDLIIKLPKYSLFELENGRKRMLASAGELQKGNELALPSKYVNFLYLASHYEKLKGSPEDNEQKQLFVEQHKHYLDEIIEQISEFSKRVILADANLDKVLSAYNKHRDKPIREQAENIIHLFTLTNLGAPAAFKYFDTTIDRKRYTSTKEVLDATLIHQSITGLYETRIDLSQLGGDGGGGSGSSGGTLQLDDEYRLYSPLVKPDQNIQFWLEQFPQAWAETAGMGLAKQVPPQVIQLKASATPVSVRQYPLSKEAQEGIRPHVQRLIQQGILVPVQSPWNTPLLPVRKPGTNDYRPVQDLREVNKRVQDIHPTVPNPYNLLCALPPQRSWYTVLDLKDAFFCLRLHPTSQPLFAFEWRDPGTGRTGQLTWTRLPQGFKNSPTIFDEALHRDLANFRIQHPQVTLLQYVDDLLLAGATKQDCLEGTKALLLELSDLGYRASAKKAQICRREVTYLGYSLRDGQRWLTEARKKTVVQIPAPTTAKQVREFLGTAGFCRLWIPGFATLAAPLYPLTKEKGEFSWAPEHQKAFDAIKKALLSAPALALPDVTKPFTLYVDERKGVARGVLTQTLGPWRRPVAYLSKKLDPVASGWPVCLKAIAAVAILVKDADKLTLGQNITVIAPHALENIVRQPPDRWMTNARMTHYQSLLLTERVTFAPPAALNPATLLPEETDEPVTHDCHQLLIEETGVRKDLTDIPLTGEVLTWFTDGSSYVVEGKRMAGAAVVDGTRTIWASSLPEGTSAQKAELMALTQALRLAEGKSINIYTDSRYAFATAHVHGAIYKQRGLLTSAGREIKNKEEILSLLEALHLPKRLAIIHCPGHQKAKDPISRGNQMADRVAKQAAQGVNLLAGKRTADGSEFEKRTADGSEFESPKKKAKVE

SEQ ID NO: 106 - protein, 2088 aa, synthetic construct
MPAAKRVKLDGGDKKYSIGLDIGTNSVGWAVITDEYKVPSKKFKVLGNTDRHSIKKNLIGALLFDSGETAEATRLKRTARRRYTRRKNRICYLQEIFSNEMAKVDDSFFHRLEESFLVEEDKKHERHPIFGNIVDEVAYHEKYPTIYHLRKKLVDSTDKADLRLIYLALAHMIKFRGHFLIEGDLNPDNSDVDKLFIQLVQTYNQLFEENPINASGVDAKAILSARLSKSRRLENLIAQLPGEKKNGLFGNLIALSLGLTPNFKSNFDLAEDAKLQLSKDTYDDDLDNLLAQIGDQYADLFLAAKNLSDAILLSDILRVNTEITKAPLSASMIKRYDEHHQDLTLLKALVRQQLPEKYKEIFFDQSKNGYAGYIDGGASQEEFYKFIKPILEKMDGTEELLVKLNREDLLRKQRTFDNGSIPHQIHLGELHAILRRQEDFYPFLKDNREKIEKILTFRIPYYVGPLARGNSRFAWMTRKSEETITPWNFEEVVDKGASAQSFIERMTNFDKNLPNEKVLPKHSLLYEYFTVYNELTKVKYVTEGMRKPAFLSGEQKKAIVDLLFKTNRKVTVKQLKEDYFKKIECFDSVEISGVEDRFNASLGTYHDLLKIIKDKDFLDNEENEDILEDIVLTLTLFEDREMIEERLKTYAHLFDDKVMKQLKRRRYTGWGRLSRKLINGIRDKQSGKTILDFLKSDGFANRNFMQLIHDDSLTFKEDIQKAQVSGQGDSLHEHIANLAGSPAIKKGILQTVKVVDELVKVMGRHKPENIVIEMARENQTTQKGQKNSRERMKRIEEGIKELGSQILKEHPVENTQLQNEKLYLYYLQNGRDMYVDQELDINRLSDYDVDHIVPQSFLKDDSIDNKVLTRSDKARGKSDNVPSEEVVKKMKNYWRQLLNAKLITQRKFDNLTKAERGGLSELDKAGFIKRQLVETRQITKHVAQILDSRMNTKYDENDKLIREVKVITLKSKLVSDFRKDFQFYKVREINNYHHAHDAYLNAVVGTALIKKYPKLESEFVYGDYKVYDVRKMIAKSEQEIGKATAKYFFYSNIMNFFKTEITLANGEIRKRPLIETNGETGEIVWDKGRDFATVRKVLSMPQVNIVKKTEVQTGGFSKESILPKRNSDKLIARKKDWDPKKYGGFDSPTVAYSVLVVAKVEKGKSKKLKSVKELLGITIMERSSFEKNPIDFLEAKGYKEVKKDLIIKLPKYSLFELENGRKRMLASAGELQKGNELALPSKYVNFLYLASHYEKLKGSPEDNEQKQLFVEQHKHYLDEIIEQISEFSKRVILADANLDKVLSAYNKHRDKPIREQAENIIHLFTLTNLGAPAAFKYFDTTIDRKRYTSTKEVLDATLIHQSITGLYETRIDLSQLGGDGGPAPGSSGGGGGTLQLDDEYRLYSPLVKPDQNIQFWLEQFPQAWAETAGMGLAKQVPPQVIQLKASATPVSVRQYPLSKEAQEGIRPHVQRLIQQGILVPVQSPWNTPLLPVRKPGTNDYRPVQDLREVNKRVQDIHPTVPNPYNLLCALPPQRSWYTVLDLKDAFFCLRLHPTSQPLFAFEWRDPGTGRTGQLTWTRLPQGFKNSPTIFDEALHRDLANFRIQHPQVTLLQYVDDLLLAGATKQDCLEGTKALLLELSDLGYRASAKKAQICRREVTYLGYSLRDGQRWLTEARKKTVVQIPAPTTAKQVREFLGTAGFCRLWIPGFATLAAPLYPLTKEKGEFSWAPEHQKAFDAIKKALLSAPALALPDVTKPFTLYVDERKGVARGVLTQTLGPWRRPVAYLSKKLDPVASGWPVCLKAIAAVAILVKDADKLTLGQNITVIAPHALENIVRQPPDRWMTNARMTHYQSLLLTERVTFAPPAALNPATLLPEETDEPVTHDCHQLLIEETGVRKDLTDIPLTGEVLTWFTDGSSYVVEGKRMAGAAVVDGTRTIWASSLPEGTSAQKAELMALTQALRLAEGKSINIYTDSRYAFATAHVHGAIYKQRGLLTSAGREIKNKEEILSLLEALHLPKRLAIIHCPGHQKAKDPISRGNQMADRVAKQAAQGVNLLAGKRTADGSEFEKRTADGSEFESPKKKAKVE

SEQ ID NO: 107 - protein, 2088 aa, synthetic construct
MPAAKRVKLDGGDKKYSIGLDIGTNSVGWAVITDEYKVPSKKFKVLGNTDRHSIKKNLIGALLFDSGETAEATRLKRTARRRYTRRKNRICYLQEIFSNEMAKVDDSFFHRLEESFLVEEDKKHERHPIFGNIVDEVAYHEKYPTIYHLRKKLVDSTDKADLRLIYLALAHMIKFRGHFLIEGDLNPDNSDVDKLFIQLVQTYNQLFEENPINASGVDAKAILSARLSKSRRLENLIAQLPGEKKNGLFGNLIALSLGLTPNFKSNFDLAEDAKLQLSKDTYDDDLDNLLAQIGDQYADLFLAAKNLSDAILLSDILRVNTEITKAPLSASMIKRYDEHHQDLTLLKALVRQQLPEKYKEIFFDQSKNGYAGYIDGGASQEEFYKFIKPILEKMDGTEELLVKLNREDLLRKQRTFDNGSIPHQIHLGELHAILRRQEDFYPFLKDNREKIEKILTFRIPYYVGPLARGNSRFAWMTRKSEETITPWNFEEVVDKGASAQSFIERMTNFDKNLPNEKVLPKHSLLYEYFTVYNELTKVKYVTEGMRKPAFLSGEQKKAIVDLLFKTNRKVTVKQLKEDYFKKIECFDSVEISGVEDRFNASLGTYHDLLKIIKDKDFLDNEENEDILEDIVLTLTLFEDREMIEERLKTYAHLFDDKVMKQLKRRRYTGWGRLSRKLINGIRDKQSGKTILDFLKSDGFANRNFMQLIHDDSLTFKEDIQKAQVSGQGDSLHEHIANLAGSPAIKKGILQTVKVVDELVKVMGRHKPENIVIEMARENQTTQKGQKNSRERMKRIEEGIKELGSQILKEHPVENTQLQNEKLYLYYLQNGRDMYVDQELDINRLSDYDVDHIVPQSFLKDDSIDNKVLTRSDKARGKSDNVPSEEVVKKMKNYWRQLLNAKLITQRKFDNLTKAERGGLSELDKAGFIKRQLVETRQITKHVAQILDSRMNTKYDENDKLIREVKVITLKSKLVSDFRKDFQFYKVREINNYHHAHDAYLNAVVGTALIKKYPKLESEFVYGDYKVYDVRKMIAKSEQEIGKATAKYFFYSNIMNFFKTEITLANGEIRKRPLIETNGETGEIVWDKGRDFATVRKVLSMPQVNIVKKTEVQTGGFSKESILPKRNSDKLIARKKDWDPKKYGGFDSPTVAYSVLVVAKVEKGKSKKLKSVKELLGITIMERSSFEKNPIDFLEAKGYKEVKKDLIIKLPKYSLFELENGRKRMLASAGELQKGNELALPSKYVNFLYLASHYEKLKGSPEDNEQKQLFVEQHKHYLDEIIEQISEFSKRVILADANLDKVLSAYNKHRDKPIREQAENIIHLFTLTNLGAPAAFKYFDTTIDRKRYTSTKEVLDATLIHQSITGLYETRIDLSQLGGDGGGGGPAPGSSGGTLQLDDEYRLYSPLVKPDQNIQFWLEQFPQAWAETAGMGLAKQVPPQVIQLKASATPVSVRQYPLSKEAQEGIRPHVQRLIQQGILVPVQSPWNTPLLPVRKPGTNDYRPVQDLREVNKRVQDIHPTVPNPYNLLCALPPQRSWYTVLDLKDAFFCLRLHPTSQPLFAFEWRDPGTGRTGQLTWTRLPQGFKNSPTIFDEALHRDLANFRIQHPQVTLLQYVDDLLLAGATKQDCLEGTKALLLELSDLGYRASAKKAQICRREVTYLGYSLRDGQRWLTEARKKTVVQIPAPTTAKQVREFLGTAGFCRLWIPGFATLAAPLYPLTKEKGEFSWAPEHQKAFDAIKKALLSAPALALPDVTKPFTLYVDERKGVARGVLTQTLGPWRRPVAYLSKKLDPVASGWPVCLKAIAAVAILVKDADKLTLGQNITVIAPHALENIVRQPPDRWMTNARMTHYQSLLLTERVTFAPPAALNPATLLPEETDEPVTHDCHQLLIEETGVRKDLTDIPLTGEVLTWFTDGSSYVVEGKRMAGAAVVDGTRTIWASSLPEGTSAQKAELMALTQALRLAEGKSINIYTDSRYAFATAHVHGAIYKQRGLLTSAGREIKNKEEILSLLEALHLPKRLAIIHCPGHQKAKDPISRGNQMADRVAKQAAQGVNLLAGKRTADGSEFEKRTADGSEFESPKKKAKVE

SEQ ID NO: 108 - protein, 2090 aa, synthetic construct
MPAAKRVKLDGGDKKYSIGLDIGTNSVGWAVITDEYKVPSKKFKVLGNTDRHSIKKNLIGALLFDSGETAEATRLKRTARRRYTRRKNRICYLQEIFSNEMAKVDDSFFHRLEESFLVEEDKKHERHPIFGNIVDEVAYHEKYPTIYHLRKKLVDSTDKADLRLIYLALAHMIKFRGHFLIEGDLNPDNSDVDKLFIQLVQTYNQLFEENPINASGVDAKAILSARLSKSRRLENLIAQLPGEKKNGLFGNLIALSLGLTPNFKSNFDLAEDAKLQLSKDTYDDDLDNLLAQIGDQYADLFLAAKNLSDAILLSDILRVNTEITKAPLSASMIKRYDEHHQDLTLLKALVRQQLPEKYKEIFFDQSKNGYAGYIDGGASQEEFYKFIKPILEKMDGTEELLVKLNREDLLRKQRTFDNGSIPHQIHLGELHAILRRQEDFYPFLKDNREKIEKILTFRIPYYVGPLARGNSRFAWMTRKSEETITPWNFEEVVDKGASAQSFIERMTNFDKNLPNEKVLPKHSLLYEYFTVYNELTKVKYVTEGMRKPAFLSGEQKKAIVDLLFKTNRKVTVKQLKEDYFKKIECFDSVEISGVEDRFNASLGTYHDLLKIIKDKDFLDNEENEDILEDIVLTLTLFEDREMIEERLKTYAHLFDDKVMKQLKRRRYTGWGRLSRKLINGIRDKQSGKTILDFLKSDGFANRNFMQLIHDDSLTFKEDIQKAQVSGQGDSLHEHIANLAGSPAIKKGILQTVKVVDELVKVMGRHKPENIVIEMARENQTTQKGQKNSRERMKRIEEGIKELGSQILKEHPVENTQLQNEKLYLYYLQNGRDMYVDQELDINRLSDYDVDHIVPQSFLKDDSIDNKVLTRSDKARGKSDNVPSEEVVKKMKNYWRQLLNAKLITQRKFDNLTKAERGGLSELDKAGFIKRQLVETRQITKHVAQILDSRMNTKYDENDKLIREVKVITLKSKLVSDFRKDFQFYKVREINNYHHAHDAYLNAVVGTALIKKYPKLESEFVYGDYKVYDVRKMIAKSEQEIGKATAKYFFYSNIMNFFKTEITLANGEIRKRPLIETNGETGEIVWDKGRDFATVRKVLSMPQVNIVKKTEVQTGGFSKESILPKRNSDKLIARKKDWDPKKYGGFDSPTVAYSVLVVAKVEKGKSKKLKSVKELLGITIMERSSFEKNPIDFLEAKGYKEVKKDLIIKLPKYSLFELENGRKRMLASAGELQKGNELALPSKYVNFLYLASHYEKLKGSPEDNEQKQLFVEQHKHYLDEIIEQISEFSKRVILADANLDKVLSAYNKHRDKPIREQAENIIHLFTLTNLGAPAAFKYFDTTIDRKRYTSTKEVLDATLIHQSITGLYETRIDLSQLGGDGGGGGEAAAKPAPGGTLQLDDEYRLYSPLVKPDQNIQFWLEQFPQAWAETAGMGLAKQVPPQVIQLKASATPVSVRQYPLSKEAQEGIRPHVQRLIQQGILVPVQSPWNTPLLPVRKPGTNDYRPVQDLREVNKRVQDIHPTVPNPYNLLCALPPQRSWYTVLDLKDAFFCLRLHPTSQPLFAFEWRDPGTGRTGQLTWTRLPQGFKNSPTIFDEALHRDLANFRIQHPQVTLLQYVDDLLLAGATKQDCLEGTKALLLELSDLGYRASAKKAQICRREVTYLGYSLRDGQRWLTEARKKTVVQIPAPTTAKQVREFLGTAGFCRLWIPGFATLAAPLYPLTKEKGEFSWAPEHQKAFDAIKKALLSAPALALPDVTKPFTLYVDERKGVARGVLTQTLGPWRRPVAYLSKKLDPVASGWPVCLKAIAAVAILVKDADKLTLGQNITVIAPHALENIVRQPPDRWMTNARMTHYQSLLLTERVTFAPPAALNPATLLPEETDEPVTHDCHQLLIEETGVRKDLTDIPLTGEVLTWFTDGSSYVVEGKRMAGAAVVDGTRTIWASSLPEGTSAQKAELMALTQALRLAEGKSINIYTDSRYAFATAHVHGAIYKQRGLLTSAGREIKNKEEILSLLEALHLPKRLAIIHCPGHQKAKDPISRGNQMADRVAKQAAQGVNLLAGKRTADGSEFEKRTADGSEFESPKKKAKVE

SEQ ID NO: 109 - protein, 2085 aa, synthetic construct
MPAAKRVKLDGGDKKYSIGLDIGTNSVGWAVITDEYKVPSKKFKVLGNTDRHSIKKNLIGALLFDSGETAEATRLKRTARRRYTRRKNRICYLQEIFSNEMAKVDDSFFHRLEESFLVEEDKKHERHPIFGNIVDEVAYHEKYPTIYHLRKKLVDSTDKADLRLIYLALAHMIKFRGHFLIEGDLNPDNSDVDKLFIQLVQTYNQLFEENPINASGVDAKAILSARLSKSRRLENLIAQLPGEKKNGLFGNLIALSLGLTPNFKSNFDLAEDAKLQLSKDTYDDDLDNLLAQIGDQYADLFLAAKNLSDAILLSDILRVNTEITKAPLSASMIKRYDEHHQDLTLLKALVRQQLPEKYKEIFFDQSKNGYAGYIDGGASQEEFYKFIKPILEKMDGTEELLVKLNREDLLRKQRTFDNGSIPHQIHLGELHAILRRQEDFYPFLKDNREKIEKILTFRIPYYVGPLARGNSRFAWMTRKSEETITPWNFEEVVDKGASAQSFIERMTNFDKNLPNEKVLPKHSLLYEYFTVYNELTKVKYVTEGMRKPAFLSGEQKKAIVDLLFKTNRKVTVKQLKEDYFKKIECFDSVEISGVEDRFNASLGTYHDLLKIIKDKDFLDNEENEDILEDIVLTLTLFEDREMIEERLKTYAHLFDDKVMKQLKRRRYTGWGRLSRKLINGIRDKQSGKTILDFLKSDGFANRNFMQLIHDDSLTFKEDIQKAQVSGQGDSLHEHIANLAGSPAIKKGILQTVKVVDELVKVMGRHKPENIVIEMARENQTTQKGQKNSRERMKRIEEGIKELGSQILKEHPVENTQLQNEKLYLYYLQNGRDMYVDQELDINRLSDYDVDHIVPQSFLKDDSIDNKVLTRSDKARGKSDNVPSEEVVKKMKNYWRQLLNAKLITQRKFDNLTKAERGGLSELDKAGFIKRQLVETRQITKHVAQILDSRMNTKYDENDKLIREVKVITLKSKLVSDFRKDFQFYKVREINNYHHAHDAYLNAVVGTALIKKYPKLESEFVYGDYKVYDVRKMIAKSEQEIGKATAKYFFYSNIMNFFKTEITLANGEIRKRPLIETNGETGEIVWDKGRDFATVRKVLSMPQVNIVKKTEVQTGGFSKESILPKRNSDKLIARKKDWDPKKYGGFDSPTVAYSVLVVAKVEKGKSKKLKSVKELLGITIMERSSFEKNPIDFLEAKGYKEVKKDLIIKLPKYSLFELENGRKRMLASAGELQKGNELALPSKYVNFLYLASHYEKLKGSPEDNEQKQLFVEQHKHYLDEIIEQISEFSKRVILADANLDKVLSAYNKHRDKPIREQAENIIHLFTLTNLGAPAAFKYFDTTIDRKRYTSTKEVLDATLIHQSITGLYETRIDLSQLGGDGGGGSPAPGGTLQLDDEYRLYSPLVKPDQNIQFWLEQFPQAWAETAGMGLAKQVPPQVIQLKASATPVSVRQYPLSKEAQEGIRPHVQRLIQQGILVPVQSPWNTPLLPVRKPGTNDYRPVQDLREVNKRVQDIHPTVPNPYNLLCALPPQRSWYTVLDLKDAFFCLRLHPTSQPLFAFEWRDPGTGRTGQLTWTRLPQGFKNSPTIFDEALHRDLANFRIQHPQVTLLQYVDDLLLAGATKQDCLEGTKALLLELSDLGYRASAKKAQICRREVTYLGYSLRDGQRWLTEARKKTVVQIPAPTTAKQVREFLGTAGFCRLWIPGFATLAAPLYPLTKEKGEFSWAPEHQKAFDAIKKALLSAPALALPDVTKPFTLYVDERKGVARGVLTQTLGPWRRPVAYLSKKLDPVASGWPVCLKAIAAVAILVKDADKLTLGQNITVIAPHALENIVRQPPDRWMTNARMTHYQSLLLTERVTFAPPAALNPATLLPEETDEPVTHDCHQLLIEETGVRKDLTDIPLTGEVLTWFTDGSSYVVEGKRMAGAAVVDGTRTIWASSLPEGTSAQKAELMALTQALRLAEGKSINIYTDSRYAFATAHVHGAIYKQRGLLTSAGREIKNKEEILSLLEALHLPKRLAIIHCPGHQKAKDPISRGNQMADRVAKQAAQGVNLLAGKRTADGSEFEKRTADGSEFESPKKKAKVE

SEQ ID NO: 110 - protein, 2085 aa, synthetic construct
MPAAKRVKLDGGDKKYSIGLDIGTNSVGWAVITDEYKVPSKKFKVLGNTDRHSIKKNLIGALLFDSGETAEATRLKRTARRRYTRRKNRICYLQEIFSNEMAKVDDSFFHRLEESFLVEEDKKHERHPIFGNIVDEVAYHEKYPTIYHLRKKLVDSTDKADLRLIYLALAHMIKFRGHFLIEGDLNPDNSDVDKLFIQLVQTYNQLFEENPINASGVDAKAILSARLSKSRRLENLIAQLPGEKKNGLFGNLIALSLGLTPNFKSNFDLAEDAKLQLSKDTYDDDLDNLLAQIGDQYADLFLAAKNLSDAILLSDILRVNTEITKAPLSASMIKRYDEHHQDLTLLKALVRQQLPEKYKEIFFDQSKNGYAGYIDGGASQEEFYKFIKPILEKMDGTEELLVKLNREDLLRKQRTFDNGSIPHQIHLGELHAILRRQEDFYPFLKDNREKIEKILTFRIPYYVGPLARGNSRFAWMTRKSEETITPWNFEEVVDKGASAQSFIERMTNFDKNLPNEKVLPKHSLLYEYFTVYNELTKVKYVTEGMRKPAFLSGEQKKAIVDLLFKTNRKVTVKQLKEDYFKKIECFDSVEISGVEDRFNASLGTYHDLLKIIKDKDFLDNEENEDILEDIVLTLTLFEDREMIEERLKTYAHLFDDKVMKQLKRRRYTGWGRLSRKLINGIRDKQSGKTILDFLKSDGFANRNFMQLIHDDSLTFKEDIQKAQVSGQGDSLHEHIANLAGSPAIKKGILQTVKVVDELVKVMGRHKPENIVIEMARENQTTQKGQKNSRERMKRIEEGIKELGSQILKEHPVENTQLQNEKLYLYYLQNGRDMYVDQELDINRLSDYDVDHIVPQSFLKDDSIDNKVLTRSDKARGKSDNVPSEEVVKKMKNYWRQLLNAKLITQRKFDNLTKAERGGLSELDKAGFIKRQLVETRQITKHVAQILDSRMNTKYDENDKLIREVKVITLKSKLVSDFRKDFQFYKVREINNYHHAHDAYLNAVVGTALIKKYPKLESEFVYGDYKVYDVRKMIAKSEQEIGKATAKYFFYSNIMNFFKTEITLANGEIRKRPLIETNGETGEIVWDKGRDFATVRKVLSMPQVNIVKKTEVQTGGFSKESILPKRNSDKLIARKKDWDPKKYGGFDSPTVAYSVLVVAKVEKGKSKKLKSVKELLGITIMERSSFEKNPIDFLEAKGYKEVKKDLIIKLPKYSLFELENGRKRMLASAGELQKGNELALPSKYVNFLYLASHYEKLKGSPEDNEQKQLFVEQHKHYLDEIIEQISEFSKRVILADANLDKVLSAYNKHRDKPIREQAENIIHLFTLTNLGAPAAFKYFDTTIDRKRYTSTKEVLDATLIHQSITGLYETRIDLSQLGGDGGGSSGSSGGTLQLDDEYRLYSPLVKPDQNIQFWLEQFPQAWAETAGMGLAKQVPPQVIQLKASATPVSVRQYPLSKEAQEGIRPHVQRLIQQGILVPVQSPWNTPLLPVRKPGTNDYRPVQDLREVNKRVQDIHPTVPNPYNLLCALPPQRSWYTVLDLKDAFFCLRLHPTSQPLFAFEWRDPGTGRTGQLTWTRLPQGFKNSPTIFDEALHRDLANFRIQHPQVTLLQYVDDLLLAGATKQDCLEGTKALLLELSDLGYRASAKKAQICRREVTYLGYSLRDGQRWLTEARKKTVVQIPAPTTAKQVREFLGTAGFCRLWIPGFATLAAPLYPLTKEKGEFSWAPEHQKAFDAIKKALLSAPALALPDVTKPFTLYVDERKGVARGVLTQTLGPWRRPVAYLSKKLDPVASGWPVCLKAIAAVAILVKDADKLTLGQNITVIAPHALENIVRQPPDRWMTNARMTHYQSLLLTERVTFAPPAALNPATLLPEETDEPVTHDCHQLLIEETGVRKDLTDIPLTGEVLTWFTDGSSYVVEGKRMAGAAVVDGTRTIWASSLPEGTSAQKAELMALTQALRLAEGKSINIYTDSRYAFATAHVHGAIYKQRGLLTSAGREIKNKEEILSLLEALHLPKRLAIIHCPGHQKAKDPISRGNQMADRVAKQAAQGVNLLAGKRTADGSEFEKRTADGSEFESPKKKAKVE

SEQ ID NO: 111 - protein, 2091 aa, synthetic construct
MPAAKRVKLDGGDKKYSIGLDIGTNSVGWAVITDEYKVPSKKFKVLGNTDRHSIKKNLIGALLFDSGETAEATRLKRTARRRYTRRKNRICYLQEIFSNEMAKVDDSFFHRLEESFLVEEDKKHERHPIFGNIVDEVAYHEKYPTIYHLRKKLVDSTDKADLRLIYLALAHMIKFRGHFLIEGDLNPDNSDVDKLFIQLVQTYNQLFEENPINASGVDAKAILSARLSKSRRLENLIAQLPGEKKNGLFGNLIALSLGLTPNFKSNFDLAEDAKLQLSKDTYDDDLDNLLAQIGDQYADLFLAAKNLSDAILLSDILRVNTEITKAPLSASMIKRYDEHHQDLTLLKALVRQQLPEKYKEIFFDQSKNGYAGYIDGGASQEEFYKFIKPILEKMDGTEELLVKLNREDLLRKQRTFDNGSIPHQIHLGELHAILRRQEDFYPFLKDNREKIEKILTFRIPYYVGPLARGNSRFAWMTRKSEETITPWNFEEVVDKGASAQSFIERMTNFDKNLPNEKVLPKHSLLYEYFTVYNELTKVKYVTEGMRKPAFLSGEQKKAIVDLLFKTNRKVTVKQLKEDYFKKIECFDSVEISGVEDRFNASLGTYHDLLKIIKDKDFLDNEENEDILEDIVLTLTLFEDREMIEERLKTYAHLFDDKVMKQLKRRRYTGWGRLSRKLINGIRDKQSGKTILDFLKSDGFANRNFMQLIHDDSLTFKEDIQKAQVSGQGDSLHEHIANLAGSPAIKKGILQTVKVVDELVKVMGRHKPENIVIEMARENQTTQKGQKNSRERMKRIEEGIKELGSQILKEHPVENTQLQNEKLYLYYLQNGRDMYVDQELDINRLSDYDVDHIVPQSFLKDDSIDNKVLTRSDKARGKSDNVPSEEVVKKMKNYWRQLLNAKLITQRKFDNLTKAERGGLSELDKAGFIKRQLVETRQITKHVAQILDSRMNTKYDENDKLIREVKVITLKSKLVSDFRKDFQFYKVREINNYHHAHDAYLNAVVGTALIKKYPKLESEFVYGDYKVYDVRKMIAKSEQEIGKATAKYFFYSNIMNFFKTEITLANGEIRKRPLIETNGETGEIVWDKGRDFATVRKVLSMPQVNIVKKTEVQTGGFSKESILPKRNSDKLIARKKDWDPKKYGGFDSPTVAYSVLVVAKVEKGKSKKLKSVKELLGITIMERSSFEKNPIDFLEAKGYKEVKKDLIIKLPKYSLFELENGRKRMLASAGELQKGNELALPSKYVNFLYLASHYEKLKGSPEDNEQKQLFVEQHKHYLDEIIEQISEFSKRVILADANLDKVLSAYNKHRDKPIREQAENIIHLFTLTNLGAPAAFKYFDTTIDRKRYTSTKEVLDATLIHQSITGLYETRIDLSQLGGDGGGGSGGSGGSGGSGGTLQLDDEYRLYSPLVKPDQNIQFWLEQFPQAWAETAGMGLAKQVPPQVIQLKASATPVSVRQYPLSKEAQEGIRPHVQRLIQQGILVPVQSPWNTPLLPVRKPGTNDYRPVQDLREVNKRVQDIHPTVPNPYNLLCALPPQRSWYTVLDLKDAFFCLRLHPTSQPLFAFEWRDPGTGRTGQLTWTRLPQGFKNSPTIFDEALHRDLANFRIQHPQVTLLQYVDDLLLAGATKQDCLEGTKALLLELSDLGYRASAKKAQICRREVTYLGYSLRDGQRWLTEARKKTVVQIPAPTTAKQVREFLGTAGFCRLWIPGFATLAAPLYPLTKEKGEFSWAPEHQKAFDAIKKALLSAPALALPDVTKPFTLYVDERKGVARGVLTQTLGPWRRPVAYLSKKLDPVASGWPVCLKAIAAVAILVKDADKLTLGQNITVIAPHALENIVRQPPDRWMTNARMTHYQSLLLTERVTFAPPAALNPATLLPEETDEPVTHDCHQLLIEETGVRKDLTDIPLTGEVLTWFTDGSSYVVEGKRMAGAAVVDGTRTIWASSLPEGTSAQKAELMALTQALRLAEGKSINIYTDSRYAFATAHVHGAIYKQRGLLTSAGREIKNKEEILSLLEALHLPKRLAIIHCPGHQKAKDPISRGNQMADRVAKQAAQGVNLLAGKRTADGSEFEKRTADGSEFESPKKKAKVE

SEQ ID NO: 112 - protein, 2090 aa, synthetic construct
MPAAKRVKLDGGDKKYSIGLDIGTNSVGWAVITDEYKVPSKKFKVLGNTDRHSIKKNLIGALLFDSGETAEATRLKRTARRRYTRRKNRICYLQEIFSNEMAKVDDSFFHRLEESFLVEEDKKHERHPIFGNIVDEVAYHEKYPTIYHLRKKLVDSTDKADLRLIYLALAHMIKFRGHFLIEGDLNPDNSDVDKLFIQLVQTYNQLFEENPINASGVDAKAILSARLSKSRRLENLIAQLPGEKKNGLFGNLIALSLGLTPNFKSNFDLAEDAKLQLSKDTYDDDLDNLLAQIGDQYADLFLAAKNLSDAILLSDILRVNTEITKAPLSASMIKRYDEHHQDLTLLKALVRQQLPEKYKEIFFDQSKNGYAGYIDGGASQEEFYKFIKPILEKMDGTEELLVKLNREDLLRKQRTFDNGSIPHQIHLGELHAILRRQEDFYPFLKDNREKIEKILTFRIPYYVGPLARGNSRFAWMTRKSEETITPWNFEEVVDKGASAQSFIERMTNFDKNLPNEKVLPKHSLLYEYFTVYNELTKVKYVTEGMRKPAFLSGEQKKAIVDLLFKTNRKVTVKQLKEDYFKKIECFDSVEISGVEDRFNASLGTYHDLLKIIKDKDFLDNEENEDILEDIVLTLTLFEDREMIEERLKTYAHLFDDKVMKQLKRRRYTGWGRLSRKLINGIRDKQSGKTILDFLKSDGFANRNFMQLIHDDSLTFKEDIQKAQVSGQGDSLHEHIANLAGSPAIKKGILQTVKVVDELVKVMGRHKPENIVIEMARENQTTQKGQKNSRERMKRIEEGIKELGSQILKEHPVENTQLQNEKLYLYYLQNGRDMYVDQELDINRLSDYDVDHIVPQSFLKDDSIDNKVLTRSDKARGKSDNVPSEEVVKKMKNYWRQLLNAKLITQRKFDNLTKAERGGLSELDKAGFIKRQLVETRQITKHVAQILDSRMNTKYDENDKLIREVKVITLKSKLVSDFRKDFQFYKVREINNYHHAHDAYLNAVVGTALIKKYPKLESEFVYGDYKVYDVRKMIAKSEQEIGKATAKYFFYSNIMNFFKTEITLANGEIRKRPLIETNGETGEIVWDKGRDFATVRKVLSMPQVNIVKKTEVQTGGFSKESILPKRNSDKLIARKKDWDPKKYGGFDSPTVAYSVLVVAKVEKGKSKKLKSVKELLGITIMERSSFEKNPIDFLEAKGYKEVKKDLIIKLPKYSLFELENGRKRMLASAGELQKGNELALPSKYVNFLYLASHYEKLKGSPEDNEQKQLFVEQHKHYLDEIIEQISEFSKRVILADANLDKVLSAYNKHRDKPIREQAENIIHLFTLTNLGAPAAFKYFDTTIDRKRYTSTKEVLDATLIHQSITGLYETRIDLSQLGGDGGEAAAKGGGPAPGGTLQLDDEYRLYSPLVKPDQNIQFWLEQFPQAWAETAGMGLAKQVPPQVIQLKASATPVSVRQYPLSKEAQEGIRPHVQRLIQQGILVPVQSPWNTPLLPVRKPGTNDYRPVQDLREVNKRVQDIHPTVPNPYNLLCALPPQRSWYTVLDLKDAFFCLRLHPTSQPLFAFEWRDPGTGRTGQLTWTRLPQGFKNSPTIFDEALHRDLANFRIQHPQVTLLQYVDDLLLAGATKQDCLEGTKALLLELSDLGYRASAKKAQICRREVTYLGYSLRDGQRWLTEARKKTVVQIPAPTTAKQVREFLGTAGFCRLWIPGFATLAAPLYPLTKEKGEFSWAPEHQKAFDAIKKALLSAPALALPDVTKPFTLYVDERKGVARGVLTQTLGPWRRPVAYLSKKLDPVASGWPVCLKAIAAVAILVKDADKLTLGQNITVIAPHALENIVRQPPDRWMTNARMTHYQSLLLTERVTFAPPAALNPATLLPEETDEPVTHDCHQLLIEETGVRKDLTDIPLTGEVLTWFTDGSSYVVEGKRMAGAAVVDGTRTIWASSLPEGTSAQKAELMALTQALRLAEGKSINIYTDSRYAFATAHVHGAIYKQRGLLTSAGREIKNKEEILSLLEALHLPKRLAIIHCPGHQKAKDPISRGNQMADRVAKQAAQGVNLLAGKRTADGSEFEKRTADGSEFESPKKKAKVE

SEQ ID NO: 113 - protein, 2097 aa, synthetic construct
MPAAKRVKLDGGDKKYSIGLDIGTNSVGWAVITDEYKVPSKKFKVLGNTDRHSIKKNLIGALLFDSGETAEATRLKRTARRRYTRRKNRICYLQEIFSNEMAKVDDSFFHRLEESFLVEEDKKHERHPIFGNIVDEVAYHEKYPTIYHLRKKLVDSTDKADLRLIYLALAHMIKFRGHFLIEGDLNPDNSDVDKLFIQLVQTYNQLFEENPINASGVDAKAILSARLSKSRRLENLIAQLPGEKKNGLFGNLIALSLGLTPNFKSNFDLAEDAKLQLSKDTYDDDLDNLLAQIGDQYADLFLAAKNLSDAILLSDILRVNTEITKAPLSASMIKRYDEHHQDLTLLKALVRQQLPEKYKEIFFDQSKNGYAGYIDGGASQEEFYKFIKPILEKMDGTEELLVKLNREDLLRKQRTFDNGSIPHQIHLGELHAILRRQEDFYPFLKDNREKIEKILTFRIPYYVGPLARGNSRFAWMTRKSEETITPWNFEEVVDKGASAQSFIERMTNFDKNLPNEKVLPKHSLLYEYFTVYNELTKVKYVTEGMRKPAFLSGEQKKAIVDLLFKTNRKVTVKQLKEDYFKKIECFDSVEISGVEDRFNASLGTYHDLLKIIKDKDFLDNEENEDILEDIVLTLTLFEDREMIEERLKTYAHLFDDKVMKQLKRRRYTGWGRLSRKLINGIRDKQSGKTILDFLKSDGFANRNFMQLIHDDSLTFKEDIQKAQVSGQGDSLHEHIANLAGSPAIKKGILQTVKVVDELVKVMGRHKPENIVIEMARENQTTQKGQKNSRERMKRIEEGIKELGSQILKEHPVENTQLQNEKLYLYYLQNGRDMYVDQELDINRLSDYDVDHIVPQSFLKDDSIDNKVLTRSDKARGKSDNVPSEEVVKKMKNYWRQLLNAKLITQRKFDNLTKAERGGLSELDKAGFIKRQLVETRQITKHVAQILDSRMNTKYDENDKLIREVKVITLKSKLVSDFRKDFQFYKVREINNYHHAHDAYLNAVVGTALIKKYPKLESEFVYGDYKVYDVRKMIAKSEQEIGKATAKYFFYSNIMNFFKTEITLANGEIRKRPLIETNGETGEIVWDKGRDFATVRKVLSMPQVNIVKKTEVQTGGFSKESILPKRNSDKLIARKKDWDPKKYGGFDSPTVAYSVLVVAKVEKGKSKKLKSVKELLGITIMERSSFEKNPIDFLEAKGYKEVKKDLIIKLPKYSLFELENGRKRMLASAGELQKGNELALPSKYVNFLYLASHYEKLKGSPEDNEQKQLFVEQHKHYLDEIIEQISEFSKRVILADANLDKVLSAYNKHRDKPIREQAENIIHLFTLTNLGAPAAFKYFDTTIDRKRYTSTKEVLDATLIHQSITGLYETRIDLSQLGGDGGGSSGSSGSSGSSGSSGSSGGTLQLDDEYRLYSPLVKPDQNIQFWLEQFPQAWAETAGMGLAKQVPPQVIQLKASATPVSVRQYPLSKEAQEGIRPHVQRLIQQGILVPVQSPWNTPLLPVRKPGTNDYRPVQDLREVNKRVQDIHPTVPNPYNLLCALPPQRSWYTVLDLKDAFFCLRLHPTSQPLFAFEWRDPGTGRTGQLTWTRLPQGFKNSPTIFNEALHRDLANFRIQHPQVTLLQYVDDLLLAGATKQDCLEGTKALLLELSDLGYRASAKKAQICRREVTYLGYSLRDGQRWLTEARKKTVVQIPAPTTAKQVREFLGTAGFCRLWIPGFATLAAPLYPLTKPKGEFSWAPEHQKAFDAIKKALLSAPALALPDVTKPFTLYVDERKGVARGVLTQTLGPWRRPVAYLSKKLDPVASGWPVCLKAIAAVAILVKDADKLTLGQNITVIAPHALENIVRQPPDRWMTNARMTHYQSLLLTERVTFAPPAALNPATLLPEETDEPVTHDCHQLLIEETGVRKDLTDIPLTGEVLTWFTDGSSYVVEGKRMAGAAVVDGTRTIWASSLPEGTSAQKAELMALTQALRLAEGKSINIYTDSRYAFATAHVHGAIYKQRGWLTSAGREIKNKEEILSLLEALHLPKRLAIIHCPGHQKAKDPISRGNQMADRVAKQAAQGVNLLAGKRTADGSEFEKRTADGSEFESPKKKAKVE

SEQ ID NO: 114 - protein, 2087 aa, synthetic construct
MPAAKRVKLDGGDKKYSIGLDIGTNSVGWAVITDEYKVPSKKFKVLGNTDRHSIKKNLIGALLFDSGETAEATRLKRTARRRYTRRKNRICYLQEIFSNEMAKVDDSFFHRLEESFLVEEDKKHERHPIFGNIVDEVAYHEKYPTIYHLRKKLVDSTDKADLRLIYLALAHMIKFRGHFLIEGDLNPDNSDVDKLFIQLVQTYNQLFEENPINASGVDAKAILSARLSKSRRLENLIAQLPGEKKNGLFGNLIALSLGLTPNFKSNFDLAEDAKLQLSKDTYDDDLDNLLAQIGDQYADLFLAAKNLSDAILLSDILRVNTEITKAPLSASMIKRYDEHHQDLTLLKALVRQQLPEKYKEIFFDQSKNGYAGYIDGGASQEEFYKFIKPILEKMDGTEELLVKLNREDLLRKQRTFDNGSIPHQIHLGELHAILRRQEDFYPFLKDNREKIEKILTFRIPYYVGPLARGNSRFAWMTRKSEETITPWNFEEVVDKGASAQSFIERMTNFDKNLPNEKVLPKHSLLYEYFTVYNELTKVKYVTEGMRKPAFLSGEQKKAIVDLLFKTNRKVTVKQLKEDYFKKIECFDSVEISGVEDRFNASLGTYHDLLKIIKDKDFLDNEENEDILEDIVLTLTLFEDREMIEERLKTYAHLFDDKVMKQLKRRRYTGWGRLSRKLINGIRDKQSGKTILDFLKSDGFANRNFMQLIHDDSLTFKEDIQKAQVSGQGDSLHEHIANLAGSPAIKKGILQTVKVVDELVKVMGRHKPENIVIEMARENQTTQKGQKNSRERMKRIEEGIKELGSQILKEHPVENTQLQNEKLYLYYLQNGRDMYVDQELDINRLSDYDVDHIVPQSFLKDDSIDNKVLTRSDKARGKSDNVPSEEVVKKMKNYWRQLLNAKLITQRKFDNLTKAERGGLSELDKAGFIKRQLVETRQITKHVAQILDSRMNTKYDENDKLIREVKVITLKSKLVSDFRKDFQFYKVREINNYHHAHDAYLNAVVGTALIKKYPKLESEFVYGDYKVYDVRKMIAKSEQEIGKATAKYFFYSNIMNFFKTEITLANGEIRKRPLIETNGETGEIVWDKGRDFATVRKVLSMPQVNIVKKTEVQTGGFSKESILPKRNSDKLIARKKDWDPKKYGGFDSPTVAYSVLVVAKVEKGKSKKLKSVKELLGITIMERSSFEKNPIDFLEAKGYKEVKKDLIIKLPKYSLFELENGRKRMLASAGELQKGNELALPSKYVNFLYLASHYEKLKGSPEDNEQKQLFVEQHKHYLDEIIEQISEFSKRVILADANLDKVLSAYNKHRDKPIREQAENIIHLFTLTNLGAPAAFKYFDTTIDRKRYTSTKEVLDATLIHQSITGLYETRIDLSQLGGDGGGGGGGGGGGGTLQLDDEYRLYSPLVKPDQNIQFWLEQFPQAWAETAGMGLAKQVPPQVIQLKASATPVSVRQYPLSKEAQEGIRPHVQRLIQQGILVPVQSPWNTPLLPVRKPGTNDYRPVQDLREVNKRVQDIHPTVPNPYNLLCALPPQRSWYTVLDLKDAFFCLRLHPTSQPLFAFEWRDPGTGRTGQLTWTRLPQGFKNSPTIFNEALHRDLANFRIQHPQVTLLQYVDDLLLAGATKQDCLEGTKALLLELSDLGYRASAKKAQICRREVTYLGYSLRDGQRWLTEARKKTVVQIPAPTTAKQVREFLGTAGFCRLWIPGFATLAAPLYPLTKPKGEFSWAPEHQKAFDAIKKALLSAPALALPDVTKPFTLYVDERKGVARGVLTQTLGPWRRPVAYLSKKLDPVASGWPVCLKAIAAVAILVKDADKLTLGQNITVIAPHALENIVRQPPDRWMTNARMTHYQSLLLTERVTFAPPAALNPATLLPEETDEPVTHDCHQLLIEETGVRKDLTDIPLTGEVLTWFTDGSSYVVEGKRMAGAAVVDGTRTIWASSLPEGTSAQKAELMALTQALRLAEGKSINIYTDSRYAFATAHVHGAIYKQRGWLTSAGREIKNKEEILSLLEALHLPKRLAIIHCPGHQKAKDPISRGNQMADRVAKQAAQGVNLLAGKRTADGSEFEKRTADGSEFESPKKKAKVE

SEQ ID NO: 115 - protein, 2090 aa, synthetic construct
MPAAKRVKLDGGDKKYSIGLDIGTNSVGWAVITDEYKVPSKKFKVLGNTDRHSIKKNLIGALLFDSGETAEATRLKRTARRRYTRRKNRICYLQEIFSNEMAKVDDSFFHRLEESFLVEEDKKHERHPIFGNIVDEVAYHEKYPTIYHLRKKLVDSTDKADLRLIYLALAHMIKFRGHFLIEGDLNPDNSDVDKLFIQLVQTYNQLFEENPINASGVDAKAILSARLSKSRRLENLIAQLPGEKKNGLFGNLIALSLGLTPNFKSNFDLAEDAKLQLSKDTYDDDLDNLLAQIGDQYADLFLAAKNLSDAILLSDILRVNTEITKAPLSASMIKRYDEHHQDLTLLKALVRQQLPEKYKEIFFDQSKNGYAGYIDGGASQEEFYKFIKPILEKMDGTEELLVKLNREDLLRKQRTFDNGSIPHQIHLGELHAILRRQEDFYPFLKDNREKIEKILTFRIPYYVGPLARGNSRFAWMTRKSEETITPWNFEEVVDKGASAQSFIERMTNFDKNLPNEKVLPKHSLLYEYFTVYNELTKVKYVTEGMRKPAFLSGEQKKAIVDLLFKTNRKVTVKQLKEDYFKKIECFDSVEISGVEDRFNASLGTYHDLLKIIKDKDFLDNEENEDILEDIVLTLTLFEDREMIEERLKTYAHLFDDKVMKQLKRRRYTGWGRLSRKLINGIRDKQSGKTILDFLKSDGFANRNFMQLIHDDSLTFKEDIQKAQVSGQGDSLHEHIANLAGSPAIKKGILQTVKVVDELVKVMGRHKPENIVIEMARENQTTQKGQKNSRERMKRIEEGIKELGSQILKEHPVENTQLQNEKLYLYYLQNGRDMYVDQELDINRLSDYDVDHIVPQSFLKDDSIDNKVLTRSDKARGKSDNVPSEEVVKKMKNYWRQLLNAKLITQRKFDNLTKAERGGLSELDKAGFIKRQLVETRQITKHVAQILDSRMNTKYDENDKLIREVKVITLKSKLVSDFRKDFQFYKVREINNYHHAHDAYLNAVVGTALIKKYPKLESEFVYGDYKVYDVRKMIAKSEQEIGKATAKYFFYSNIMNFFKTEITLANGEIRKRPLIETNGETGEIVWDKGRDFATVRKVLSMPQVNIVKKTEVQTGGFSKESILPKRNSDKLIARKKDWDPKKYGGFDSPTVAYSVLVVAKVEKGKSKKLKSVKELLGITIMERSSFEKNPIDFLEAKGYKEVKKDLIIKLPKYSLFELENGRKRMLASAGELQKGNELALPSKYVNFLYLASHYEKLKGSPEDNEQKQLFVEQHKHYLDEIIEQISEFSKRVILADANLDKVLSAYNKHRDKPIREQAENIIHLFTLTNLGAPAAFKYFDTTIDRKRYTSTKEVLDATLIHQSITGLYETRIDLSQLGGDGGPAPAPAPAPAPGGTLQLDDEYRLYSPLVKPDQNIQFWLEQFPQAWAETAGMGLAKQVPPQVIQLKASATPVSVRQYPLSKEAQEGIRPHVQRLIQQGILVPVQSPWNTPLLPVRKPGTNDYRPVQDLREVNKRVQDIHPTVPNPYNLLCALPPQRSWYTVLDLKDAFFCLRLHPTSQPLFAFEWRDPGTGRTGQLTWTRLPQGFKNSPTIFNEALHRDLANFRIQHPQVTLLQYVDDLLLAGATKQDCLEGTKALLLELSDLGYRASAKKAQICRREVTYLGYSLRDGQRWLTEARKKTVVQIPAPTTAKQVREFLGTAGFCRLWIPGFATLAAPLYPLTKPKGEFSWAPEHQKAFDAIKKALLSAPALALPDVTKPFTLYVDERKGVARGVLTQTLGPWRRPVAYLSKKLDPVASGWPVCLKAIAAVAILVKDADKLTLGQNITVIAPHALENIVRQPPDRWMTNARMTHYQSLLLTERVTFAPPAALNPATLLPEETDEPVTHDCHQLLIEETGVRKDLTDIPLTGEVLTWFTDGSSYVVEGKRMAGAAVVDGTRTIWASSLPEGTSAQKAELMALTQALRLAEGKSINIYTDSRYAFATAHVHGAIYKQRGWLTSAGREIKNKEEILSLLEALHLPKRLAIIHCPGHQKAKDPISRGNQMADRVAKQAAQGVNLLAGKRTADGSEFEKRTADGSEFESPKKKAKVE

SEQ ID NO: 116 - protein, 2090 aa, synthetic construct
MPAAKRVKLDGGDKKYSIGLDIGTNSVGWAVITDEYKVPSKKFKVLGNTDRHSIKKNLIGALLFDSGETAEATRLKRTARRRYTRRKNRICYLQEIFSNEMAKVDDSFFHRLEESFLVEEDKKHERHPIFGNIVDEVAYHEKYPTIYHLRKKLVDSTDKADLRLIYLALAHMIKFRGHFLIEGDLNPDNSDVDKLFIQLVQTYNQLFEENPINASGVDAKAILSARLSKSRRLENLIAQLPGEKKNGLFGNLIALSLGLTPNFKSNFDLAEDAKLQLSKDTYDDDLDNLLAQIGDQYADLFLAAKNLSDAILLSDILRVNTEITKAPLSASMIKRYDEHHQDLTLLKALVRQQLPEKYKEIFFDQSKNGYAGYIDGGASQEEFYKFIKPILEKMDGTEELLVKLNREDLLRKQRTFDNGSIPHQIHLGELHAILRRQEDFYPFLKDNREKIEKILTFRIPYYVGPLARGNSRFAWMTRKSEETITPWNFEEVVDKGASAQSFIERMTNFDKNLPNEKVLPKHSLLYEYFTVYNELTKVKYVTEGMRKPAFLSGEQKKAIVDLLFKTNRKVTVKQLKEDYFKKIECFDSVEISGVEDRFNASLGTYHDLLKIIKDKDFLDNEENEDILEDIVLTLTLFEDREMIEERLKTYAHLFDDKVMKQLKRRRYTGWGRLSRKLINGIRDKQSGKTILDFLKSDGFANRNFMQLIHDDSLTFKEDIQKAQVSGQGDSLHEHIANLAGSPAIKKGILQTVKVVDELVKVMGRHKPENIVIEMARENQTTQKGQKNSRERMKRIEEGIKELGSQILKEHPVENTQLQNEKLYLYYLQNGRDMYVDQELDINRLSDYDVDHIVPQSFLKDDSIDNKVLTRSDKARGKSDNVPSEEVVKKMKNYWRQLLNAKLITQRKFDNLTKAERGGLSELDKAGFIKRQLVETRQITKHVAQILDSRMNTKYDENDKLIREVKVITLKSKLVSDFRKDFQFYKVREINNYHHAHDAYLNAVVGTALIKKYPKLESEFVYGDYKVYDVRKMIAKSEQEIGKATAKYFFYSNIMNFFKTEITLANGEIRKRPLIETNGETGEIVWDKGRDFATVRKVLSMPQVNIVKKTEVQTGGFSKESILPKRNSDKLIARKKDWDPKKYGGFDSPTVAYSVLVVAKVEKGKSKKLKSVKELLGITIMERSSFEKNPIDFLEAKGYKEVKKDLIIKLPKYSLFELENGRKRMLASAGELQKGNELALPSKYVNFLYLASHYEKLKGSPEDNEQKQLFVEQHKHYLDEIIEQISEFSKRVILADANLDKVLSAYNKHRDKPIREQAENIIHLFTLTNLGAPAAFKYFDTTIDRKRYTSTKEVLDATLIHQSITGLYETRIDLSQLGGDGGGSSEAAAKPAPGGTLQLDDEYRLYSPLVKPDQNIQFWLEQFPQAWAETAGMGLAKQVPPQVIQLKASATPVSVRQYPLSKEAQEGIRPHVQRLIQQGILVPVQSPWNTPLLPVRKPGTNDYRPVQDLREVNKRVQDIHPTVPNPYNLLCALPPQRSWYTVLDLKDAFFCLRLHPTSQPLFAFEWRDPGTGRTGQLTWTRLPQGFKNSPTIFNEALHRDLANFRIQHPQVTLLQYVDDLLLAGATKQDCLEGTKALLLELSDLGYRASAKKAQICRREVTYLGYSLRDGQRWLTEARKKTVVQIPAPTTAKQVREFLGTAGFCRLWIPGFATLAAPLYPLTKPKGEFSWAPEHQKAFDAIKKALLSAPALALPDVTKPFTLYVDERKGVARGVLTQTLGPWRRPVAYLSKKLDPVASGWPVCLKAIAAVAILVKDADKLTLGQNITVIAPHALENIVRQPPDRWMTNARMTHYQSLLLTERVTFAPPAALNPATLLPEETDEPVTHDCHQLLIEETGVRKDLTDIPLTGEVLTWFTDGSSYVVEGKRMAGAAVVDGTRTIWASSLPEGTSAQKAELMALTQALRLAEGKSINIYTDSRYAFATAHVHGAIYKQRGWLTSAGREIKNKEEILSLLEALHLPKRLAIIHCPGHQKAKDPISRGNQMADRVAKQAAQGVNLLAGKRTADGSEFEKRTADGSEFESPKKKAKVE

SEQ ID NO: 117 - protein, 2109 aa, synthetic construct
MPAAKRVKLDGGDKKYSIGLDIGTNSVGWAVITDEYKVPSKKFKVLGNTDRHSIKKNLIGALLFDSGETAEATRLKRTARRRYTRRKNRICYLQEIFSNEMAKVDDSFFHRLEESFLVEEDKKHERHPIFGNIVDEVAYHEKYPTIYHLRKKLVDSTDKADLRLIYLALAHMIKFRGHFLIEGDLNPDNSDVDKLFIQLVQTYNQLFEENPINASGVDAKAILSARLSKSRRLENLIAQLPGEKKNGLFGNLIALSLGLTPNFKSNFDLAEDAKLQLSKDTYDDDLDNLLAQIGDQYADLFLAAKNLSDAILLSDILRVNTEITKAPLSASMIKRYDEHHQDLTLLKALVRQQLPEKYKEIFFDQSKNGYAGYIDGGASQEEFYKFIKPILEKMDGTEELLVKLNREDLLRKQRTFDNGSIPHQIHLGELHAILRRQEDFYPFLKDNREKIEKILTFRIPYYVGPLARGNSRFAWMTRKSEETITPWNFEEVVDKGASAQSFIERMTNFDKNLPNEKVLPKHSLLYEYFTVYNELTKVKYVTEGMRKPAFLSGEQKKAIVDLLFKTNRKVTVKQLKEDYFKKIECFDSVEISGVEDRFNASLGTYHDLLKIIKDKDFLDNEENEDILEDIVLTLTLFEDREMIEERLKTYAHLFDDKVMKQLKRRRYTGWGRLSRKLINGIRDKQSGKTILDFLKSDGFANRNFMQLIHDDSLTFKEDIQKAQVSGQGDSLHEHIANLAGSPAIKKGILQTVKVVDELVKVMGRHKPENIVIEMARENQTTQKGQKNSRERMKRIEEGIKELGSQILKEHPVENTQLQNEKLYLYYLQNGRDMYVDQELDINRLSDYDVDHIVPQSFLKDDSIDNKVLTRSDKARGKSDNVPSEEVVKKMKNYWRQLLNAKLITQRKFDNLTKAERGGLSELDKAGFIKRQLVETRQITKHVAQILDSRMNTKYDENDKLIREVKVITLKSKLVSDFRKDFQFYKVREINNYHHAHDAYLNAVVGTALIKKYPKLESEFVYGDYKVYDVRKMIAKSEQEIGKATAKYFFYSNIMNFFKTEITLANGEIRKRPLIETNGETGEIVWDKGRDFATVRKVLSMPQVNIVKKTEVQTGGFSKESILPKRNSDKLIARKKDWDPKKYGGFDSPTVAYSVLVVAKVEKGKSKKLKSVKELLGITIMERSSFEKNPIDFLEAKGYKEVKKDLIIKLPKYSLFELENGRKRMLASAGELQKGNELALPSKYVNFLYLASHYEKLKGSPEDNEQKQLFVEQHKHYLDEIIEQISEFSKRVILADANLDKVLSAYNKHRDKPIREQAENIIHLFTLTNLGAPAAFKYFDTTIDRKRYTSTKEVLDATLIHQSITGLYETRIDLSQLGGDGGEAAAKEAAAKEAAAKEAAAKEAAAKEAAAKGGTLQLDDEYRLYSPLVKPDQNIQFWLEQFPQAWAETAGMGLAKQVPPQVIQLKASATPVSVRQYPLSKEAQEGIRPHVQRLIQQGILVPVQSPWNTPLLPVRKPGTNDYRPVQDLREVNKRVQDIHPTVPNPYNLLCALPPQRSWYTVLDLKDAFFCLRLHPTSQPLFAFEWRDPGTGRTGQLTWTRLPQGFKNSPTIFNEALHRDLANFRIQHPQVTLLQYVDDLLLAGATKQDCLEGTKALLLELSDLGYRASAKKAQICRREVTYLGYSLRDGQRWLTEARKKTVVQIPAPTTAKQVREFLGTAGFCRLWIPGFATLAAPLYPLTKPKGEFSWAPEHQKAFDAIKKALLSAPALALPDVTKPFTLYVDERKGVARGVLTQTLGPWRRPVAYLSKKLDPVASGWPVCLKAIAAVAILVKDADKLTLGQNITVIAPHALENIVRQPPDRWMTNARMTHYQSLLLTERVTFAPPAALNPATLLPEETDEPVTHDCHQLLIEETGVRKDLTDIPLTGEVLTWFTDGSSYVVEGKRMAGAAVVDGTRTIWASSLPEGTSAQKAELMALTQALRLAEGKSINIYTDSRYAFATAHVHGAIYKQRGWLTSAGREIKNKEEILSLLEALHLPKRLAIIHCPGHQKAKDPISRGNQMADRVAKQAAQGVNLLAGKRTADGSEFEKRTADGSEFESPKKKAKVE

SEQ ID NO: 118 - protein, 2094 aa, synthetic construct
MPAAKRVKLDGGDKKYSIGLDIGTNSVGWAVITDEYKVPSKKFKVLGNTDRHSIKKNLIGALLFDSGETAEATRLKRTARRRYTRRKNRICYLQEIFSNEMAKVDDSFFHRLEESFLVEEDKKHERHPIFGNIVDEVAYHEKYPTIYHLRKKLVDSTDKADLRLIYLALAHMIKFRGHFLIEGDLNPDNSDVDKLFIQLVQTYNQLFEENPINASGVDAKAILSARLSKSRRLENLIAQLPGEKKNGLFGNLIALSLGLTPNFKSNFDLAEDAKLQLSKDTYDDDLDNLLAQIGDQYADLFLAAKNLSDAILLSDILRVNTEITKAPLSASMIKRYDEHHQDLTLLKALVRQQLPEKYKEIFFDQSKNGYAGYIDGGASQEEFYKFIKPILEKMDGTEELLVKLNREDLLRKQRTFDNGSIPHQIHLGELHAILRRQEDFYPFLKDNREKIEKILTFRIPYYVGPLARGNSRFAWMTRKSEETITPWNFEEVVDKGASAQSFIERMTNFDKNLPNEKVLPKHSLLYEYFTVYNELTKVKYVTEGMRKPAFLSGEQKKAIVDLLFKTNRKVTVKQLKEDYFKKIECFDSVEISGVEDRFNASLGTYHDLLKIIKDKDFLDNEENEDILEDIVLTLTLFEDREMIEERLKTYAHLFDDKVMKQLKRRRYTGWGRLSRKLINGIRDKQSGKTILDFLKSDGFANRNFMQLIHDDSLTFKEDIQKAQVSGQGDSLHEHIANLAGSPAIKKGILQTVKVVDELVKVMGRHKPENIVIEMARENQTTQKGQKNSRERMKRIEEGIKELGSQILKEHPVENTQLQNEKLYLYYLQNGRDMYVDQELDINRLSDYDVDHIVPQSFLKDDSIDNKVLTRSDKARGKSDNVPSEEVVKKMKNYWRQLLNAKLITQRKFDNLTKAERGGLSELDKAGFIKRQLVETRQITKHVAQILDSRMNTKYDENDKLIREVKVITLKSKLVSDFRKDFQFYKVREINNYHHAHDAYLNAVVGTALIKKYPKLESEFVYGDYKVYDVRKMIAKSEQEIGKATAKYFFYSNIMNFFKTEITLANGEIRKRPLIETNGETGEIVWDKGRDFATVRKVLSMPQVNIVKKTEVQTGGFSKESILPKRNSDKLIARKKDWDPKKYGGFDSPTVAYSVLVVAKVEKGKSKKLKSVKELLGITIMERSSFEKNPIDFLEAKGYKEVKKDLIIKLPKYSLFELENGRKRMLASAGELQKGNELALPSKYVNFLYLASHYEKLKGSPEDNEQKQLFVEQHKHYLDEIIEQISEFSKRVILADANLDKVLSAYNKHRDKPIREQAENIIHLFTLTNLGAPAAFKYFDTTIDRKRYTSTKEVLDATLIHQSITGLYETRIDLSQLGGDGGGSSGSSGSSGSSGSSGGTLQLDDEYRLYSPLVKPDQNIQFWLEQFPQAWAETAGMGLAKQVPPQVIQLKASATPVSVRQYPLSKEAQEGIRPHVQRLIQQGILVPVQSPWNTPLLPVRKPGTNDYRPVQDLREVNKRVQDIHPTVPNPYNLLCALPPQRSWYTVLDLKDAFFCLRLHPTSQPLFAFEWRDPGTGRTGQLTWTRLPQGFKNSPTIFNEALHRDLANFRIQHPQVTLLQYVDDLLLAGATKQDCLEGTKALLLELSDLGYRASAKKAQICRREVTYLGYSLRDGQRWLTEARKKTVVQIPAPTTAKQVREFLGTAGFCRLWIPGFATLAAPLYPLTKPKGEFSWAPEHQKAFDAIKKALLSAPALALPDVTKPFTLYVDERKGVARGVLTQTLGPWRRPVAYLSKKLDPVASGWPVCLKAIAAVAILVKDADKLTLGQNITVIAPHALENIVRQPPDRWMTNARMTHYQSLLLTERVTFAPPAALNPATLLPEETDEPVTHDCHQLLIEETGVRKDLTDIPLTGEVLTWFTDGSSYVVEGKRMAGAAVVDGTRTIWASSLPEGTSAQKAELMALTQALRLAEGKSINIYTDSRYAFATAHVHGAIYKQRGWLTSAGREIKNKEEILSLLEALHLPKRLAIIHCPGHQKAKDPISRGNQMADRVAKQAAQGVNLLAGKRTADGSEFEKRTADGSEFESPKKKAKVE

SEQ ID NO: 119 - protein, 2090 aa, synthetic construct
MPAAKRVKLDGGDKKYSIGLDIGTNSVGWAVITDEYKVPSKKFKVLGNTDRHSIKKNLIGALLFDSGETAEATRLKRTARRRYTRRKNRICYLQEIFSNEMAKVDDSFFHRLEESFLVEEDKKHERHPIFGNIVDEVAYHEKYPTIYHLRKKLVDSTDKADLRLIYLALAHMIKFRGHFLIEGDLNPDNSDVDKLFIQLVQTYNQLFEENPINASGVDAKAILSARLSKSRRLENLIAQLPGEKKNGLFGNLIALSLGLTPNFKSNFDLAEDAKLQLSKDTYDDDLDNLLAQIGDQYADLFLAAKNLSDAILLSDILRVNTEITKAPLSASMIKRYDEHHQDLTLLKALVRQQLPEKYKEIFFDQSKNGYAGYIDGGASQEEFYKFIKPILEKMDGTEELLVKLNREDLLRKQRTFDNGSIPHQIHLGELHAILRRQEDFYPFLKDNREKIEKILTFRIPYYVGPLARGNSRFAWMTRKSEETITPWNFEEVVDKGASAQSFIERMTNFDKNLPNEKVLPKHSLLYEYFTVYNELTKVKYVTEGMRKPAFLSGEQKKAIVDLLFKTNRKVTVKQLKEDYFKKIECFDSVEISGVEDRFNASLGTYHDLLKIIKDKDFLDNEENEDILEDIVLTLTLFEDREMIEERLKTYAHLFDDKVMKQLKRRRYTGWGRLSRKLINGIRDKQSGKTILDFLKSDGFANRNFMQLIHDDSLTFKEDIQKAQVSGQGDSLHEHIANLAGSPAIKKGILQTVKVVDELVKVMGRHKPENIVIEMARENQTTQKGQKNSRERMKRIEEGIKELGSQILKEHPVENTQLQNEKLYLYYLQNGRDMYVDQELDINRLSDYDVDHIVPQSFLKDDSIDNKVLTRSDKARGKSDNVPSEEVVKKMKNYWRQLLNAKLITQRKFDNLTKAERGGLSELDKAGFIKRQLVETRQITKHVAQILDSRMNTKYDENDKLIREVKVITLKSKLVSDFRKDFQFYKVREINNYHHAHDAYLNAVVGTALIKKYPKLESEFVYGDYKVYDVRKMIAKSEQEIGKATAKYFFYSNIMNFFKTEITLANGEIRKRPLIETNGETGEIVWDKGRDFATVRKVLSMPQVNIVKKTEVQTGGFSKESILPKRNSDKLIARKKDWDPKKYGGFDSPTVAYSVLVVAKVEKGKSKKLKSVKELLGITIMERSSFEKNPIDFLEAKGYKEVKKDLIIKLPKYSLFELENGRKRMLASAGELQKGNELALPSKYVNFLYLASHYEKLKGSPEDNEQKQLFVEQHKHYLDEIIEQISEFSKRVILADANLDKVLSAYNKHRDKPIREQAENIIHLFTLTNLGAPAAFKYFDTTIDRKRYTSTKEVLDATLIHQSITGLYETRIDLSQLGGDGGEAAAKGSSGGSGGTLQLDDEYRLYSPLVKPDQNIQFWLEQFPQAWAETAGMGLAKQVPPQVIQLKASATPVSVRQYPLSKEAQEGIRPHVQRLIQQGILVPVQSPWNTPLLPVRKPGTNDYRPVQDLREVNKRVQDIHPTVPNPYNLLCALPPQRSWYTVLDLKDAFFCLRLHPTSQPLFAFEWRDPGTGRTGQLTWTRLPQGFKNSPTIFNEALHRDLANFRIQHPQVTLLQYVDDLLLAGATKQDCLEGTKALLLELSDLGYRASAKKAQICRREVTYLGYSLRDGQRWLTEARKKTVVQIPAPTTAKQVREFLGTAGFCRLWIPGFATLAAPLYPLTKPKGEFSWAPEHQKAFDAIKKALLSAPALALPDVTKPFTLYVDERKGVARGVLTQTLGPWRRPVAYLSKKLDPVASGWPVCLKAIAAVAILVKDADKLTLGQNITVIAPHALENIVRQPPDRWMTNARMTHYQSLLLTERVTFAPPAALNPATLLPEETDEPVTHDCHQLLIEETGVRKDLTDIPLTGEVLTWFTDGSSYVVEGKRMAGAAVVDGTRTIWASSLPEGTSAQKAELMALTQALRLAEGKSINIYTDSRYAFATAHVHGAIYKQRGWLTSAGREIKNKEEILSLLEALHLPKRLAIIHCPGHQKAKDPISRGNQMADRVAKQAAQGVNLLAGKRTADGSEFEKRTADGSEFESPKKKAKVE

SEQ ID NO: 120 - protein, 2082 aa, synthetic construct
MPAAKRVKLDGGDKKYSIGLDIGTNSVGWAVITDEYKVPSKKFKVLGNTDRHSIKKNLIGALLFDSGETAEATRLKRTARRRYTRRKNRICYLQEIFSNEMAKVDDSFFHRLEESFLVEEDKKHERHPIFGNIVDEVAYHEKYPTIYHLRKKLVDSTDKADLRLIYLALAHMIKFRGHFLIEGDLNPDNSDVDKLFIQLVQTYNQLFEENPINASGVDAKAILSARLSKSRRLENLIAQLPGEKKNGLFGNLIALSLGLTPNFKSNFDLAEDAKLQLSKDTYDDDLDNLLAQIGDQYADLFLAAKNLSDAILLSDILRVNTEITKAPLSASMIKRYDEHHQDLTLLKALVRQQLPEKYKEIFFDQSKNGYAGYIDGGASQEEFYKFIKPILEKMDGTEELLVKLNREDLLRKQRTFDNGSIPHQIHLGELHAILRRQEDFYPFLKDNREKIEKILTFRIPYYVGPLARGNSRFAWMTRKSEETITPWNFEEVVDKGASAQSFIERMTNFDKNLPNEKVLPKHSLLYEYFTVYNELTKVKYVTEGMRKPAFLSGEQKKAIVDLLFKTNRKVTVKQLKEDYFKKIECFDSVEISGVEDRFNASLGTYHDLLKIIKDKDFLDNEENEDILEDIVLTLTLFEDREMIEERLKTYAHLFDDKVMKQLKRRRYTGWGRLSRKLINGIRDKQSGKTILDFLKSDGFANRNFMQLIHDDSLTFKEDIQKAQVSGQGDSLHEHIANLAGSPAIKKGILQTVKVVDELVKVMGRHKPENIVIEMARENQTTQKGQKNSRERMKRIEEGIKELGSQILKEHPVENTQLQNEKLYLYYLQNGRDMYVDQELDINRLSDYDVDHIVPQSFLKDDSIDNKVLTRSDKARGKSDNVPSEEVVKKMKNYWRQLLNAKLITQRKFDNLTKAERGGLSELDKAGFIKRQLVETRQITKHVAQILDSRMNTKYDENDKLIREVKVITLKSKLVSDFRKDFQFYKVREINNYHHAHDAYLNAVVGTALIKKYPKLESEFVYGDYKVYDVRKMIAKSEQEIGKATAKYFFYSNIMNFFKTEITLANGEIRKRPLIETNGETGEIVWDKGRDFATVRKVLSMPQVNIVKKTEVQTGGFSKESILPKRNSDKLIARKKDWDPKKYGGFDSPTVAYSVLVVAKVEKGKSKKLKSVKELLGITIMERSSFEKNPIDFLEAKGYKEVKKDLIIKLPKYSLFELENGRKRMLASAGELQKGNELALPSKYVNFLYLASHYEKLKGSPEDNEQKQLFVEQHKHYLDEIIEQISEFSKRVILADANLDKVLSAYNKHRDKPIREQAENIIHLFTLTNLGAPAAFKYFDTTIDRKRYTSTKEVLDATLIHQSITGLYETRIDLSQLGGDGGGSSGGTLQLDDEYRLYSPLVKPDQNIQFWLEQFPQAWAETAGMGLAKQVPPQVIQLKASATPVSVRQYPLSKEAQEGIRPHVQRLIQQGILVPVQSPWNTPLLPVRKPGTNDYRPVQDLREVNKRVQDIHPTVPNPYNLLCALPPQRSWYTVLDLKDAFFCLRLHPTSQPLFAFEWRDPGTGRTGQLTWTRLPQGFKNSPTIFNEALHRDLANFRIQHPQVTLLQYVDDLLLAGATKQDCLEGTKALLLELSDLGYRASAKKAQICRREVTYLGYSLRDGQRWLTEARKKTVVQIPAPTTAKQVREFLGTAGFCRLWIPGFATLAAPLYPLTKPKGEFSWAPEHQKAFDAIKKALLSAPALALPDVTKPFTLYVDERKGVARGVLTQTLGPWRRPVAYLSKKLDPVASGWPVCLKAIAAVAILVKDADKLTLGQNITVIAPHALENIVRQPPDRWMTNARMTHYQSLLLTERVTFAPPAALNPATLLPEETDEPVTHDCHQLLIEETGVRKDLTDIPLTGEVLTWFTDGSSYVVEGKRMAGAAVVDGTRTIWASSLPEGTSAQKAELMALTQALRLAEGKSINIYTDSRYAFATAHVHGAIYKQRGWLTSAGREIKNKEEILSLLEALHLPKRLAIIHCPGHQKAKDPISRGNQMADRVAKQAAQGVNLLAGKRTADGSEFEKRTADGSEFESPKKKAKVE

SEQ ID NO: 121 - protein, 2090 aa, synthetic construct
MPAAKRVKLDGGDKKYSIGLDIGTNSVGWAVITDEYKVPSKKFKVLGNTDRHSIKKNLIGALLFDSGETAEATRLKRTARRRYTRRKNRICYLQEIFSNEMAKVDDSFFHRLEESFLVEEDKKHERHPIFGNIVDEVAYHEKYPTIYHLRKKLVDSTDKADLRLIYLALAHMIKFRGHFLIEGDLNPDNSDVDKLFIQLVQTYNQLFEENPINASGVDAKAILSARLSKSRRLENLIAQLPGEKKNGLFGNLIALSLGLTPNFKSNFDLAEDAKLQLSKDTYDDDLDNLLAQIGDQYADLFLAAKNLSDAILLSDILRVNTEITKAPLSASMIKRYDEHHQDLTLLKALVRQQLPEKYKEIFFDQSKNGYAGYIDGGASQEEFYKFIKPILEKMDGTEELLVKLNREDLLRKQRTFDNGSIPHQIHLGELHAILRRQEDFYPFLKDNREKIEKILTFRIPYYVGPLARGNSRFAWMTRKSEETITPWNFEEVVDKGASAQSFIERMTNFDKNLPNEKVLPKHSLLYEYFTVYNELTKVKYVTEGMRKPAFLSGEQKKAIVDLLFKTNRKVTVKQLKEDYFKKIECFDSVEISGVEDRFNASLGTYHDLLKIIKDKDFLDNEENEDILEDIVLTLTLFEDREMIEERLKTYAHLFDDKVMKQLKRRRYTGWGRLSRKLINGIRDKQSGKTILDFLKSDGFANRNFMQLIHDDSLTFKEDIQKAQVSGQGDSLHEHIANLAGSPAIKKGILQTVKVVDELVKVMGRHKPENIVIEMARENQTTQKGQKNSRERMKRIEEGIKELGSQILKEHPVENTQLQNEKLYLYYLQNGRDMYVDQELDINRLSDYDVDHIVPQSFLKDDSIDNKVLTRSDKARGKSDNVPSEEVVKKMKNYWRQLLNAKLITQRKFDNLTKAERGGLSELDKAGFIKRQLVETRQITKHVAQILDSRMNTKYDENDKLIREVKVITLKSKLVSDFRKDFQFYKVREINNYHHAHDAYLNAVVGTALIKKYPKLESEFVYGDYKVYDVRKMIAKSEQEIGKATAKYFFYSNIMNFFKTEITLANGEIRKRPLIETNGETGEIVWDKGRDFATVRKVLSMPQVNIVKKTEVQTGGFSKESILPKRNSDKLIARKKDWDPKKYGGFDSPTVAYSVLVVAKVEKGKSKKLKSVKELLGITIMERSSFEKNPIDFLEAKGYKEVKKDLIIKLPKYSLFELENGRKRMLASAGELQKGNELALPSKYVNFLYLASHYEKLKGSPEDNEQKQLFVEQHKHYLDEIIEQISEFSKRVILADANLDKVLSAYNKHRDKPIREQAENIIHLFTLTNLGAPAAFKYFDTTIDRKRYTSTKEVLDATLIHQSITGLYETRIDLSQLGGDGGGGGGSSEAAAKGGTLQLDDEYRLYSPLVKPDQNIQFWLEQFPQAWAETAGMGLAKQVPPQVIQLKASATPVSVRQYPLSKEAQEGIRPHVQRLIQQGILVPVQSPWNTPLLPVRKPGTNDYRPVQDLREVNKRVQDIHPTVPNPYNLLCALPPQRSWYTVLDLKDAFFCLRLHPTSQPLFAFEWRDPGTGRTGQLTWTRLPQGFKNSPTIFNEALHRDLANFRIQHPQVTLLQYVDDLLLAGATKQDCLEGTKALLLELSDLGYRASAKKAQICRREVTYLGYSLRDGQRWLTEARKKTVVQIPAPTTAKQVREFLGTAGFCRLWIPGFATLAAPLYPLTKPKGEFSWAPEHQKAFDAIKKALLSAPALALPDVTKPFTLYVDERKGVARGVLTQTLGPWRRPVAYLSKKLDPVASGWPVCLKAIAAVAILVKDADKLTLGQNITVIAPHALENIVRQPPDRWMTNARMTHYQSLLLTERVTFAPPAALNPATLLPEETDEPVTHDCHQLLIEETGVRKDLTDIPLTGEVLTWFTDGSSYVVEGKRMAGAAVVDGTRTIWASSLPEGTSAQKAELMALTQALRLAEGKSINIYTDSRYAFATAHVHGAIYKQRGWLTSAGREIKNKEEILSLLEALHLPKRLAIIHCPGHQKAKDPISRGNQMADRVAKQAAQGVNLLAGKRTADGSEFEKRTADGSEFESPKKKAKVE

SEQ ID NO: 122 - protein, 2095 aa, synthetic construct
MPAAKRVKLDGGDKKYSIGLDIGTNSVGWAVITDEYKVPSKKFKVLGNTDRHSIKKNLIGALLFDSGETAEATRLKRTARRRYTRRKNRICYLQEIFSNEMAKVDDSFFHRLEESFLVEEDKKHERHPIFGNIVDEVAYHEKYPTIYHLRKKLVDSTDKADLRLIYLALAHMIKFRGHFLIEGDLNPDNSDVDKLFIQLVQTYNQLFEENPINASGVDAKAILSARLSKSRRLENLIAQLPGEKKNGLFGNLIALSLGLTPNFKSNFDLAEDAKLQLSKDTYDDDLDNLLAQIGDQYADLFLAAKNLSDAILLSDILRVNTEITKAPLSASMIKRYDEHHQDLTLLKALVRQQLPEKYKEIFFDQSKNGYAGYIDGGASQEEFYKFIKPILEKMDGTEELLVKLNREDLLRKQRTFDNGSIPHQIHLGELHAILRRQEDFYPFLKDNREKIEKILTFRIPYYVGPLARGNSRFAWMTRKSEETITPWNFEEVVDKGASAQSFIERMTNFDKNLPNEKVLPKHSLLYEYFTVYNELTKVKYVTEGMRKPAFLSGEQKKAIVDLLFKTNRKVTVKQLKEDYFKKIECFDSVEISGVEDRFNASLGTYHDLLKIIKDKDFLDNEENEDILEDIVLTLTLFEDREMIEERLKTYAHLFDDKVMKQLKRRRYTGWGRLSRKLINGIRDKQSGKTILDFLKSDGFANRNFMQLIHDDSLTFKEDIQKAQVSGQGDSLHEHIANLAGSPAIKKGILQTVKVVDELVKVMGRHKPENIVIEMARENQTTQKGQKNSRERMKRIEEGIKELGSQILKEHPVENTQLQNEKLYLYYLQNGRDMYVDQELDINRLSDYDVDHIVPQSFLKDDSIDNKVLTRSDKARGKSDNVPSEEVVKKMKNYWRQLLNAKLITQRKFDNLTKAERGGLSELDKAGFIKRQLVETRQITKHVAQILDSRMNTKYDENDKLIREVKVITLKSKLVSDFRKDFQFYKVREINNYHHAHDAYLNAVVGTALIKKYPKLESEFVYGDYKVYDVRKMIAKSEQEIGKATAKYFFYSNIMNFFKTEITLANGEIRKRPLIETNGETGEIVWDKGRDFATVRKVLSMPQVNIVKKTEVQTGGFSKESILPKRNSDKLIARKKDWDPKKYGGFDSPTVAYSVLVVAKVEKGKSKKLKSVKELLGITIMERSSFEKNPIDFLEAKGYKEVKKDLIIKLPKYSLFELENGRKRMLASAGELQKGNELALPSKYVNFLYLASHYEKLKGSPEDNEQKQLFVEQHKHYLDEIIEQISEFSKRVILADANLDKVLSAYNKHRDKPIREQAENIIHLFTLTNLGAPAAFKYFDTTIDRKRYTSTKEVLDATLIHQSITGLYETRIDLSQLGGDGGSGSETPGTSESATPESGGTLQLDDEYRLYSPLVKPDQNIQFWLEQFPQAWAETAGMGLAKQVPPQVIQLKASATPVSVRQYPLSKEAQEGIRPHVQRLIQQGILVPVQSPWNTPLLPVRKPGTNDYRPVQDLREVNKRVQDIHPTVPNPYNLLCALPPQRSWYTVLDLKDAFFCLRLHPTSQPLFAFEWRDPGTGRTGQLTWTRLPQGFKNSPTIFNEALHRDLANFRIQHPQVTLLQYVDDLLLAGATKQDCLEGTKALLLELSDLGYRASAKKAQICRREVTYLGYSLRDGQRWLTEARKKTVVQIPAPTTAKQVREFLGTAGFCRLWIPGFATLAAPLYPLTKPKGEFSWAPEHQKAFDAIKKALLSAPALALPDVTKPFTLYVDERKGVARGVLTQTLGPWRRPVAYLSKKLDPVASGWPVCLKAIAAVAILVKDADKLTLGQNITVIAPHALENIVRQPPDRWMTNARMTHYQSLLLTERVTFAPPAALNPATLLPEETDEPVTHDCHQLLIEETGVRKDLTDIPLTGEVLTWFTDGSSYVVEGKRMAGAAVVDGTRTIWASSLPEGTSAQKAELMALTQALRLAEGKSINIYTDSRYAFATAHVHGAIYKQRGWLTSAGREIKNKEEILSLLEALHLPKRLAIIHCPGHQKAKDPISRGNQMADRVAKQAAQGVNLLAGKRTADGSEFEKRTADGSEFESPKKKAKVE

SEQ ID NO: 123 - protein, 2085 aa, synthetic construct
MPAAKRVKLDGGDKKYSIGLDIGTNSVGWAVITDEYKVPSKKFKVLGNTDRHSIKKNLIGALLFDSGETAEATRLKRTARRRYTRRKNRICYLQEIFSNEMAKVDDSFFHRLEESFLVEEDKKHERHPIFGNIVDEVAYHEKYPTIYHLRKKLVDSTDKADLRLIYLALAHMIKFRGHFLIEGDLNPDNSDVDKLFIQLVQTYNQLFEENPINASGVDAKAILSARLSKSRRLENLIAQLPGEKKNGLFGNLIALSLGLTPNFKSNFDLAEDAKLQLSKDTYDDDLDNLLAQIGDQYADLFLAAKNLSDAILLSDILRVNTEITKAPLSASMIKRYDEHHQDLTLLKALVRQQLPEKYKEIFFDQSKNGYAGYIDGGASQEEFYKFIKPILEKMDGTEELLVKLNREDLLRKQRTFDNGSIPHQIHLGELHAILRRQEDFYPFLKDNREKIEKILTFRIPYYVGPLARGNSRFAWMTRKSEETITPWNFEEVVDKGASAQSFIERMTNFDKNLPNEKVLPKHSLLYEYFTVYNELTKVKYVTEGMRKPAFLSGEQKKAIVDLLFKTNRKVTVKQLKEDYFKKIECFDSVEISGVEDRFNASLGTYHDLLKIIKDKDFLDNEENEDILEDIVLTLTLFEDREMIEERLKTYAHLFDDKVMKQLKRRRYTGWGRLSRKLINGIRDKQSGKTILDFLKSDGFANRNFMQLIHDDSLTFKEDIQKAQVSGQGDSLHEHIANLAGSPAIKKGILQTVKVVDELVKVMGRHKPENIVIEMARENQTTQKGQKNSRERMKRIEEGIKELGSQILKEHPVENTQLQNEKLYLYYLQNGRDMYVDQELDINRLSDYDVDHIVPQSFLKDDSIDNKVLTRSDKARGKSDNVPSEEVVKKMKNYWRQLLNAKLITQRKFDNLTKAERGGLSELDKAGFIKRQLVETRQITKHVAQILDSRMNTKYDENDKLIREVKVITLKSKLVSDFRKDFQFYKVREINNYHHAHDAYLNAVVGTALIKKYPKLESEFVYGDYKVYDVRKMIAKSEQEIGKATAKYFFYSNIMNFFKTEITLANGEIRKRPLIETNGETGEIVWDKGRDFATVRKVLSMPQVNIVKKTEVQTGGFSKESILPKRNSDKLIARKKDWDPKKYGGFDSPTVAYSVLVVAKVEKGKSKKLKSVKELLGITIMERSSFEKNPIDFLEAKGYKEVKKDLIIKLPKYSLFELENGRKRMLASAGELQKGNELALPSKYVNFLYLASHYEKLKGSPEDNEQKQLFVEQHKHYLDEIIEQISEFSKRVILADANLDKVLSAYNKHRDKPIREQAENIIHLFTLTNLGAPAAFKYFDTTIDRKRYTSTKEVLDATLIHQSITGLYETRIDLSQLGGDGGPAPGSSGGTLQLDDEYRLYSPLVKPDQNIQFWLEQFPQAWAETAGMGLAKQVPPQVIQLKASATPVSVRQYPLSKEAQEGIRPHVQRLIQQGILVPVQSPWNTPLLPVRKPGTNDYRPVQDLREVNKRVQDIHPTVPNPYNLLCALPPQRSWYTVLDLKDAFFCLRLHPTSQPLFAFEWRDPGTGRTGQLTWTRLPQGFKNSPTIFNEALHRDLANFRIQHPQVTLLQYVDDLLLAGATKQDCLEGTKALLLELSDLGYRASAKKAQICRREVTYLGYSLRDGQRWLTEARKKTVVQIPAPTTAKQVREFLGTAGFCRLWIPGFATLAAPLYPLTKPKGEFSWAPEHQKAFDAIKKALLSAPALALPDVTKPFTLYVDERKGVARGVLTQTLGPWRRPVAYLSKKLDPVASGWPVCLKAIAAVAILVKDADKLTLGQNITVIAPHALENIVRQPPDRWMTNARMTHYQSLLLTERVTFAPPAALNPATLLPEETDEPVTHDCHQLLIEETGVRKDLTDIPLTGEVLTWFTDGSSYVVEGKRMAGAAVVDGTRTIWASSLPEGTSAQKAELMALTQALRLAEGKSINIYTDSRYAFATAHVHGAIYKQRGWLTSAGREIKNKEEILSLLEALHLPKRLAIIHCPGHQKAKDPISRGNQMADRVAKQAAQGVNLLAGKRTADGSEFEKRTADGSEFESPKKKAKVE

SEQ ID NO: 124 - protein, 2090 aa, synthetic construct
MPAAKRVKLDGGDKKYSIGLDIGTNSVGWAVITDEYKVPSKKFKVLGNTDRHSIKKNLIGALLFDSGETAEATRLKRTARRRYTRRKNRICYLQEIFSNEMAKVDDSFFHRLEESFLVEEDKKHERHPIFGNIVDEVAYHEKYPTIYHLRKKLVDSTDKADLRLIYLALAHMIKFRGHFLIEGDLNPDNSDVDKLFIQLVQTYNQLFEENPINASGVDAKAILSARLSKSRRLENLIAQLPGEKKNGLFGNLIALSLGLTPNFKSNFDLAEDAKLQLSKDTYDDDLDNLLAQIGDQYADLFLAAKNLSDAILLSDILRVNTEITKAPLSASMIKRYDEHHQDLTLLKALVRQQLPEKYKEIFFDQSKNGYAGYIDGGASQEEFYKFIKPILEKMDGTEELLVKLNREDLLRKQRTFDNGSIPHQIHLGELHAILRRQEDFYPFLKDNREKIEKILTFRIPYYVGPLARGNSRFAWMTRKSEETITPWNFEEVVDKGASAQSFIERMTNFDKNLPNEKVLPKHSLLYEYFTVYNELTKVKYVTEGMRKPAFLSGEQKKAIVDLLFKTNRKVTVKQLKEDYFKKIECFDSVEISGVEDRFNASLGTYHDLLKIIKDKDFLDNEENEDILEDIVLTLTLFEDREMIEERLKTYAHLFDDKVMKQLKRRRYTGWGRLSRKLINGIRDKQSGKTILDFLKSDGFANRNFMQLIHDDSLTFKEDIQKAQVSGQGDSLHEHIANLAGSPAIKKGILQTVKVVDELVKVMGRHKPENIVIEMARENQTTQKGQKNSRERMKRIEEGIKELGSQILKEHPVENTQLQNEKLYLYYLQNGRDMYVDQELDINRLSDYDVDHIVPQSFLKDDSIDNKVLTRSDKARGKSDNVPSEEVVKKMKNYWRQLLNAKLITQRKFDNLTKAERGGLSELDKAGFIKRQLVETRQITKHVAQILDSRMNTKYDENDKLIREVKVITLKSKLVSDFRKDFQFYKVREINNYHHAHDAYLNAVVGTALIKKYPKLESEFVYGDYKVYDVRKMIAKSEQEIGKATAKYFFYSNIMNFFKTEITLANGEIRKRPLIETNGETGEIVWDKGRDFATVRKVLSMPQVNIVKKTEVQTGGFSKESILPKRNSDKLIARKKDWDPKKYGGFDSPTVAYSVLVVAKVEKGKSKKLKSVKELLGITIMERSSFEKNPIDFLEAKGYKEVKKDLIIKLPKYSLFELENGRKRMLASAGELQKGNELALPSKYVNFLYLASHYEKLKGSPEDNEQKQLFVEQHKHYLDEIIEQISEFSKRVILADANLDKVLSAYNKHRDKPIREQAENIIHLFTLTNLGAPAAFKYFDTTIDRKRYTSTKEVLDATLIHQSITGLYETRIDLSQLGGDGGPAPEAAAKGGGGGTLQLDDEYRLYSPLVKPDQNIQFWLEQFPQAWAETAGMGLAKQVPPQVIQLKASATPVSVRQYPLSKEAQEGIRPHVQRLIQQGILVPVQSPWNTPLLPVRKPGTNDYRPVQDLREVNKRVQDIHPTVPNPYNLLCALPPQRSWYTVLDLKDAFFCLRLHPTSQPLFAFEWRDPGTGRTGQLTWTRLPQGFKNSPTIFNEALHRDLANFRIQHPQVTLLQYVDDLLLAGATKQDCLEGTKALLLELSDLGYRASAKKAQICRREVTYLGYSLRDGQRWLTEARKKTVVQIPAPTTAKQVREFLGTAGFCRLWIPGFATLAAPLYPLTKPKGEFSWAPEHQKAFDAIKKALLSAPALALPDVTKPFTLYVDERKGVARGVLTQTLGPWRRPVAYLSKKLDPVASGWPVCLKAIAAVAILVKDADKLTLGQNITVIAPHALENIVRQPPDRWMTNARMTHYQSLLLTERVTFAPPAALNPATLLPEETDEPVTHDCHQLLIEETGVRKDLTDIPLTGEVLTWFTDGSSYVVEGKRMAGAAVVDGTRTIWASSLPEGTSAQKAELMALTQALRLAEGKSINIYTDSRYAFATAHVHGAIYKQRGWLTSAGREIKNKEEILSLLEALHLPKRLAIIHCPGHQKAKDPISRGNQMADRVAKQAAQGVNLLAGKRTADGSEFEKRTADGSEFESPKKKAKVE

SEQ ID NO: 125 - protein, 2085 aa, synthetic construct
MPAAKRVKLDGGDKKYSIGLDIGTNSVGWAVITDEYKVPSKKFKVLGNTDRHSIKKNLIGALLFDSGETAEATRLKRTARRRYTRRKNRICYLQEIFSNEMAKVDDSFFHRLEESFLVEEDKKHERHPIFGNIVDEVAYHEKYPTIYHLRKKLVDSTDKADLRLIYLALAHMIKFRGHFLIEGDLNPDNSDVDKLFIQLVQTYNQLFEENPINASGVDAKAILSARLSKSRRLENLIAQLPGEKKNGLFGNLIALSLGLTPNFKSNFDLAEDAKLQLSKDTYDDDLDNLLAQIGDQYADLFLAAKNLSDAILLSDILRVNTEITKAPLSASMIKRYDEHHQDLTLLKALVRQQLPEKYKEIFFDQSKNGYAGYIDGGASQEEFYKFIKPILEKMDGTEELLVKLNREDLLRKQRTFDNGSIPHQIHLGELHAILRRQEDFYPFLKDNREKIEKILTFRIPYYVGPLARGNSRFAWMTRKSEETITPWNFEEVVDKGASAQSFIERMTNFDKNLPNEKVLPKHSLLYEYFTVYNELTKVKYVTEGMRKPAFLSGEQKKAIVDLLFKTNRKVTVKQLKEDYFKKIECFDSVEISGVEDRFNASLGTYHDLLKIIKDKDFLDNEENEDILEDIVLTLTLFEDREMIEERLKTYAHLFDDKVMKQLKRRRYTGWGRLSRKLINGIRDKQSGKTILDFLKSDGFANRNFMQLIHDDSLTFKEDIQKAQVSGQGDSLHEHIANLAGSPAIKKGILQTVKVVDELVKVMGRHKPENIVIEMARENQTTQKGQKNSRERMKRIEEGIKELGSQILKEHPVENTQLQNEKLYLYYLQNGRDMYVDQELDINRLSDYDVDHIVPQSFLKDDSIDNKVLTRSDKARGKSDNVPSEEVVKKMKNYWRQLLNAKLITQRKFDNLTKAERGGLSELDKAGFIKRQLVETRQITKHVAQILDSRMNTKYDENDKLIREVKVITLKSKLVSDFRKDFQFYKVREINNYHHAHDAYLNAVVGTALIKKYPKLESEFVYGDYKVYDVRKMIAKSEQEIGKATAKYFFYSNIMNFFKTEITLANGEIRKRPLIETNGETGEIVWDKGRDFATVRKVLSMPQVNIVKKTEVQTGGFSKESILPKRNSDKLIARKKDWDPKKYGGFDSPTVAYSVLVVAKVEKGKSKKLKSVKELLGITIMERSSFEKNPIDFLEAKGYKEVKKDLIIKLPKYSLFELENGRKRMLASAGELQKGNELALPSKYVNFLYLASHYEKLKGSPEDNEQKQLFVEQHKHYLDEIIEQISEFSKRVILADANLDKVLSAYNKHRDKPIREQAENIIHLFTLTNLGAPAAFKYFDTTIDRKRYTSTKEVLDATLIHQSITGLYETRIDLSQLGGDGGPAPGGSGGTLQLDDEYRLYSPLVKPDQNIQFWLEQFPQAWAETAGMGLAKQVPPQVIQLKASATPVSVRQYPLSKEAQEGIRPHVQRLIQQGILVPVQSPWNTPLLPVRKPGTNDYRPVQDLREVNKRVQDIHPTVPNPYNLLCALPPQRSWYTVLDLKDAFFCLRLHPTSQPLFAFEWRDPGTGRTGQLTWTRLPQGFKNSPTIFNEALHRDLANFRIQHPQVTLLQYVDDLLLAGATKQDCLEGTKALLLELSDLGYRASAKKAQICRREVTYLGYSLRDGQRWLTEARKKTVVQIPAPTTAKQVREFLGTAGFCRLWIPGFATLAAPLYPLTKPKGEFSWAPEHQKAFDAIKKALLSAPALALPDVTKPFTLYVDERKGVARGVLTQTLGPWRRPVAYLSKKLDPVASGWPVCLKAIAAVAILVKDADKLTLGQNITVIAPHALENIVRQPPDRWMTNARMTHYQSLLLTERVTFAPPAALNPATLLPEETDEPVTHDCHQLLIEETGVRKDLTDIPLTGEVLTWFTDGSSYVVEGKRMAGAAVVDGTRTIWASSLPEGTSAQKAELMALTQALRLAEGKSINIYTDSRYAFATAHVHGAIYKQRGWLTSAGREIKNKEEILSLLEALHLPKRLAIIHCPGHQKAKDPISRGNQMADRVAKQAAQGVNLLAGKRTADGSEFEKRTADGSEFESPKKKAKVE

SEQ ID NO: 126 - protein, 2087 aa, synthetic construct
MPAAKRVKLDGGDKKYSIGLDIGTNSVGWAVITDEYKVPSKKFKVLGNTDRHSIKKNLIGALLFDSGETAEATRLKRTARRRYTRRKNRICYLQEIFSNEMAKVDDSFFHRLEESFLVEEDKKHERHPIFGNIVDEVAYHEKYPTIYHLRKKLVDSTDKADLRLIYLALAHMIKFRGHFLIEGDLNPDNSDVDKLFIQLVQTYNQLFEENPINASGVDAKAILSARLSKSRRLENLIAQLPGEKKNGLFGNLIALSLGLTPNFKSNFDLAEDAKLQLSKDTYDDDLDNLLAQIGDQYADLFLAAKNLSDAILLSDILRVNTEITKAPLSASMIKRYDEHHQDLTLLKALVRQQLPEKYKEIFFDQSKNGYAGYIDGGASQEEFYKFIKPILEKMDGTEELLVKLNREDLLRKQRTFDNGSIPHQIHLGELHAILRRQEDFYPFLKDNREKIEKILTFRIPYYVGPLARGNSRFAWMTRKSEETITPWNFEEVVDKGASAQSFIERMTNFDKNLPNEKVLPKHSLLYEYFTVYNELTKVKYVTEGMRKPAFLSGEQKKAIVDLLFKTNRKVTVKQLKEDYFKKIECFDSVEISGVEDRFNASLGTYHDLLKIIKDKDFLDNEENEDILEDIVLTLTLFEDREMIEERLKTYAHLFDDKVMKQLKRRRYTGWGRLSRKLINGIRDKQSGKTILDFLKSDGFANRNFMQLIHDDSLTFKEDIQKAQVSGQGDSLHEHIANLAGSPAIKKGILQTVKVVDELVKVMGRHKPENIVIEMARENQTTQKGQKNSRERMKRIEEGIKELGSQILKEHPVENTQLQNEKLYLYYLQNGRDMYVDQELDINRLSDYDVDHIVPQSFLKDDSIDNKVLTRSDKARGKSDNVPSEEVVKKMKNYWRQLLNAKLITQRKFDNLTKAERGGLSELDKAGFIKRQLVETRQITKHVAQILDSRMNTKYDENDKLIREVKVITLKSKLVSDFRKDFQFYKVREINNYHHAHDAYLNAVVGTALIKKYPKLESEFVYGDYKVYDVRKMIAKSEQEIGKATAKYFFYSNIMNFFKTEITLANGEIRKRPLIETNGETGEIVWDKGRDFATVRKVLSMPQVNIVKKTEVQTGGFSKESILPKRNSDKLIARKKDWDPKKYGGFDSPTVAYSVLVVAKVEKGKSKKLKSVKELLGITIMERSSFEKNPIDFLEAKGYKEVKKDLIIKLPKYSLFELENGRKRMLASAGELQKGNELALPSKYVNFLYLASHYEKLKGSPEDNEQKQLFVEQHKHYLDEIIEQISEFSKRVILADANLDKVLSAYNKHRDKPIREQAENIIHLFTLTNLGAPAAFKYFDTTIDRKRYTSTKEVLDATLIHQSITGLYETRIDLSQLGGDGGEAAAKGGGGGTLQLDDEYRLYSPLVKPDQNIQFWLEQFPQAWAETAGMGLAKQVPPQVIQLKASATPVSVRQYPLSKEAQEGIRPHVQRLIQQGILVPVQSPWNTPLLPVRKPGTNDYRPVQDLREVNKRVQDIHPTVPNPYNLLCALPPQRSWYTVLDLKDAFFCLRLHPTSQPLFAFEWRDPGTGRTGQLTWTRLPQGFKNSPTIFNEALHRDLANFRIQHPQVTLLQYVDDLLLAGATKQDCLEGTKALLLELSDLGYRASAKKAQICRREVTYLGYSLRDGQRWLTEARKKTVVQIPAPTTAKQVREFLGTAGFCRLWIPGFATLAAPLYPLTKPKGEFSWAPEHQKAFDAIKKALLSAPALALPDVTKPFTLYVDERKGVARGVLTQTLGPWRRPVAYLSKKLDPVASGWPVCLKAIAAVAILVKDADKLTLGQNITVIAPHALENIVRQPPDRWMTNARMTHYQSLLLTERVTFAPPAALNPATLLPEETDEPVTHDCHQLLIEETGVRKDLTDIPLTGEVLTWFTDGSSYVVEGKRMAGAAVVDGTRTIWASSLPEGTSAQKAELMALTQALRLAEGKSINIYTDSRYAFATAHVHGAIYKQRGWLTSAGREIKNKEEILSLLEALHLPKRLAIIHCPGHQKAKDPISRGNQMADRVAKQAAQGVNLLAGKRTADGSEFEKRTADGSEFESPKKKAKVE

SEQ ID NO: 127 - protein, 2090 aa, synthetic construct
MPAAKRVKLDGGDKKYSIGLDIGTNSVGWAVITDEYKVPSKKFKVLGNTDRHSIKKNLIGALLFDSGETAEATRLKRTARRRYTRRKNRICYLQEIFSNEMAKVDDSFFHRLEESFLVEEDKKHERHPIFGNIVDEVAYHEKYPTIYHLRKKLVDSTDKADLRLIYLALAHMIKFRGHFLIEGDLNPDNSDVDKLFIQLVQTYNQLFEENPINASGVDAKAILSARLSKSRRLENLIAQLPGEKKNGLFGNLIALSLGLTPNFKSNFDLAEDAKLQLSKDTYDDDLDNLLAQIGDQYADLFLAAKNLSDAILLSDILRVNTEITKAPLSASMIKRYDEHHQDLTLLKALVRQQLPEKYKEIFFDQSKNGYAGYIDGGASQEEFYKFIKPILEKMDGTEELLVKLNREDLLRKQRTFDNGSIPHQIHLGELHAILRRQEDFYPFLKDNREKIEKILTFRIPYYVGPLARGNSRFAWMTRKSEETITPWNFEEVVDKGASAQSFIERMTNFDKNLPNEKVLPKHSLLYEYFTVYNELTKVKYVTEGMRKPAFLSGEQKKAIVDLLFKTNRKVTVKQLKEDYFKKIECFDSVEISGVEDRFNASLGTYHDLLKIIKDKDFLDNEENEDILEDIVLTLTLFEDREMIEERLKTYAHLFDDKVMKQLKRRRYTGWGRLSRKLINGIRDKQSGKTILDFLKSDGFANRNFMQLIHDDSLTFKEDIQKAQVSGQGDSLHEHIANLAGSPAIKKGILQTVKVVDELVKVMGRHKPENIVIEMARENQTTQKGQKNSRERMKRIEEGIKELGSQILKEHPVENTQLQNEKLYLYYLQNGRDMYVDQELDINRLSDYDVDHIVPQSFLKDDSIDNKVLTRSDKARGKSDNVPSEEVVKKMKNYWRQLLNAKLITQRKFDNLTKAERGGLSELDKAGFIKRQLVETRQITKHVAQILDSRMNTKYDENDKLIREVKVITLKSKLVSDFRKDFQFYKVREINNYHHAHDAYLNAVVGTALIKKYPKLESEFVYGDYKVYDVRKMIAKSEQEIGKATAKYFFYSNIMNFFKTEITLANGEIRKRPLIETNGETGEIVWDKGRDFATVRKVLSMPQVNIVKKTEVQTGGFSKESILPKRNSDKLIARKKDWDPKKYGGFDSPTVAYSVLVVAKVEKGKSKKLKSVKELLGITIMERSSFEKNPIDFLEAKGYKEVKKDLIIKLPKYSLFELENGRKRMLASAGELQKGNELALPSKYVNFLYLASHYEKLKGSPEDNEQKQLFVEQHKHYLDEIIEQISEFSKRVILADANLDKVLSAYNKHRDKPIREQAENIIHLFTLTNLGAPAAFKYFDTTIDRKRYTSTKEVLDATLIHQSITGLYETRIDLSQLGGDGGPAPGGGEAAAKGGTLQLDDEYRLYSPLVKPDQNIQFWLEQFPQAWAETAGMGLAKQVPPQVIQLKASATPVSVRQYPLSKEAQEGIRPHVQRLIQQGILVPVQSPWNTPLLPVRKPGTNDYRPVQDLREVNKRVQDIHPTVPNPYNLLCALPPQRSWYTVLDLKDAFFCLRLHPTSQPLFAFEWRDPGTGRTGQLTWTRLPQGFKNSPTIFNEALHRDLANFRIQHPQVTLLQYVDDLLLAGATKQDCLEGTKALLLELSDLGYRASAKKAQICRREVTYLGYSLRDGQRWLTEARKKTVVQIPAPTTAKQVREFLGTAGFCRLWIPGFATLAAPLYPLTKPKGEFSWAPEHQKAFDAIKKALLSAPALALPDVTKPFTLYVDERKGVARGVLTQTLGPWRRPVAYLSKKLDPVASGWPVCLKAIAAVAILVKDADKLTLGQNITVIAPHALENIVRQPPDRWMTNARMTHYQSLLLTERVTFAPPAALNPATLLPEETDEPVTHDCHQLLIEETGVRKDLTDIPLTGEVLTWFTDGSSYVVEGKRMAGAAVVDGTRTIWASSLPEGTSAQKAELMALTQALRLAEGKSINIYTDSRYAFATAHVHGAIYKQRGWLTSAGREIKNKEEILSLLEALHLPKRLAIIHCPGHQKAKDPISRGNQMADRVAKQAAQGVNLLAGKRTADGSEFEKRTADGSEFESPKKKAKVE

SEQ ID NO: 128 - protein, 2087 aa, synthetic construct
MPAAKRVKLDGGDKKYSIGLDIGTNSVGWAVITDEYKVPSKKFKVLGNTDRHSIKKNLIGALLFDSGETAEATRLKRTARRRYTRRKNRICYLQEIFSNEMAKVDDSFFHRLEESFLVEEDKKHERHPIFGNIVDEVAYHEKYPTIYHLRKKLVDSTDKADLRLIYLALAHMIKFRGHFLIEGDLNPDNSDVDKLFIQLVQTYNQLFEENPINASGVDAKAILSARLSKSRRLENLIAQLPGEKKNGLFGNLIALSLGLTPNFKSNFDLAEDAKLQLSKDTYDDDLDNLLAQIGDQYADLFLAAKNLSDAILLSDILRVNTEITKAPLSASMIKRYDEHHQDLTLLKALVRQQLPEKYKEIFFDQSKNGYAGYIDGGASQEEFYKFIKPILEKMDGTEELLVKLNREDLLRKQRTFDNGSIPHQIHLGELHAILRRQEDFYPFLKDNREKIEKILTFRIPYYVGPLARGNSRFAWMTRKSEETITPWNFEEVVDKGASAQSFIERMTNFDKNLPNEKVLPKHSLLYEYFTVYNELTKVKYVTEGMRKPAFLSGEQKKAIVDLLFKTNRKVTVKQLKEDYFKKIECFDSVEISGVEDRFNASLGTYHDLLKIIKDKDFLDNEENEDILEDIVLTLTLFEDREMIEERLKTYAHLFDDKVMKQLKRRRYTGWGRLSRKLINGIRDKQSGKTILDFLKSDGFANRNFMQLIHDDSLTFKEDIQKAQVSGQGDSLHEHIANLAGSPAIKKGILQTVKVVDELVKVMGRHKPENIVIEMARENQTTQKGQKNSRERMKRIEEGIKELGSQILKEHPVENTQLQNEKLYLYYLQNGRDMYVDQELDINRLSDYDVDHIVPQSFLKDDSIDNKVLTRSDKARGKSDNVPSEEVVKKMKNYWRQLLNAKLITQRKFDNLTKAERGGLSELDKAGFIKRQLVETRQITKHVAQILDSRMNTKYDENDKLIREVKVITLKSKLVSDFRKDFQFYKVREINNYHHAHDAYLNAVVGTALIKKYPKLESEFVYGDYKVYDVRKMIAKSEQEIGKATAKYFFYSNIMNFFKTEITLANGEIRKRPLIETNGETGEIVWDKGRDFATVRKVLSMPQVNIVKKTEVQTGGFSKESILPKRNSDKLIARKKDWDPKKYGGFDSPTVAYSVLVVAKVEKGKSKKLKSVKELLGITIMERSSFEKNPIDFLEAKGYKEVKKDLIIKLPKYSLFELENGRKRMLASAGELQKGNELALPSKYVNFLYLASHYEKLKGSPEDNEQKQLFVEQHKHYLDEIIEQISEFSKRVILADANLDKVLSAYNKHRDKPIREQAENIIHLFTLTNLGAPAAFKYFDTTIDRKRYTSTKEVLDATLIHQSITGLYETRIDLSQLGGDGGGSSEAAAKGGTLQLDDEYRLYSPLVKPDQNIQFWLEQFPQAWAETAGMGLAKQVPPQVIQLKASATPVSVRQYPLSKEAQEGIRPHVQRLIQQGILVPVQSPWNTPLLPVRKPGTNDYRPVQDLREVNKRVQDIHPTVPNPYNLLCALPPQRSWYTVLDLKDAFFCLRLHPTSQPLFAFEWRDPGTGRTGQLTWTRLPQGFKNSPTIFNEALHRDLANFRIQHPQVTLLQYVDDLLLAGATKQDCLEGTKALLLELSDLGYRASAKKAQICRREVTYLGYSLRDGQRWLTEARKKTVVQIPAPTTAKQVREFLGTAGFCRLWIPGFATLAAPLYPLTKPKGEFSWAPEHQKAFDAIKKALLSAPALALPDVTKPFTLYVDERKGVARGVLTQTLGPWRRPVAYLSKKLDPVASGWPVCLKAIAAVAILVKDADKLTLGQNITVIAPHALENIVRQPPDRWMTNARMTHYQSLLLTERVTFAPPAALNPATLLPEETDEPVTHDCHQLLIEETGVRKDLTDIPLTGEVLTWFTDGSSYVVEGKRMAGAAVVDGTRTIWASSLPEGTSAQKAELMALTQALRLAEGKSINIYTDSRYAFATAHVHGAIYKQRGWLTSAGREIKNKEEILSLLEALHLPKRLAIIHCPGHQKAKDPISRGNQMADRVAKQAAQGVNLLAGKRTADGSEFEKRTADGSEFESPKKKAKVE

SEQ ID NO: 129 - protein, 2088 aa, synthetic construct
MPAAKRVKLDGGDKKYSIGLDIGTNSVGWAVITDEYKVPSKKFKVLGNTDRHSIKKNLIGALLFDSGETAEATRLKRTARRRYTRRKNRICYLQEIFSNEMAKVDDSFFHRLEESFLVEEDKKHERHPIFGNIVDEVAYHEKYPTIYHLRKKLVDSTDKADLRLIYLALAHMIKFRGHFLIEGDLNPDNSDVDKLFIQLVQTYNQLFEENPINASGVDAKAILSARLSKSRRLENLIAQLPGEKKNGLFGNLIALSLGLTPNFKSNFDLAEDAKLQLSKDTYDDDLDNLLAQIGDQYADLFLAAKNLSDAILLSDILRVNTEITKAPLSASMIKRYDEHHQDLTLLKALVRQQLPEKYKEIFFDQSKNGYAGYIDGGASQEEFYKFIKPILEKMDGTEELLVKLNREDLLRKQRTFDNGSIPHQIHLGELHAILRRQEDFYPFLKDNREKIEKILTFRIPYYVGPLARGNSRFAWMTRKSEETITPWNFEEVVDKGASAQSFIERMTNFDKNLPNEKVLPKHSLLYEYFTVYNELTKVKYVTEGMRKPAFLSGEQKKAIVDLLFKTNRKVTVKQLKEDYFKKIECFDSVEISGVEDRFNASLGTYHDLLKIIKDKDFLDNEENEDILEDIVLTLTLFEDREMIEERLKTYAHLFDDKVMKQLKRRRYTGWGRLSRKLINGIRDKQSGKTILDFLKSDGFANRNFMQLIHDDSLTFKEDIQKAQVSGQGDSLHEHIANLAGSPAIKKGILQTVKVVDELVKVMGRHKPENIVIEMARENQTTQKGQKNSRERMKRIEEGIKELGSQILKEHPVENTQLQNEKLYLYYLQNGRDMYVDQELDINRLSDYDVDHIVPQSFLKDDSIDNKVLTRSDKARGKSDNVPSEEVVKKMKNYWRQLLNAKLITQRKFDNLTKAERGGLSELDKAGFIKRQLVETRQITKHVAQILDSRMNTKYDENDKLIREVKVITLKSKLVSDFRKDFQFYKVREINNYHHAHDAYLNAVVGTALIKKYPKLESEFVYGDYKVYDVRKMIAKSEQEIGKATAKYFFYSNIMNFFKTEITLANGEIRKRPLIETNGETGEIVWDKGRDFATVRKVLSMPQVNIVKKTEVQTGGFSKESILPKRNSDKLIARKKDWDPKKYGGFDSPTVAYSVLVVAKVEKGKSKKLKSVKELLGITIMERSSFEKNPIDFLEAKGYKEVKKDLIIKLPKYSLFELENGRKRMLASAGELQKGNELALPSKYVNFLYLASHYEKLKGSPEDNEQKQLFVEQHKHYLDEIIEQISEFSKRVILADANLDKVLSAYNKHRDKPIREQAENIIHLFTLTNLGAPAAFKYFDTTIDRKRYTSTKEVLDATLIHQSITGLYETRIDLSQLGGDGGPAPGSSGGGGGTLQLDDEYRLYSPLVKPDQNIQFWLEQFPQAWAETAGMGLAKQVPPQVIQLKASATPVSVRQYPLSKEAQEGIRPHVQRLIQQGILVPVQSPWNTPLLPVRKPGTNDYRPVQDLREVNKRVQDIHPTVPNPYNLLCALPPQRSWYTVLDLKDAFFCLRLHPTSQPLFAFEWRDPGTGRTGQLTWTRLPQGFKNSPTIFNEALHRDLANFRIQHPQVTLLQYVDDLLLAGATKQDCLEGTKALLLELSDLGYRASAKKAQICRREVTYLGYSLRDGQRWLTEARKKTVVQIPAPTTAKQVREFLGTAGFCRLWIPGFATLAAPLYPLTKPKGEFSWAPEHQKAFDAIKKALLSAPALALPDVTKPFTLYVDERKGVARGVLTQTLGPWRRPVAYLSKKLDPVASGWPVCLKAIAAVAILVKDADKLTLGQNITVIAPHALENIVRQPPDRWMTNARMTHYQSLLLTERVTFAPPAALNPATLLPEETDEPVTHDCHQLLIEETGVRKDLTDIPLTGEVLTWFTDGSSYVVEGKRMAGAAVVDGTRTIWASSLPEGTSAQKAELMALTQALRLAEGKSINIYTDSRYAFATAHVHGAIYKQRGWLTSAGREIKNKEEILSLLEALHLPKRLAIIHCPGHQKAKDPISRGNQMADRVAKQAAQGVNLLAGKRTADGSEFEKRTADGSEFESPKKKAKVE

SEQ ID NO: 130 - protein, 2088 aa, synthetic construct
MPAAKRVKLDGGDKKYSIGLDIGTNSVGWAVITDEYKVPSKKFKVLGNTDRHSIKKNLIGALLFDSGETAEATRLKRTARRRYTRRKNRICYLQEIFSNEMAKVDDSFFHRLEESFLVEEDKKHERHPIFGNIVDEVAYHEKYPTIYHLRKKLVDSTDKADLRLIYLALAHMIKFRGHFLIEGDLNPDNSDVDKLFIQLVQTYNQLFEENPINASGVDAKAILSARLSKSRRLENLIAQLPGEKKNGLFGNLIALSLGLTPNFKSNFDLAEDAKLQLSKDTYDDDLDNLLAQIGDQYADLFLAAKNLSDAILLSDILRVNTEITKAPLSASMIKRYDEHHQDLTLLKALVRQQLPEKYKEIFFDQSKNGYAGYIDGGASQEEFYKFIKPILEKMDGTEELLVKLNREDLLRKQRTFDNGSIPHQIHLGELHAILRRQEDFYPFLKDNREKIEKILTFRIPYYVGPLARGNSRFAWMTRKSEETITPWNFEEVVDKGASAQSFIERMTNFDKNLPNEKVLPKHSLLYEYFTVYNELTKVKYVTEGMRKPAFLSGEQKKAIVDLLFKTNRKVTVKQLKEDYFKKIECFDSVEISGVEDRFNASLGTYHDLLKIIKDKDFLDNEENEDILEDIVLTLTLFEDREMIEERLKTYAHLFDDKVMKQLKRRRYTGWGRLSRKLINGIRDKQSGKTILDFLKSDGFANRNFMQLIHDDSLTFKEDIQKAQVSGQGDSLHEHIANLAGSPAIKKGILQTVKVVDELVKVMGRHKPENIVIEMARENQTTQKGQKNSRERMKRIEEGIKELGSQILKEHPVENTQLQNEKLYLYYLQNGRDMYVDQELDINRLSDYDVDHIVPQSFLKDDSIDNKVLTRSDKARGKSDNVPSEEVVKKMKNYWRQLLNAKLITQRKFDNLTKAERGGLSELDKAGFIKRQLVETRQITKHVAQILDSRMNTKYDENDKLIREVKVITLKSKLVSDFRKDFQFYKVREINNYHHAHDAYLNAVVGTALIKKYPKLESEFVYGDYKVYDVRKMIAKSEQEIGKATAKYFFYSNIMNFFKTEITLANGEIRKRPLIETNGETGEIVWDKGRDFATVRKVLSMPQVNIVKKTEVQTGGFSKESILPKRNSDKLIARKKDWDPKKYGGFDSPTVAYSVLVVAKVEKGKSKKLKSVKELLGITIMERSSFEKNPIDFLEAKGYKEVKKDLIIKLPKYSLFELENGRKRMLASAGELQKGNELALPSKYVNFLYLASHYEKLKGSPEDNEQKQLFVEQHKHYLDEIIEQISEFSKRVILADANLDKVLSAYNKHRDKPIREQAENIIHLFTLTNLGAPAAFKYFDTTIDRKRYTSTKEVLDATLIHQSITGLYETRIDLSQLGGDGGGGSGGSGGSGGTLQLDDEYRLYSPLVKPDQNIQFWLEQFPQAWAETAGMGLAKQVPPQVIQLKASATPVSVRQYPLSKEAQEGIRPHVQRLIQQGILVPVQSPWNTPLLPVRKPGTNDYRPVQDLREVNKRVQDIHPTVPNPYNLLCALPPQRSWYTVLDLKDAFFCLRLHPTSQPLFAFEWRDPGTGRTGQLTWTRLPQGFKNSPTIFNEALHRDLANFRIQHPQVTLLQYVDDLLLAGATKQDCLEGTKALLLELSDLGYRASAKKAQICRREVTYLGYSLRDGQRWLTEARKKTVVQIPAPTTAKQVREFLGTAGFCRLWIPGFATLAAPLYPLTKPKGEFSWAPEHQKAFDAIKKALLSAPALALPDVTKPFTLYVDERKGVARGVLTQTLGPWRRPVAYLSKKLDPVASGWPVCLKAIAAVAILVKDADKLTLGQNITVIAPHALENIVRQPPDRWMTNARMTHYQSLLLTERVTFAPPAALNPATLLPEETDEPVTHDCHQLLIEETGVRKDLTDIPLTGEVLTWFTDGSSYVVEGKRMAGAAVVDGTRTIWASSLPEGTSAQKAELMALTQALRLAEGKSINIYTDSRYAFATAHVHGAIYKQRGWLTSAGREIKNKEEILSLLEALHLPKRLAIIHCPGHQKAKDPISRGNQMADRVAKQAAQGVNLLAGKRTADGSEFEKRTADGSEFESPKKKAKVE

SEQ ID NO: 131 - protein, 2088 aa, synthetic construct
MPAAKRVKLDGGDKKYSIGLDIGTNSVGWAVITDEYKVPSKKFKVLGNTDRHSIKKNLIGALLFDSGETAEATRLKRTARRRYTRRKNRICYLQEIFSNEMAKVDDSFFHRLEESFLVEEDKKHERHPIFGNIVDEVAYHEKYPTIYHLRKKLVDSTDKADLRLIYLALAHMIKFRGHFLIEGDLNPDNSDVDKLFIQLVQTYNQLFEENPINASGVDAKAILSARLSKSRRLENLIAQLPGEKKNGLFGNLIALSLGLTPNFKSNFDLAEDAKLQLSKDTYDDDLDNLLAQIGDQYADLFLAAKNLSDAILLSDILRVNTEITKAPLSASMIKRYDEHHQDLTLLKALVRQQLPEKYKEIFFDQSKNGYAGYIDGGASQEEFYKFIKPILEKMDGTEELLVKLNREDLLRKQRTFDNGSIPHQIHLGELHAILRRQEDFYPFLKDNREKIEKILTFRIPYYVGPLARGNSRFAWMTRKSEETITPWNFEEVVDKGASAQSFIERMTNFDKNLPNEKVLPKHSLLYEYFTVYNELTKVKYVTEGMRKPAFLSGEQKKAIVDLLFKTNRKVTVKQLKEDYFKKIECFDSVEISGVEDRFNASLGTYHDLLKIIKDKDFLDNEENEDILEDIVLTLTLFEDREMIEERLKTYAHLFDDKVMKQLKRRRYTGWGRLSRKLINGIRDKQSGKTILDFLKSDGFANRNFMQLIHDDSLTFKEDIQKAQVSGQGDSLHEHIANLAGSPAIKKGILQTVKVVDELVKVMGRHKPENIVIEMARENQTTQKGQKNSRERMKRIEEGIKELGSQILKEHPVENTQLQNEKLYLYYLQNGRDMYVDQELDINRLSDYDVDHIVPQSFLKDDSIDNKVLTRSDKARGKSDNVPSEEVVKKMKNYWRQLLNAKLITQRKFDNLTKAERGGLSELDKAGFIKRQLVETRQITKHVAQILDSRMNTKYDENDKLIREVKVITLKSKLVSDFRKDFQFYKVREINNYHHAHDAYLNAVVGTALIKKYPKLESEFVYGDYKVYDVRKMIAKSEQEIGKATAKYFFYSNIMNFFKTEITLANGEIRKRPLIETNGETGEIVWDKGRDFATVRKVLSMPQVNIVKKTEVQTGGFSKESILPKRNSDKLIARKKDWDPKKYGGFDSPTVAYSVLVVAKVEKGKSKKLKSVKELLGITIMERSSFEKNPIDFLEAKGYKEVKKDLIIKLPKYSLFELENGRKRMLASAGELQKGNELALPSKYVNFLYLASHYEKLKGSPEDNEQKQLFVEQHKHYLDEIIEQISEFSKRVILADANLDKVLSAYNKHRDKPIREQAENIIHLFTLTNLGAPAAFKYFDTTIDRKRYTSTKEVLDATLIHQSITGLYETRIDLSQLGGDGGGGSPAPGGGGGTLQLDDEYRLYSPLVKPDQNIQFWLEQFPQAWAETAGMGLAKQVPPQVIQLKASATPVSVRQYPLSKEAQEGIRPHVQRLIQQGILVPVQSPWNTPLLPVRKPGTNDYRPVQDLREVNKRVQDIHPTVPNPYNLLCALPPQRSWYTVLDLKDAFFCLRLHPTSQPLFAFEWRDPGTGRTGQLTWTRLPQGFKNSPTIFNEALHRDLANFRIQHPQVTLLQYVDDLLLAGATKQDCLEGTKALLLELSDLGYRASAKKAQICRREVTYLGYSLRDGQRWLTEARKKTVVQIPAPTTAKQVREFLGTAGFCRLWIPGFATLAAPLYPLTKPKGEFSWAPEHQKAFDAIKKALLSAPALALPDVTKPFTLYVDERKGVARGVLTQTLGPWRRPVAYLSKKLDPVASGWPVCLKAIAAVAILVKDADKLTLGQNITVIAPHALENIVRQPPDRWMTNARMTHYQSLLLTERVTFAPPAALNPATLLPEETDEPVTHDCHQLLIEETGVRKDLTDIPLTGEVLTWFTDGSSYVVEGKRMAGAAVVDGTRTIWASSLPEGTSAQKAELMALTQALRLAEGKSINIYTDSRYAFATAHVHGAIYKQRGWLTSAGREIKNKEEILSLLEALHLPKRLAIIHCPGHQKAKDPISRGNQMADRVAKQAAQGVNLLAGKRTADGSEFEKRTADGSEFESPKKKAKVE

SEQ ID NO: 132 - protein, 2090 aa, synthetic construct
MPAAKRVKLDGGDKKYSIGLDIGTNSVGWAVITDEYKVPSKKFKVLGNTDRHSIKKNLIGALLFDSGETAEATRLKRTARRRYTRRKNRICYLQEIFSNEMAKVDDSFFHRLEESFLVEEDKKHERHPIFGNIVDEVAYHEKYPTIYHLRKKLVDSTDKADLRLIYLALAHMIKFRGHFLIEGDLNPDNSDVDKLFIQLVQTYNQLFEENPINASGVDAKAILSARLSKSRRLENLIAQLPGEKKNGLFGNLIALSLGLTPNFKSNFDLAEDAKLQLSKDTYDDDLDNLLAQIGDQYADLFLAAKNLSDAILLSDILRVNTEITKAPLSASMIKRYDEHHQDLTLLKALVRQQLPEKYKEIFFDQSKNGYAGYIDGGASQEEFYKFIKPILEKMDGTEELLVKLNREDLLRKQRTFDNGSIPHQIHLGELHAILRRQEDFYPFLKDNREKIEKILTFRIPYYVGPLARGNSRFAWMTRKSEETITPWNFEEVVDKGASAQSFIERMTNFDKNLPNEKVLPKHSLLYEYFTVYNELTKVKYVTEGMRKPAFLSGEQKKAIVDLLFKTNRKVTVKQLKEDYFKKIECFDSVEISGVEDRFNASLGTYHDLLKIIKDKDFLDNEENEDILEDIVLTLTLFEDREMIEERLKTYAHLFDDKVMKQLKRRRYTGWGRLSRKLINGIRDKQSGKTILDFLKSDGFANRNFMQLIHDDSLTFKEDIQKAQVSGQGDSLHEHIANLAGSPAIKKGILQTVKVVDELVKVMGRHKPENIVIEMARENQTTQKGQKNSRERMKRIEEGIKELGSQILKEHPVENTQLQNEKLYLYYLQNGRDMYVDQELDINRLSDYDVDHIVPQSFLKDDSIDNKVLTRSDKARGKSDNVPSEEVVKKMKNYWRQLLNAKLITQRKFDNLTKAERGGLSELDKAGFIKRQLVETRQITKHVAQILDSRMNTKYDENDKLIREVKVITLKSKLVSDFRKDFQFYKVREINNYHHAHDAYLNAVVGTALIKKYPKLESEFVYGDYKVYDVRKMIAKSEQEIGKATAKYFFYSNIMNFFKTEITLANGEIRKRPLIETNGETGEIVWDKGRDFATVRKVLSMPQVNIVKKTEVQTGGFSKESILPKRNSDKLIARKKDWDPKKYGGFDSPTVAYSVLVVAKVEKGKSKKLKSVKELLGITIMERSSFEKNPIDFLEAKGYKEVKKDLIIKLPKYSLFELENGRKRMLASAGELQKGNELALPSKYVNFLYLASHYEKLKGSPEDNEQKQLFVEQHKHYLDEIIEQISEFSKRVILADANLDKVLSAYNKHRDKPIREQAENIIHLFTLTNLGAPAAFKYFDTTIDRKRYTSTKEVLDATLIHQSITGLYETRIDLSQLGGDGGPAPEAAAKGSSGGTLQLDDEYRLYSPLVKPDQNIQFWLEQFPQAWAETAGMGLAKQVPPQVIQLKASATPVSVRQYPLSKEAQEGIRPHVQRLIQQGILVPVQSPWNTPLLPVRKPGTNDYRPVQDLREVNKRVQDIHPTVPNPYNLLCALPPQRSWYTVLDLKDAFFCLRLHPTSQPLFAFEWRDPGTGRTGQLTWTRLPQGFKNSPTIFNEALHRDLANFRIQHPQVTLLQYVDDLLLAGATKQDCLEGTKALLLELSDLGYRASAKKAQICRREVTYLGYSLRDGQRWLTEARKKTVVQIPAPTTAKQVREFLGTAGFCRLWIPGFATLAAPLYPLTKPKGEFSWAPEHQKAFDAIKKALLSAPALALPDVTKPFTLYVDERKGVARGVLTQTLGPWRRPVAYLSKKLDPVASGWPVCLKAIAAVAILVKDADKLTLGQNITVIAPHALENIVRQPPDRWMTNARMTHYQSLLLTERVTFAPPAALNPATLLPEETDEPVTHDCHQLLIEETGVRKDLTDIPLTGEVLTWFTDGSSYVVEGKRMAGAAVVDGTRTIWASSLPEGTSAQKAELMALTQALRLAEGKSINIYTDSRYAFATAHVHGAIYKQRGWLTSAGREIKNKEEILSLLEALHLPKRLAIIHCPGHQKAKDPISRGNQMADRVAKQAAQGVNLLAGKRTADGSEFEKRTADGSEFESPKKKAKVE

SEQ ID NO: 133 - protein, 2090 aa, synthetic construct
MPAAKRVKLDGGDKKYSIGLDIGTNSVGWAVITDEYKVPSKKFKVLGNTDRHSIKKNLIGALLFDSGETAEATRLKRTARRRYTRRKNRICYLQEIFSNEMAKVDDSFFHRLEESFLVEEDKKHERHPIFGNIVDEVAYHEKYPTIYHLRKKLVDSTDKADLRLIYLALAHMIKFRGHFLIEGDLNPDNSDVDKLFIQLVQTYNQLFEENPINASGVDAKAILSARLSKSRRLENLIAQLPGEKKNGLFGNLIALSLGLTPNFKSNFDLAEDAKLQLSKDTYDDDLDNLLAQIGDQYADLFLAAKNLSDAILLSDILRVNTEITKAPLSASMIKRYDEHHQDLTLLKALVRQQLPEKYKEIFFDQSKNGYAGYIDGGASQEEFYKFIKPILEKMDGTEELLVKLNREDLLRKQRTFDNGSIPHQIHLGELHAILRRQEDFYPFLKDNREKIEKILTFRIPYYVGPLARGNSRFAWMTRKSEETITPWNFEEVVDKGASAQSFIERMTNFDKNLPNEKVLPKHSLLYEYFTVYNELTKVKYVTEGMRKPAFLSGEQKKAIVDLLFKTNRKVTVKQLKEDYFKKIECFDSVEISGVEDRFNASLGTYHDLLKIIKDKDFLDNEENEDILEDIVLTLTLFEDREMIEERLKTYAHLFDDKVMKQLKRRRYTGWGRLSRKLINGIRDKQSGKTILDFLKSDGFANRNFMQLIHDDSLTFKEDIQKAQVSGQGDSLHEHIANLAGSPAIKKGILQTVKVVDELVKVMGRHKPENIVIEMARENQTTQKGQKNSRERMKRIEEGIKELGSQILKEHPVENTQLQNEKLYLYYLQNGRDMYVDQELDINRLSDYDVDHIVPQSFLKDDSIDNKVLTRSDKARGKSDNVPSEEVVKKMKNYWRQLLNAKLITQRKFDNLTKAERGGLSELDKAGFIKRQLVETRQITKHVAQILDSRMNTKYDENDKLIREVKVITLKSKLVSDFRKDFQFYKVREINNYHHAHDAYLNAVVGTALIKKYPKLESEFVYGDYKVYDVRKMIAKSEQEIGKATAKYFFYSNIMNFFKTEITLANGEIRKRPLIETNGETGEIVWDKGRDFATVRKVLSMPQVNIVKKTEVQTGGFSKESILPKRNSDKLIARKKDWDPKKYGGFDSPTVAYSVLVVAKVEKGKSKKLKSVKELLGITIMERSSFEKNPIDFLEAKGYKEVKKDLIIKLPKYSLFELENGRKRMLASAGELQKGNELALPSKYVNFLYLASHYEKLKGSPEDNEQKQLFVEQHKHYLDEIIEQISEFSKRVILADANLDKVLSAYNKHRDKPIREQAENIIHLFTLTNLGAPAAFKYFDTTIDRKRYTSTKEVLDATLIHQSITGLYETRIDLSQLGGDGGGSSEAAAKGGGGGTLQLDDEYRLYSPLVKPDQNIQFWLEQFPQAWAETAGMGLAKQVPPQVIQLKASATPVSVRQYPLSKEAQEGIRPHVQRLIQQGILVPVQSPWNTPLLPVRKPGTNDYRPVQDLREVNKRVQDIHPTVPNPYNLLCALPPQRSWYTVLDLKDAFFCLRLHPTSQPLFAFEWRDPGTGRTGQLTWTRLPQGFKNSPTIFNEALHRDLANFRIQHPQVTLLQYVDDLLLAGATKQDCLEGTKALLLELSDLGYRASAKKAQICRREVTYLGYSLRDGQRWLTEARKKTVVQIPAPTTAKQVREFLGTAGFCRLWIPGFATLAAPLYPLTKPKGEFSWAPEHQKAFDAIKKALLSAPALALPDVTKPFTLYVDERKGVARGVLTQTLGPWRRPVAYLSKKLDPVASGWPVCLKAIAAVAILVKDADKLTLGQNITVIAPHALENIVRQPPDRWMTNARMTHYQSLLLTERVTFAPPAALNPATLLPEETDEPVTHDCHQLLIEETGVRKDLTDIPLTGEVLTWFTDGSSYVVEGKRMAGAAVVDGTRTIWASSLPEGTSAQKAELMALTQALRLAEGKSINIYTDSRYAFATAHVHGAIYKQRGWLTSAGREIKNKEEILSLLEALHLPKRLAIIHCPGHQKAKDPISRGNQMADRVAKQAAQGVNLLAGKRTADGSEFEKRTADGSEFESPKKKAKVE

SEQ ID NO: 134 - protein, 2088 aa, synthetic construct
MPAAKRVKLDGGDKKYSIGLDIGTNSVGWAVITDEYKVPSKKFKVLGNTDRHSIKKNLIGALLFDSGETAEATRLKRTARRRYTRRKNRICYLQEIFSNEMAKVDDSFFHRLEESFLVEEDKKHERHPIFGNIVDEVAYHEKYPTIYHLRKKLVDSTDKADLRLIYLALAHMIKFRGHFLIEGDLNPDNSDVDKLFIQLVQTYNQLFEENPINASGVDAKAILSARLSKSRRLENLIAQLPGEKKNGLFGNLIALSLGLTPNFKSNFDLAEDAKLQLSKDTYDDDLDNLLAQIGDQYADLFLAAKNLSDAILLSDILRVNTEITKAPLSASMIKRYDEHHQDLTLLKALVRQQLPEKYKEIFFDQSKNGYAGYIDGGASQEEFYKFIKPILEKMDGTEELLVKLNREDLLRKQRTFDNGSIPHQIHLGELHAILRRQEDFYPFLKDNREKIEKILTFRIPYYVGPLARGNSRFAWMTRKSEETITPWNFEEVVDKGASAQSFIERMTNFDKNLPNEKVLPKHSLLYEYFTVYNELTKVKYVTEGMRKPAFLSGEQKKAIVDLLFKTNRKVTVKQLKEDYFKKIECFDSVEISGVEDRFNASLGTYHDLLKIIKDKDFLDNEENEDILEDIVLTLTLFEDREMIEERLKTYAHLFDDKVMKQLKRRRYTGWGRLSRKLINGIRDKQSGKTILDFLKSDGFANRNFMQLIHDDSLTFKEDIQKAQVSGQGDSLHEHIANLAGSPAIKKGILQTVKVVDELVKVMGRHKPENIVIEMARENQTTQKGQKNSRERMKRIEEGIKELGSQILKEHPVENTQLQNEKLYLYYLQNGRDMYVDQELDINRLSDYDVDHIVPQSFLKDDSIDNKVLTRSDKARGKSDNVPSEEVVKKMKNYWRQLLNAKLITQRKFDNLTKAERGGLSELDKAGFIKRQLVETRQITKHVAQILDSRMNTKYDENDKLIREVKVITLKSKLVSDFRKDFQFYKVREINNYHHAHDAYLNAVVGTALIKKYPKLESEFVYGDYKVYDVRKMIAKSEQEIGKATAKYFFYSNIMNFFKTEITLANGEIRKRPLIETNGETGEIVWDKGRDFATVRKVLSMPQVNIVKKTEVQTGGFSKESILPKRNSDKLIARKKDWDPKKYGGFDSPTVAYSVLVVAKVEKGKSKKLKSVKELLGITIMERSSFEKNPIDFLEAKGYKEVKKDLIIKLPKYSLFELENGRKRMLASAGELQKGNELALPSKYVNFLYLASHYEKLKGSPEDNEQKQLFVEQHKHYLDEIIEQISEFSKRVILADANLDKVLSAYNKHRDKPIREQAENIIHLFTLTNLGAPAAFKYFDTTIDRKRYTSTKEVLDATLIHQSITGLYETRIDLSQLGGDGGPAPGSSGGSGGTLQLDDEYRLYSPLVKPDQNIQFWLEQFPQAWAETAGMGLAKQVPPQVIQLKASATPVSVRQYPLSKEAQEGIRPHVQRLIQQGILVPVQSPWNTPLLPVRKPGTNDYRPVQDLREVNKRVQDIHPTVPNPYNLLCALPPQRSWYTVLDLKDAFFCLRLHPTSQPLFAFEWRDPGTGRTGQLTWTRLPQGFKNSPTIFNEALHRDLANFRIQHPQVTLLQYVDDLLLAGATKQDCLEGTKALLLELSDLGYRASAKKAQICRREVTYLGYSLRDGQRWLTEARKKTVVQIPAPTTAKQVREFLGTAGFCRLWIPGFATLAAPLYPLTKPKGEFSWAPEHQKAFDAIKKALLSAPALALPDVTKPFTLYVDERKGVARGVLTQTLGPWRRPVAYLSKKLDPVASGWPVCLKAIAAVAILVKDADKLTLGQNITVIAPHALENIVRQPPDRWMTNARMTHYQSLLLTERVTFAPPAALNPATLLPEETDEPVTHDCHQLLIEETGVRKDLTDIPLTGEVLTWFTDGSSYVVEGKRMAGAAVVDGTRTIWASSLPEGTSAQKAELMALTQALRLAEGKSINIYTDSRYAFATAHVHGAIYKQRGWLTSAGREIKNKEEILSLLEALHLPKRLAIIHCPGHQKAKDPISRGNQMADRVAKQAAQGVNLLAGKRTADGSEFEKRTADGSEFESPKKKAKVE

SEQ ID NO: 135 - protein, 2088 aa, synthetic construct
MPAAKRVKLDGGDKKYSIGLDIGTNSVGWAVITDEYKVPSKKFKVLGNTDRHSIKKNLIGALLFDSGETAEATRLKRTARRRYTRRKNRICYLQEIFSNEMAKVDDSFFHRLEESFLVEEDKKHERHPIFGNIVDEVAYHEKYPTIYHLRKKLVDSTDKADLRLIYLALAHMIKFRGHFLIEGDLNPDNSDVDKLFIQLVQTYNQLFEENPINASGVDAKAILSARLSKSRRLENLIAQLPGEKKNGLFGNLIALSLGLTPNFKSNFDLAEDAKLQLSKDTYDDDLDNLLAQIGDQYADLFLAAKNLSDAILLSDILRVNTEITKAPLSASMIKRYDEHHQDLTLLKALVRQQLPEKYKEIFFDQSKNGYAGYIDGGASQEEFYKFIKPILEKMDGTEELLVKLNREDLLRKQRTFDNGSIPHQIHLGELHAILRRQEDFYPFLKDNREKIEKILTFRIPYYVGPLARGNSRFAWMTRKSEETITPWNFEEVVDKGASAQSFIERMTNFDKNLPNEKVLPKHSLLYEYFTVYNELTKVKYVTEGMRKPAFLSGEQKKAIVDLLFKTNRKVTVKQLKEDYFKKIECFDSVEISGVEDRFNASLGTYHDLLKIIKDKDFLDNEENEDILEDIVLTLTLFEDREMIEERLKTYAHLFDDKVMKQLKRRRYTGWGRLSRKLINGIRDKQSGKTILDFLKSDGFANRNFMQLIHDDSLTFKEDIQKAQVSGQGDSLHEHIANLAGSPAIKKGILQTVKVVDELVKVMGRHKPENIVIEMARENQTTQKGQKNSRERMKRIEEGIKELGSQILKEHPVENTQLQNEKLYLYYLQNGRDMYVDQELDINRLSDYDVDHIVPQSFLKDDSIDNKVLTRSDKARGKSDNVPSEEVVKKMKNYWRQLLNAKLITQRKFDNLTKAERGGLSELDKAGFIKRQLVETRQITKHVAQILDSRMNTKYDENDKLIREVKVITLKSKLVSDFRKDFQFYKVREINNYHHAHDAYLNAVVGTALIKKYPKLESEFVYGDYKVYDVRKMIAKSEQEIGKATAKYFFYSNIMNFFKTEITLANGEIRKRPLIETNGETGEIVWDKGRDFATVRKVLSMPQVNIVKKTEVQTGGFSKESILPKRNSDKLIARKKDWDPKKYGGFDSPTVAYSVLVVAKVEKGKSKKLKSVKELLGITIMERSSFEKNPIDFLEAKGYKEVKKDLIIKLPKYSLFELENGRKRMLASAGELQKGNELALPSKYVNFLYLASHYEKLKGSPEDNEQKQLFVEQHKHYLDEIIEQISEFSKRVILADANLDKVLSAYNKHRDKPIREQAENIIHLFTLTNLGAPAAFKYFDTTIDRKRYTSTKEVLDATLIHQSITGLYETRIDLSQLGGDGGPAPGGSGSSGGTLQLDDEYRLYSPLVKPDQNIQFWLEQFPQAWAETAGMGLAKQVPPQVIQLKASATPVSVRQYPLSKEAQEGIRPHVQRLIQQGILVPVQSPWNTPLLPVRKPGTNDYRPVQDLREVNKRVQDIHPTVPNPYNLLCALPPQRSWYTVLDLKDAFFCLRLHPTSQPLFAFEWRDPGTGRTGQLTWTRLPQGFKNSPTIFNEALHRDLANFRIQHPQVTLLQYVDDLLLAGATKQDCLEGTKALLLELSDLGYRASAKKAQICRREVTYLGYSLRDGQRWLTEARKKTVVQIPAPTTAKQVREFLGTAGFCRLWIPGFATLAAPLYPLTKPKGEFSWAPEHQKAFDAIKKALLSAPALALPDVTKPFTLYVDERKGVARGVLTQTLGPWRRPVAYLSKKLDPVASGWPVCLKAIAAVAILVKDADKLTLGQNITVIAPHALENIVRQPPDRWMTNARMTHYQSLLLTERVTFAPPAALNPATLLPEETDEPVTHDCHQLLIEETGVRKDLTDIPLTGEVLTWFTDGSSYVVEGKRMAGAAVVDGTRTIWASSLPEGTSAQKAELMALTQALRLAEGKSINIYTDSRYAFATAHVHGAIYKQRGWLTSAGREIKNKEEILSLLEALHLPKRLAIIHCPGHQKAKDPISRGNQMADRVAKQAAQGVNLLAGKRTADGSEFEKRTADGSEFESPKKKAKVE

SEQ ID NO: 136 - protein, 2090 aa, synthetic construct
MPAAKRVKLDGGDKKYSIGLDIGTNSVGWAVITDEYKVPSKKFKVLGNTDRHSIKKNLIGALLFDSGETAEATRLKRTARRRYTRRKNRICYLQEIFSNEMAKVDDSFFHRLEESFLVEEDKKHERHPIFGNIVDEVAYHEKYPTIYHLRKKLVDSTDKADLRLIYLALAHMIKFRGHFLIEGDLNPDNSDVDKLFIQLVQTYNQLFEENPINASGVDAKAILSARLSKSRRLENLIAQLPGEKKNGLFGNLIALSLGLTPNFKSNFDLAEDAKLQLSKDTYDDDLDNLLAQIGDQYADLFLAAKNLSDAILLSDILRVNTEITKAPLSASMIKRYDEHHQDLTLLKALVRQQLPEKYKEIFFDQSKNGYAGYIDGGASQEEFYKFIKPILEKMDGTEELLVKLNREDLLRKQRTFDNGSIPHQIHLGELHAILRRQEDFYPFLKDNREKIEKILTFRIPYYVGPLARGNSRFAWMTRKSEETITPWNFEEVVDKGASAQSFIERMTNFDKNLPNEKVLPKHSLLYEYFTVYNELTKVKYVTEGMRKPAFLSGEQKKAIVDLLFKTNRKVTVKQLKEDYFKKIECFDSVEISGVEDRFNASLGTYHDLLKIIKDKDFLDNEENEDILEDIVLTLTLFEDREMIEERLKTYAHLFDDKVMKQLKRRRYTGWGRLSRKLINGIRDKQSGKTILDFLKSDGFANRNFMQLIHDDSLTFKEDIQKAQVSGQGDSLHEHIANLAGSPAIKKGILQTVKVVDELVKVMGRHKPENIVIEMARENQTTQKGQKNSRERMKRIEEGIKELGSQILKEHPVENTQLQNEKLYLYYLQNGRDMYVDQELDINRLSDYDVDHIVPQSFLKDDSIDNKVLTRSDKARGKSDNVPSEEVVKKMKNYWRQLLNAKLITQRKFDNLTKAERGGLSELDKAGFIKRQLVETRQITKHVAQILDSRMNTKYDENDKLIREVKVITLKSKLVSDFRKDFQFYKVREINNYHHAHDAYLNAVVGTALIKKYPKLESEFVYGDYKVYDVRKMIAKSEQEIGKATAKYFFYSNIMNFFKTEITLANGEIRKRPLIETNGETGEIVWDKGRDFATVRKVLSMPQVNIVKKTEVQTGGFSKESILPKRNSDKLIARKKDWDPKKYGGFDSPTVAYSVLVVAKVEKGKSKKLKSVKELLGITIMERSSFEKNPIDFLEAKGYKEVKKDLIIKLPKYSLFELENGRKRMLASAGELQKGNELALPSKYVNFLYLASHYEKLKGSPEDNEQKQLFVEQHKHYLDEIIEQISEFSKRVILADANLDKVLSAYNKHRDKPIREQAENIIHLFTLTNLGAPAAFKYFDTTIDRKRYTSTKEVLDATLIHQSITGLYETRIDLSQLGGDGGEAAAKGGSGSSGGTLQLDDEYRLYSPLVKPDQNIQFWLEQFPQAWAETAGMGLAKQVPPQVIQLKASATPVSVRQYPLSKEAQEGIRPHVQRLIQQGILVPVQSPWNTPLLPVRKPGTNDYRPVQDLREVNKRVQDIHPTVPNPYNLLCALPPQRSWYTVLDLKDAFFCLRLHPTSQPLFAFEWRDPGTGRTGQLTWTRLPQGFKNSPTIFNEALHRDLANFRIQHPQVTLLQYVDDLLLAGATKQDCLEGTKALLLELSDLGYRASAKKAQICRREVTYLGYSLRDGQRWLTEARKKTVVQIPAPTTAKQVREFLGTAGFCRLWIPGFATLAAPLYPLTKPKGEFSWAPEHQKAFDAIKKALLSAPALALPDVTKPFTLYVDERKGVARGVLTQTLGPWRRPVAYLSKKLDPVASGWPVCLKAIAAVAILVKDADKLTLGQNITVIAPHALENIVRQPPDRWMTNARMTHYQSLLLTERVTFAPPAALNPATLLPEETDEPVTHDCHQLLIEETGVRKDLTDIPLTGEVLTWFTDGSSYVVEGKRMAGAAVVDGTRTIWASSLPEGTSAQKAELMALTQALRLAEGKSINIYTDSRYAFATAHVHGAIYKQRGWLTSAGREIKNKEEILSLLEALHLPKRLAIIHCPGHQKAKDPISRGNQMADRVAKQAAQGVNLLAGKRTADGSEFEKRTADGSEFESPKKKAKVE

SEQ ID NO: 137 - protein, 2099 aa, synthetic construct
MPAAKRVKLDGGDKKYSIGLDIGTNSVGWAVITDEYKVPSKKFKVLGNTDRHSIKKNLIGALLFDSGETAEATRLKRTARRRYTRRKNRICYLQEIFSNEMAKVDDSFFHRLEESFLVEEDKKHERHPIFGNIVDEVAYHEKYPTIYHLRKKLVDSTDKADLRLIYLALAHMIKFRGHFLIEGDLNPDNSDVDKLFIQLVQTYNQLFEENPINASGVDAKAILSARLSKSRRLENLIAQLPGEKKNGLFGNLIALSLGLTPNFKSNFDLAEDAKLQLSKDTYDDDLDNLLAQIGDQYADLFLAAKNLSDAILLSDILRVNTEITKAPLSASMIKRYDEHHQDLTLLKALVRQQLPEKYKEIFFDQSKNGYAGYIDGGASQEEFYKFIKPILEKMDGTEELLVKLNREDLLRKQRTFDNGSIPHQIHLGELHAILRRQEDFYPFLKDNREKIEKILTFRIPYYVGPLARGNSRFAWMTRKSEETITPWNFEEVVDKGASAQSFIERMTNFDKNLPNEKVLPKHSLLYEYFTVYNELTKVKYVTEGMRKPAFLSGEQKKAIVDLLFKTNRKVTVKQLKEDYFKKIECFDSVEISGVEDRFNASLGTYHDLLKIIKDKDFLDNEENEDILEDIVLTLTLFEDREMIEERLKTYAHLFDDKVMKQLKRRRYTGWGRLSRKLINGIRDKQSGKTILDFLKSDGFANRNFMQLIHDDSLTFKEDIQKAQVSGQGDSLHEHIANLAGSPAIKKGILQTVKVVDELVKVMGRHKPENIVIEMARENQTTQKGQKNSRERMKRIEEGIKELGSQILKEHPVENTQLQNEKLYLYYLQNGRDMYVDQELDINRLSDYDVDHIVPQSFLKDDSIDNKVLTRSDKARGKSDNVPSEEVVKKMKNYWRQLLNAKLITQRKFDNLTKAERGGLSELDKAGFIKRQLVETRQITKHVAQILDSRMNTKYDENDKLIREVKVITLKSKLVSDFRKDFQFYKVREINNYHHAHDAYLNAVVGTALIKKYPKLESEFVYGDYKVYDVRKMIAKSEQEIGKATAKYFFYSNIMNFFKTEITLANGEIRKRPLIETNGETGEIVWDKGRDFATVRKVLSMPQVNIVKKTEVQTGGFSKESILPKRNSDKLIARKKDWDPKKYGGFDSPTVAYSVLVVAKVEKGKSKKLKSVKELLGITIMERSSFEKNPIDFLEAKGYKEVKKDLIIKLPKYSLFELENGRKRMLASAGELQKGNELALPSKYVNFLYLASHYEKLKGSPEDNEQKQLFVEQHKHYLDEIIEQISEFSKRVILADANLDKVLSAYNKHRDKPIREQAENIIHLFTLTNLGAPAAFKYFDTTIDRKRYTSTKEVLDATLIHQSITGLYETRIDLSQLGGDGGEAAAKEAAAKEAAAKEAAAKGGTLQLDDEYRLYSPLVKPDQNIQFWLEQFPQAWAETAGMGLAKQVPPQVIQLKASATPVSVRQYPLSKEAQEGIRPHVQRLIQQGILVPVQSPWNTPLLPVRKPGTNDYRPVQDLREVNKRVQDIHPTVPNPYNLLCALPPQRSWYTVLDLKDAFFCLRLHPTSQPLFAFEWRDPGTGRTGQLTWTRLPQGFKNSPTIFNEALHRDLANFRIQHPQVTLLQYVDDLLLAGATKQDCLEGTKALLLELSDLGYRASAKKAQICRREVTYLGYSLRDGQRWLTEARKKTVVQIPAPTTAKQVREFLGTAGFCRLWIPGFATLAAPLYPLTKPKGEFSWAPEHQKAFDAIKKALLSAPALALPDVTKPFTLYVDERKGVARGVLTQTLGPWRRPVAYLSKKLDPVASGWPVCLKAIAAVAILVKDADKLTLGQNITVIAPHALENIVRQPPDRWMTNARMTHYQSLLLTERVTFAPPAALNPATLLPEETDEPVTHDCHQLLIEETGVRKDLTDIPLTGEVLTWFTDGSSYVVEGKRMAGAAVVDGTRTIWASSLPEGTSAQKAELMALTQALRLAEGKSINIYTDSRYAFATAHVHGAIYKQRGWLTSAGREIKNKEEILSLLEALHLPKRLAIIHCPGHQKAKDPISRGNQMADRVAKQAAQGVNLLAGKRTADGSEFEKRTADGSEFESPKKKAKVE

SEQ ID NO: 138 - protein, 2090 aa, synthetic construct
MPAAKRVKLDGGDKKYSIGLDIGTNSVGWAVITDEYKVPSKKFKVLGNTDRHSIKKNLIGALLFDSGETAEATRLKRTARRRYTRRKNRICYLQEIFSNEMAKVDDSFFHRLEESFLVEEDKKHERHPIFGNIVDEVAYHEKYPTIYHLRKKLVDSTDKADLRLIYLALAHMIKFRGHFLIEGDLNPDNSDVDKLFIQLVQTYNQLFEENPINASGVDAKAILSARLSKSRRLENLIAQLPGEKKNGLFGNLIALSLGLTPNFKSNFDLAEDAKLQLSKDTYDDDLDNLLAQIGDQYADLFLAAKNLSDAILLSDILRVNTEITKAPLSASMIKRYDEHHQDLTLLKALVRQQLPEKYKEIFFDQSKNGYAGYIDGGASQEEFYKFIKPILEKMDGTEELLVKLNREDLLRKQRTFDNGSIPHQIHLGELHAILRRQEDFYPFLKDNREKIEKILTFRIPYYVGPLARGNSRFAWMTRKSEETITPWNFEEVVDKGASAQSFIERMTNFDKNLPNEKVLPKHSLLYEYFTVYNELTKVKYVTEGMRKPAFLSGEQKKAIVDLLFKTNRKVTVKQLKEDYFKKIECFDSVEISGVEDRFNASLGTYHDLLKIIKDKDFLDNEENEDILEDIVLTLTLFEDREMIEERLKTYAHLFDDKVMKQLKRRRYTGWGRLSRKLINGIRDKQSGKTILDFLKSDGFANRNFMQLIHDDSLTFKEDIQKAQVSGQGDSLHEHIANLAGSPAIKKGILQTVKVVDELVKVMGRHKPENIVIEMARENQTTQKGQKNSRERMKRIEEGIKELGSQILKEHPVENTQLQNEKLYLYYLQNGRDMYVDQELDINRLSDYDVDHIVPQSFLKDDSIDNKVLTRSDKARGKSDNVPSEEVVKKMKNYWRQLLNAKLITQRKFDNLTKAERGGLSELDKAGFIKRQLVETRQITKHVAQILDSRMNTKYDENDKLIREVKVITLKSKLVSDFRKDFQFYKVREINNYHHAHDAYLNAVVGTALIKKYPKLESEFVYGDYKVYDVRKMIAKSEQEIGKATAKYFFYSNIMNFFKTEITLANGEIRKRPLIETNGETGEIVWDKGRDFATVRKVLSMPQVNIVKKTEVQTGGFSKESILPKRNSDKLIARKKDWDPKKYGGFDSPTVAYSVLVVAKVEKGKSKKLKSVKELLGITIMERSSFEKNPIDFLEAKGYKEVKKDLIIKLPKYSLFELENGRKRMLASAGELQKGNELALPSKYVNFLYLASHYEKLKGSPEDNEQKQLFVEQHKHYLDEIIEQISEFSKRVILADANLDKVLSAYNKHRDKPIREQAENIIHLFTLTNLGAPAAFKYFDTTIDRKRYTSTKEVLDATLIHQSITGLYETRIDLSQLGGDGGPAPGGSEAAAKGGTLQLDDEYRLYSPLVKPDQNIQFWLEQFPQAWAETAGMGLAKQVPPQVIQLKASATPVSVRQYPLSKEAQEGIRPHVQRLIQQGILVPVQSPWNTPLLPVRKPGTNDYRPVQDLREVNKRVQDIHPTVPNPYNLLCALPPQRSWYTVLDLKDAFFCLRLHPTSQPLFAFEWRDPGTGRTGQLTWTRLPQGFKNSPTIFNEALHRDLANFRIQHPQVTLLQYVDDLLLAGATKQDCLEGTKALLLELSDLGYRASAKKAQICRREVTYLGYSLRDGQRWLTEARKKTVVQIPAPTTAKQVREFLGTAGFCRLWIPGFATLAAPLYPLTKPKGEFSWAPEHQKAFDAIKKALLSAPALALPDVTKPFTLYVDERKGVARGVLTQTLGPWRRPVAYLSKKLDPVASGWPVCLKAIAAVAILVKDADKLTLGQNITVIAPHALENIVRQPPDRWMTNARMTHYQSLLLTERVTFAPPAALNPATLLPEETDEPVTHDCHQLLIEETGVRKDLTDIPLTGEVLTWFTDGSSYVVEGKRMAGAAVVDGTRTIWASSLPEGTSAQKAELMALTQALRLAEGKSINIYTDSRYAFATAHVHGAIYKQRGWLTSAGREIKNKEEILSLLEALHLPKRLAIIHCPGHQKAKDPISRGNQMADRVAKQAAQGVNLLAGKRTADGSEFEKRTADGSEFESPKKKAKVE

SEQ ID NO: 139 - protein, 2090 aa, synthetic construct
MPAAKRVKLDGGDKKYSIGLDIGTNSVGWAVITDEYKVPSKKFKVLGNTDRHSIKKNLIGALLFDSGETAEATRLKRTARRRYTRRKNRICYLQEIFSNEMAKVDDSFFHRLEESFLVEEDKKHERHPIFGNIVDEVAYHEKYPTIYHLRKKLVDSTDKADLRLIYLALAHMIKFRGHFLIEGDLNPDNSDVDKLFIQLVQTYNQLFEENPINASGVDAKAILSARLSKSRRLENLIAQLPGEKKNGLFGNLIALSLGLTPNFKSNFDLAEDAKLQLSKDTYDDDLDNLLAQIGDQYADLFLAAKNLSDAILLSDILRVNTEITKAPLSASMIKRYDEHHQDLTLLKALVRQQLPEKYKEIFFDQSKNGYAGYIDGGASQEEFYKFIKPILEKMDGTEELLVKLNREDLLRKQRTFDNGSIPHQIHLGELHAILRRQEDFYPFLKDNREKIEKILTFRIPYYVGPLARGNSRFAWMTRKSEETITPWNFEEVVDKGASAQSFIERMTNFDKNLPNEKVLPKHSLLYEYFTVYNELTKVKYVTEGMRKPAFLSGEQKKAIVDLLFKTNRKVTVKQLKEDYFKKIECFDSVEISGVEDRFNASLGTYHDLLKIIKDKDFLDNEENEDILEDIVLTLTLFEDREMIEERLKTYAHLFDDKVMKQLKRRRYTGWGRLSRKLINGIRDKQSGKTILDFLKSDGFANRNFMQLIHDDSLTFKEDIQKAQVSGQGDSLHEHIANLAGSPAIKKGILQTVKVVDELVKVMGRHKPENIVIEMARENQTTQKGQKNSRERMKRIEEGIKELGSQILKEHPVENTQLQNEKLYLYYLQNGRDMYVDQELDINRLSDYDVDHIVPQSFLKDDSIDNKVLTRSDKARGKSDNVPSEEVVKKMKNYWRQLLNAKLITQRKFDNLTKAERGGLSELDKAGFIKRQLVETRQITKHVAQILDSRMNTKYDENDKLIREVKVITLKSKLVSDFRKDFQFYKVREINNYHHAHDAYLNAVVGTALIKKYPKLESEFVYGDYKVYDVRKMIAKSEQEIGKATAKYFFYSNIMNFFKTEITLANGEIRKRPLIETNGETGEIVWDKGRDFATVRKVLSMPQVNIVKKTEVQTGGFSKESILPKRNSDKLIARKKDWDPKKYGGFDSPTVAYSVLVVAKVEKGKSKKLKSVKELLGITIMERSSFEKNPIDFLEAKGYKEVKKDLIIKLPKYSLFELENGRKRMLASAGELQKGNELALPSKYVNFLYLASHYEKLKGSPEDNEQKQLFVEQHKHYLDEIIEQISEFSKRVILADANLDKVLSAYNKHRDKPIREQAENIIHLFTLTNLGAPAAFKYFDTTIDRKRYTSTKEVLDATLIHQSITGLYETRIDLSQLGGDGGGGSGSSEAAAKGGTLQLDDEYRLYSPLVKPDQNIQFWLEQFPQAWAETAGMGLAKQVPPQVIQLKASATPVSVRQYPLSKEAQEGIRPHVQRLIQQGILVPVQSPWNTPLLPVRKPGTNDYRPVQDLREVNKRVQDIHPTVPNPYNLLCALPPQRSWYTVLDLKDAFFCLRLHPTSQPLFAFEWRDPGTGRTGQLTWTRLPQGFKNSPTIFNEALHRDLANFRIQHPQVTLLQYVDDLLLAGATKQDCLEGTKALLLELSDLGYRASAKKAQICRREVTYLGYSLRDGQRWLTEARKKTVVQIPAPTTAKQVREFLGTAGFCRLWIPGFATLAAPLYPLTKPKGEFSWAPEHQKAFDAIKKALLSAPALALPDVTKPFTLYVDERKGVARGVLTQTLGPWRRPVAYLSKKLDPVASGWPVCLKAIAAVAILVKDADKLTLGQNITVIAPHALENIVRQPPDRWMTNARMTHYQSLLLTERVTFAPPAALNPATLLPEETDEPVTHDCHQLLIEETGVRKDLTDIPLTGEVLTWFTDGSSYVVEGKRMAGAAVVDGTRTIWASSLPEGTSAQKAELMALTQALRLAEGKSINIYTDSRYAFATAHVHGAIYKQRGWLTSAGREIKNKEEILSLLEALHLPKRLAIIHCPGHQKAKDPISRGNQMADRVAKQAAQGVNLLAGKRTADGSEFEKRTADGSEFESPKKKAKVE

SEQ ID NO: 140 - protein, 2112 aa, synthetic construct
MPAAKRVKLDGGDKKYSIGLDIGTNSVGWAVITDEYKVPSKKFKVLGNTDRHSIKKNLIGALLFDSGETAEATRLKRTARRRYTRRKNRICYLQEIFSNEMAKVDDSFFHRLEESFLVEEDKKHERHPIFGNIVDEVAYHEKYPTIYHLRKKLVDSTDKADLRLIYLALAHMIKFRGHFLIEGDLNPDNSDVDKLFIQLVQTYNQLFEENPINASGVDAKAILSARLSKSRRLENLIAQLPGEKKNGLFGNLIALSLGLTPNFKSNFDLAEDAKLQLSKDTYDDDLDNLLAQIGDQYADLFLAAKNLSDAILLSDILRVNTEITKAPLSASMIKRYDEHHQDLTLLKALVRQQLPEKYKEIFFDQSKNGYAGYIDGGASQEEFYKFIKPILEKMDGTEELLVKLNREDLLRKQRTFDNGSIPHQIHLGELHAILRRQEDFYPFLKDNREKIEKILTFRIPYYVGPLARGNSRFAWMTRKSEETITPWNFEEVVDKGASAQSFIERMTNFDKNLPNEKVLPKHSLLYEYFTVYNELTKVKYVTEGMRKPAFLSGEQKKAIVDLLFKTNRKVTVKQLKEDYFKKIECFDSVEISGVEDRFNASLGTYHDLLKIIKDKDFLDNEENEDILEDIVLTLTLFEDREMIEERLKTYAHLFDDKVMKQLKRRRYTGWGRLSRKLINGIRDKQSGKTILDFLKSDGFANRNFMQLIHDDSLTFKEDIQKAQVSGQGDSLHEHIANLAGSPAIKKGILQTVKVVDELVKVMGRHKPENIVIEMARENQTTQKGQKNSRERMKRIEEGIKELGSQILKEHPVENTQLQNEKLYLYYLQNGRDMYVDQELDINRLSDYDVDHIVPQSFLKDDSIDNKVLTRSDKARGKSDNVPSEEVVKKMKNYWRQLLNAKLITQRKFDNLTKAERGGLSELDKAGFIKRQLVETRQITKHVAQILDSRMNTKYDENDKLIREVKVITLKSKLVSDFRKDFQFYKVREINNYHHAHDAYLNAVVGTALIKKYPKLESEFVYGDYKVYDVRKMIAKSEQEIGKATAKYFFYSNIMNFFKTEITLANGEIRKRPLIETNGETGEIVWDKGRDFATVRKVLSMPQVNIVKKTEVQTGGFSKESILPKRNSDKLIARKKDWDPKKYGGFDSPTVAYSVLVVAKVEKGKSKKLKSVKELLGITIMERSSFEKNPIDFLEAKGYKEVKKDLIIKLPKYSLFELENGRKRMLASAGELQKGNELALPSKYVNFLYLASHYEKLKGSPEDNEQKQLFVEQHKHYLDEIIEQISEFSKRVILADANLDKVLSAYNKHRDKPIREQAENIIHLFTLTNLGAPAAFKYFDTTIDRKRYTSTKEVLDATLIHQSITGLYETRIDLSQLGGDGGSGGSSGGSSGSETPGTSESATPESSGGSSGGSSGGTLQLDDEYRLYSPLVKPDQNIQFWLEQFPQAWAETAGMGLAKQVPPQVIQLKASATPVSVRQYPLSKEAQEGIRPHVQRLIQQGILVPVQSPWNTPLLPVRKPGTNDYRPVQDLREVNKRVQDIHPTVPNPYNLLCALPPQRSWYTVLDLKDAFFCLRLHPTSQPLFAFEWRDPGTGRTGQLTWTRLPQGFKNSPTIFNEALHRDLANFRIQHPQVTLLQYVDDLLLAGATKQDCLEGTKALLLELSDLGYRASAKKAQICRREVTYLGYSLRDGQRWLTEARKKTVVQIPAPTTAKQVREFLGTAGFCRLWIPGFATLAAPLYPLTKPKGEFSWAPEHQKAFDAIKKALLSAPALALPDVTKPFTLYVDERKGVARGVLTQTLGPWRRPVAYLSKKLDPVASGWPVCLKAIAAVAILVKDADKLTLGQNITVIAPHALENIVRQPPDRWMTNARMTHYQSLLLTERVTFAPPAALNPATLLPEETDEPVTHDCHQLLIEETGVRKDLTDIPLTGEVLTWFTDGSSYVVEGKRMAGAAVVDGTRTIWASSLPEGTSAQKAELMALTQALRLAEGKSINIYTDSRYAFATAHVHGAIYKQRGWLTSAGREIKNKEEILSLLEALHLPKRLAIIHCPGHQKAKDPISRGNQMADRVAKQAAQGVNLLAGKRTADGSEFEKRTADGSEFESPKKKAKVE

SEQ ID NO: 141 - protein, 2090 aa, synthetic construct
MPAAKRVKLDGGDKKYSIGLDIGTNSVGWAVITDEYKVPSKKFKVLGNTDRHSIKKNLIGALLFDSGETAEATRLKRTARRRYTRRKNRICYLQEIFSNEMAKVDDSFFHRLEESFLVEEDKKHERHPIFGNIVDEVAYHEKYPTIYHLRKKLVDSTDKADLRLIYLALAHMIKFRGHFLIEGDLNPDNSDVDKLFIQLVQTYNQLFEENPINASGVDAKAILSARLSKSRRLENLIAQLPGEKKNGLFGNLIALSLGLTPNFKSNFDLAEDAKLQLSKDTYDDDLDNLLAQIGDQYADLFLAAKNLSDAILLSDILRVNTEITKAPLSASMIKRYDEHHQDLTLLKALVRQQLPEKYKEIFFDQSKNGYAGYIDGGASQEEFYKFIKPILEKMDGTEELLVKLNREDLLRKQRTFDNGSIPHQIHLGELHAILRRQEDFYPFLKDNREKIEKILTFRIPYYVGPLARGNSRFAWMTRKSEETITPWNFEEVVDKGASAQSFIERMTNFDKNLPNEKVLPKHSLLYEYFTVYNELTKVKYVTEGMRKPAFLSGEQKKAIVDLLFKTNRKVTVKQLKEDYFKKIECFDSVEISGVEDRFNASLGTYHDLLKIIKDKDFLDNEENEDILEDIVLTLTLFEDREMIEERLKTYAHLFDDKVMKQLKRRRYTGWGRLSRKLINGIRDKQSGKTILDFLKSDGFANRNFMQLIHDDSLTFKEDIQKAQVSGQGDSLHEHIANLAGSPAIKKGILQTVKVVDELVKVMGRHKPENIVIEMARENQTTQKGQKNSRERMKRIEEGIKELGSQILKEHPVENTQLQNEKLYLYYLQNGRDMYVDQELDINRLSDYDVDHIVPQSFLKDDSIDNKVLTRSDKARGKSDNVPSEEVVKKMKNYWRQLLNAKLITQRKFDNLTKAERGGLSELDKAGFIKRQLVETRQITKHVAQILDSRMNTKYDENDKLIREVKVITLKSKLVSDFRKDFQFYKVREINNYHHAHDAYLNAVVGTALIKKYPKLESEFVYGDYKVYDVRKMIAKSEQEIGKATAKYFFYSNIMNFFKTEITLANGEIRKRPLIETNGETGEIVWDKGRDFATVRKVLSMPQVNIVKKTEVQTGGFSKESILPKRNSDKLIARKKDWDPKKYGGFDSPTVAYSVLVVAKVEKGKSKKLKSVKELLGITIMERSSFEKNPIDFLEAKGYKEVKKDLIIKLPKYSLFELENGRKRMLASAGELQKGNELALPSKYVNFLYLASHYEKLKGSPEDNEQKQLFVEQHKHYLDEIIEQISEFSKRVILADANLDKVLSAYNKHRDKPIREQAENIIHLFTLTNLGAPAAFKYFDTTIDRKRYTSTKEVLDATLIHQSITGLYETRIDLSQLGGDGGEAAAKGGSPAPGGTLQLDDEYRLYSPLVKPDQNIQFWLEQFPQAWAETAGMGLAKQVPPQVIQLKASATPVSVRQYPLSKEAQEGIRPHVQRLIQQGILVPVQSPWNTPLLPVRKPGTNDYRPVQDLREVNKRVQDIHPTVPNPYNLLCALPPQRSWYTVLDLKDAFFCLRLHPTSQPLFAFEWRDPGTGRTGQLTWTRLPQGFKNSPTIFNEALHRDLANFRIQHPQVTLLQYVDDLLLAGATKQDCLEGTKALLLELSDLGYRASAKKAQICRREVTYLGYSLRDGQRWLTEARKKTVVQIPAPTTAKQVREFLGTAGFCRLWIPGFATLAAPLYPLTKPKGEFSWAPEHQKAFDAIKKALLSAPALALPDVTKPFTLYVDERKGVARGVLTQTLGPWRRPVAYLSKKLDPVASGWPVCLKAIAAVAILVKDADKLTLGQNITVIAPHALENIVRQPPDRWMTNARMTHYQSLLLTERVTFAPPAALNPATLLPEETDEPVTHDCHQLLIEETGVRKDLTDIPLTGEVLTWFTDGSSYVVEGKRMAGAAVVDGTRTIWASSLPEGTSAQKAELMALTQALRLAEGKSINIYTDSRYAFATAHVHGAIYKQRGWLTSAGREIKNKEEILSLLEALHLPKRLAIIHCPGHQKAKDPISRGNQMADRVAKQAAQGVNLLAGKRTADGSEFEKRTADGSEFESPKKKAKVE

SEQ ID NO: 142 - protein, 2097 aa, synthetic construct
MPAAKRVKLDGGDKKYSIGLDIGTNSVGWAVITDEYKVPSKKFKVLGNTDRHSIKKNLIGALLFDSGETAEATRLKRTARRRYTRRKNRICYLQEIFSNEMAKVDDSFFHRLEESFLVEEDKKHERHPIFGNIVDEVAYHEKYPTIYHLRKKLVDSTDKADLRLIYLALAHMIKFRGHFLIEGDLNPDNSDVDKLFIQLVQTYNQLFEENPINASGVDAKAILSARLSKSRRLENLIAQLPGEKKNGLFGNLIALSLGLTPNFKSNFDLAEDAKLQLSKDTYDDDLDNLLAQIGDQYADLFLAAKNLSDAILLSDILRVNTEITKAPLSASMIKRYDEHHQDLTLLKALVRQQLPEKYKEIFFDQSKNGYAGYIDGGASQEEFYKFIKPILEKMDGTEELLVKLNREDLLRKQRTFDNGSIPHQIHLGELHAILRRQEDFYPFLKDNREKIEKILTFRIPYYVGPLARGNSRFAWMTRKSEETITPWNFEEVVDKGASAQSFIERMTNFDKNLPNEKVLPKHSLLYEYFTVYNELTKVKYVTEGMRKPAFLSGEQKKAIVDLLFKTNRKVTVKQLKEDYFKKIECFDSVEISGVEDRFNASLGTYHDLLKIIKDKDFLDNEENEDILEDIVLTLTLFEDREMIEERLKTYAHLFDDKVMKQLKRRRYTGWGRLSRKLINGIRDKQSGKTILDFLKSDGFANRNFMQLIHDDSLTFKEDIQKAQVSGQGDSLHEHIANLAGSPAIKKGILQTVKVVDELVKVMGRHKPENIVIEMARENQTTQKGQKNSRERMKRIEEGIKELGSQILKEHPVENTQLQNEKLYLYYLQNGRDMYVDQELDINRLSDYDVDHIVPQSFLKDDSIDNKVLTRSDKARGKSDNVPSEEVVKKMKNYWRQLLNAKLITQRKFDNLTKAERGGLSELDKAGFIKRQLVETRQITKHVAQILDSRMNTKYDENDKLIREVKVITLKSKLVSDFRKDFQFYKVREINNYHHAHDAYLNAVVGTALIKKYPKLESEFVYGDYKVYDVRKMIAKSEQEIGKATAKYFFYSNIMNFFKTEITLANGEIRKRPLIETNGETGEIVWDKGRDFATVRKVLSMPQVNIVKKTEVQTGGFSKESILPKRNSDKLIARKKDWDPKKYGGFDSPTVAYSVLVVAKVEKGKSKKLKSVKELLGITIMERSSFEKNPIDFLEAKGYKEVKKDLIIKLPKYSLFELENGRKRMLASAGELQKGNELALPSKYVNFLYLASHYEKLKGSPEDNEQKQLFVEQHKHYLDEIIEQISEFSKRVILADANLDKVLSAYNKHRDKPIREQAENIIHLFTLTNLGAPAAFKYFDTTIDRKRYTSTKEVLDATLIHQSITGLYETRIDLSQLGGDGGGGSGGSGGSGGSGGSGGSGGTLQLDDEYRLYSPLVKPDQNIQFWLEQFPQAWAETAGMGLAKQVPPQVIQLKASATPVSVRQYPLSKEAQEGIRPHVQRLIQQGILVPVQSPWNTPLLPVRKPGTNDYRPVQDLREVNKRVQDIHPTVPNPYNLLCALPPQRSWYTVLDLKDAFFCLRLHPTSQPLFAFEWRDPGTGRTGQLTWTRLPQGFKNSPTIFNEALHRDLANFRIQHPQVTLLQYVDDLLLAGATKQDCLEGTKALLLELSDLGYRASAKKAQICRREVTYLGYSLRDGQRWLTEARKKTVVQIPAPTTAKQVREFLGTAGFCRLWIPGFATLAAPLYPLTKPKGEFSWAPEHQKAFDAIKKALLSAPALALPDVTKPFTLYVDERKGVARGVLTQTLGPWRRPVAYLSKKLDPVASGWPVCLKAIAAVAILVKDADKLTLGQNITVIAPHALENIVRQPPDRWMTNARMTHYQSLLLTERVTFAPPAALNPATLLPEETDEPVTHDCHQLLIEETGVRKDLTDIPLTGEVLTWFTDGSSYVVEGKRMAGAAVVDGTRTIWASSLPEGTSAQKAELMALTQALRLAEGKSINIYTDSRYAFATAHVHGAIYKQRGWLTSAGREIKNKEEILSLLEALHLPKRLAIIHCPGHQKAKDPISRGNQMADRVAKQAAQGVNLLAGKRTADGSEFEKRTADGSEFESPKKKAKVE

SEQ ID NO: 143 - protein, 2085 aa, synthetic construct
MPAAKRVKLDGGDKKYSIGLDIGTNSVGWAVITDEYKVPSKKFKVLGNTDRHSIKKNLIGALLFDSGETAEATRLKRTARRRYTRRKNRICYLQEIFSNEMAKVDDSFFHRLEESFLVEEDKKHERHPIFGNIVDEVAYHEKYPTIYHLRKKLVDSTDKADLRLIYLALAHMIKFRGHFLIEGDLNPDNSDVDKLFIQLVQTYNQLFEENPINASGVDAKAILSARLSKSRRLENLIAQLPGEKKNGLFGNLIALSLGLTPNFKSNFDLAEDAKLQLSKDTYDDDLDNLLAQIGDQYADLFLAAKNLSDAILLSDILRVNTEITKAPLSASMIKRYDEHHQDLTLLKALVRQQLPEKYKEIFFDQSKNGYAGYIDGGASQEEFYKFIKPILEKMDGTEELLVKLNREDLLRKQRTFDNGSIPHQIHLGELHAILRRQEDFYPFLKDNREKIEKILTFRIPYYVGPLARGNSRFAWMTRKSEETITPWNFEEVVDKGASAQSFIERMTNFDKNLPNEKVLPKHSLLYEYFTVYNELTKVKYVTEGMRKPAFLSGEQKKAIVDLLFKTNRKVTVKQLKEDYFKKIECFDSVEISGVEDRFNASLGTYHDLLKIIKDKDFLDNEENEDILEDIVLTLTLFEDREMIEERLKTYAHLFDDKVMKQLKRRRYTGWGRLSRKLINGIRDKQSGKTILDFLKSDGFANRNFMQLIHDDSLTFKEDIQKAQVSGQGDSLHEHIANLAGSPAIKKGILQTVKVVDELVKVMGRHKPENIVIEMARENQTTQKGQKNSRERMKRIEEGIKELGSQILKEHPVENTQLQNEKLYLYYLQNGRDMYVDQELDINRLSDYDVDHIVPQSFLKDDSIDNKVLTRSDKARGKSDNVPSEEVVKKMKNYWRQLLNAKLITQRKFDNLTKAERGGLSELDKAGFIKRQLVETRQITKHVAQILDSRMNTKYDENDKLIREVKVITLKSKLVSDFRKDFQFYKVREINNYHHAHDAYLNAVVGTALIKKYPKLESEFVYGDYKVYDVRKMIAKSEQEIGKATAKYFFYSNIMNFFKTEITLANGEIRKRPLIETNGETGEIVWDKGRDFATVRKVLSMPQVNIVKKTEVQTGGFSKESILPKRNSDKLIARKKDWDPKKYGGFDSPTVAYSVLVVAKVEKGKSKKLKSVKELLGITIMERSSFEKNPIDFLEAKGYKEVKKDLIIKLPKYSLFELENGRKRMLASAGELQKGNELALPSKYVNFLYLASHYEKLKGSPEDNEQKQLFVEQHKHYLDEIIEQISEFSKRVILADANLDKVLSAYNKHRDKPIREQAENIIHLFTLTNLGAPAAFKYFDTTIDRKRYTSTKEVLDATLIHQSITGLYETRIDLSQLGGDGGGGGPAPGGTLQLDDEYRLYSPLVKPDQNIQFWLEQFPQAWAETAGMGLAKQVPPQVIQLKASATPVSVRQYPLSKEAQEGIRPHVQRLIQQGILVPVQSPWNTPLLPVRKPGTNDYRPVQDLREVNKRVQDIHPTVPNPYNLLCALPPQRSWYTVLDLKDAFFCLRLHPTSQPLFAFEWRDPGTGRTGQLTWTRLPQGFKNSPTIFNEALHRDLANFRIQHPQVTLLQYVDDLLLAGATKQDCLEGTKALLLELSDLGYRASAKKAQICRREVTYLGYSLRDGQRWLTEARKKTVVQIPAPTTAKQVREFLGTAGFCRLWIPGFATLAAPLYPLTKPKGEFSWAPEHQKAFDAIKKALLSAPALALPDVTKPFTLYVDERKGVARGVLTQTLGPWRRPVAYLSKKLDPVASGWPVCLKAIAAVAILVKDADKLTLGQNITVIAPHALENIVRQPPDRWMTNARMTHYQSLLLTERVTFAPPAALNPATLLPEETDEPVTHDCHQLLIEETGVRKDLTDIPLTGEVLTWFTDGSSYVVEGKRMAGAAVVDGTRTIWASSLPEGTSAQKAELMALTQALRLAEGKSINIYTDSRYAFATAHVHGAIYKQRGWLTSAGREIKNKEEILSLLEALHLPKRLAIIHCPGHQKAKDPISRGNQMADRVAKQAAQGVNLLAGKRTADGSEFEKRTADGSEFESPKKKAKVE

SEQ ID NO: 144 - protein, 2088 aa, synthetic construct
MPAAKRVKLDGGDKKYSIGLDIGTNSVGWAVITDEYKVPSKKFKVLGNTDRHSIKKNLIGALLFDSGETAEATRLKRTARRRYTRRKNRICYLQEIFSNEMAKVDDSFFHRLEESFLVEEDKKHERHPIFGNIVDEVAYHEKYPTIYHLRKKLVDSTDKADLRLIYLALAHMIKFRGHFLIEGDLNPDNSDVDKLFIQLVQTYNQLFEENPINASGVDAKAILSARLSKSRRLENLIAQLPGEKKNGLFGNLIALSLGLTPNFKSNFDLAEDAKLQLSKDTYDDDLDNLLAQIGDQYADLFLAAKNLSDAILLSDILRVNTEITKAPLSASMIKRYDEHHQDLTLLKALVRQQLPEKYKEIFFDQSKNGYAGYIDGGASQEEFYKFIKPILEKMDGTEELLVKLNREDLLRKQRTFDNGSIPHQIHLGELHAILRRQEDFYPFLKDNREKIEKILTFRIPYYVGPLARGNSRFAWMTRKSEETITPWNFEEVVDKGASAQSFIERMTNFDKNLPNEKVLPKHSLLYEYFTVYNELTKVKYVTEGMRKPAFLSGEQKKAIVDLLFKTNRKVTVKQLKEDYFKKIECFDSVEISGVEDRFNASLGTYHDLLKIIKDKDFLDNEENEDILEDIVLTLTLFEDREMIEERLKTYAHLFDDKVMKQLKRRRYTGWGRLSRKLINGIRDKQSGKTILDFLKSDGFANRNFMQLIHDDSLTFKEDIQKAQVSGQGDSLHEHIANLAGSPAIKKGILQTVKVVDELVKVMGRHKPENIVIEMARENQTTQKGQKNSRERMKRIEEGIKELGSQILKEHPVENTQLQNEKLYLYYLQNGRDMYVDQELDINRLSDYDVDHIVPQSFLKDDSIDNKVLTRSDKARGKSDNVPSEEVVKKMKNYWRQLLNAKLITQRKFDNLTKAERGGLSELDKAGFIKRQLVETRQITKHVAQILDSRMNTKYDENDKLIREVKVITLKSKLVSDFRKDFQFYKVREINNYHHAHDAYLNAVVGTALIKKYPKLESEFVYGDYKVYDVRKMIAKSEQEIGKATAKYFFYSNIMNFFKTEITLANGEIRKRPLIETNGETGEIVWDKGRDFATVRKVLSMPQVNIVKKTEVQTGGFSKESILPKRNSDKLIARKKDWDPKKYGGFDSPTVAYSVLVVAKVEKGKSKKLKSVKELLGITIMERSSFEKNPIDFLEAKGYKEVKKDLIIKLPKYSLFELENGRKRMLASAGELQKGNELALPSKYVNFLYLASHYEKLKGSPEDNEQKQLFVEQHKHYLDEIIEQISEFSKRVILADANLDKVLSAYNKHRDKPIREQAENIIHLFTLTNLGAPAAFKYFDTTIDRKRYTSTKEVLDATLIHQSITGLYETRIDLSQLGGDGGGGSGSSGGGGGTLQLDDEYRLYSPLVKPDQNIQFWLEQFPQAWAETAGMGLAKQVPPQVIQLKASATPVSVRQYPLSKEAQEGIRPHVQRLIQQGILVPVQSPWNTPLLPVRKPGTNDYRPVQDLREVNKRVQDIHPTVPNPYNLLCALPPQRSWYTVLDLKDAFFCLRLHPTSQPLFAFEWRDPGTGRTGQLTWTRLPQGFKNSPTIFNEALHRDLANFRIQHPQVTLLQYVDDLLLAGATKQDCLEGTKALLLELSDLGYRASAKKAQICRREVTYLGYSLRDGQRWLTEARKKTVVQIPAPTTAKQVREFLGTAGFCRLWIPGFATLAAPLYPLTKPKGEFSWAPEHQKAFDAIKKALLSAPALALPDVTKPFTLYVDERKGVARGVLTQTLGPWRRPVAYLSKKLDPVASGWPVCLKAIAAVAILVKDADKLTLGQNITVIAPHALENIVRQPPDRWMTNARMTHYQSLLLTERVTFAPPAALNPATLLPEETDEPVTHDCHQLLIEETGVRKDLTDIPLTGEVLTWFTDGSSYVVEGKRMAGAAVVDGTRTIWASSLPEGTSAQKAELMALTQALRLAEGKSINIYTDSRYAFATAHVHGAIYKQRGWLTSAGREIKNKEEILSLLEALHLPKRLAIIHCPGHQKAKDPISRGNQMADRVAKQAAQGVNLLAGKRTADGSEFEKRTADGSEFESPKKKAKVE

SEQ ID NO: 145 - protein, 2091 aa, synthetic construct
MPAAKRVKLDGGDKKYSIGLDIGTNSVGWAVITDEYKVPSKKFKVLGNTDRHSIKKNLIGALLFDSGETAEATRLKRTARRRYTRRKNRICYLQEIFSNEMAKVDDSFFHRLEESFLVEEDKKHERHPIFGNIVDEVAYHEKYPTIYHLRKKLVDSTDKADLRLIYLALAHMIKFRGHFLIEGDLNPDNSDVDKLFIQLVQTYNQLFEENPINASGVDAKAILSARLSKSRRLENLIAQLPGEKKNGLFGNLIALSLGLTPNFKSNFDLAEDAKLQLSKDTYDDDLDNLLAQIGDQYADLFLAAKNLSDAILLSDILRVNTEITKAPLSASMIKRYDEHHQDLTLLKALVRQQLPEKYKEIFFDQSKNGYAGYIDGGASQEEFYKFIKPILEKMDGTEELLVKLNREDLLRKQRTFDNGSIPHQIHLGELHAILRRQEDFYPFLKDNREKIEKILTFRIPYYVGPLARGNSRFAWMTRKSEETITPWNFEEVVDKGASAQSFIERMTNFDKNLPNEKVLPKHSLLYEYFTVYNELTKVKYVTEGMRKPAFLSGEQKKAIVDLLFKTNRKVTVKQLKEDYFKKIECFDSVEISGVEDRFNASLGTYHDLLKIIKDKDFLDNEENEDILEDIVLTLTLFEDREMIEERLKTYAHLFDDKVMKQLKRRRYTGWGRLSRKLINGIRDKQSGKTILDFLKSDGFANRNFMQLIHDDSLTFKEDIQKAQVSGQGDSLHEHIANLAGSPAIKKGILQTVKVVDELVKVMGRHKPENIVIEMARENQTTQKGQKNSRERMKRIEEGIKELGSQILKEHPVENTQLQNEKLYLYYLQNGRDMYVDQELDINRLSDYDVDHIVPQSFLKDDSIDNKVLTRSDKARGKSDNVPSEEVVKKMKNYWRQLLNAKLITQRKFDNLTKAERGGLSELDKAGFIKRQLVETRQITKHVAQILDSRMNTKYDENDKLIREVKVITLKSKLVSDFRKDFQFYKVREINNYHHAHDAYLNAVVGTALIKKYPKLESEFVYGDYKVYDVRKMIAKSEQEIGKATAKYFFYSNIMNFFKTEITLANGEIRKRPLIETNGETGEIVWDKGRDFATVRKVLSMPQVNIVKKTEVQTGGFSKESILPKRNSDKLIARKKDWDPKKYGGFDSPTVAYSVLVVAKVEKGKSKKLKSVKELLGITIMERSSFEKNPIDFLEAKGYKEVKKDLIIKLPKYSLFELENGRKRMLASAGELQKGNELALPSKYVNFLYLASHYEKLKGSPEDNEQKQLFVEQHKHYLDEIIEQISEFSKRVILADANLDKVLSAYNKHRDKPIREQAENIIHLFTLTNLGAPAAFKYFDTTIDRKRYTSTKEVLDATLIHQSITGLYETRIDLSQLGGDGGGGSGGSGGSGGSGGTLQLDDEYRLYSPLVKPDQNIQFWLEQFPQAWAETAGMGLAKQVPPQVIQLKASATPVSVRQYPLSKEAQEGIRPHVQRLIQQGILVPVQSPWNTPLLPVRKPGTNDYRPVQDLREVNKRVQDIHPTVPNPYNLLCALPPQRSWYTVLDLKDAFFCLRLHPTSQPLFAFEWRDPGTGRTGQLTWTRLPQGFKNSPTIFNEALHRDLANFRIQHPQVTLLQYVDDLLLAGATKQDCLEGTKALLLELSDLGYRASAKKAQICRREVTYLGYSLRDGQRWLTEARKKTVVQIPAPTTAKQVREFLGTAGFCRLWIPGFATLAAPLYPLTKPKGEFSWAPEHQKAFDAIKKALLSAPALALPDVTKPFTLYVDERKGVARGVLTQTLGPWRRPVAYLSKKLDPVASGWPVCLKAIAAVAILVKDADKLTLGQNITVIAPHALENIVRQPPDRWMTNARMTHYQSLLLTERVTFAPPAALNPATLLPEETDEPVTHDCHQLLIEETGVRKDLTDIPLTGEVLTWFTDGSSYVVEGKRMAGAAVVDGTRTIWASSLPEGTSAQKAELMALTQALRLAEGKSINIYTDSRYAFATAHVHGAIYKQRGWLTSAGREIKNKEEILSLLEALHLPKRLAIIHCPGHQKAKDPISRGNQMADRVAKQAAQGVNLLAGKRTADGSEFEKRTADGSEFESPKKKAKVE

SEQ ID NO: 146 - protein, 2090 aa, synthetic construct
MPAAKRVKLDGGDKKYSIGLDIGTNSVGWAVITDEYKVPSKKFKVLGNTDRHSIKKNLIGALLFDSGETAEATRLKRTARRRYTRRKNRICYLQEIFSNEMAKVDDSFFHRLEESFLVEEDKKHERHPIFGNIVDEVAYHEKYPTIYHLRKKLVDSTDKADLRLIYLALAHMIKFRGHFLIEGDLNPDNSDVDKLFIQLVQTYNQLFEENPINASGVDAKAILSARLSKSRRLENLIAQLPGEKKNGLFGNLIALSLGLTPNFKSNFDLAEDAKLQLSKDTYDDDLDNLLAQIGDQYADLFLAAKNLSDAILLSDILRVNTEITKAPLSASMIKRYDEHHQDLTLLKALVRQQLPEKYKEIFFDQSKNGYAGYIDGGASQEEFYKFIKPILEKMDGTEELLVKLNREDLLRKQRTFDNGSIPHQIHLGELHAILRRQEDFYPFLKDNREKIEKILTFRIPYYVGPLARGNSRFAWMTRKSEETITPWNFEEVVDKGASAQSFIERMTNFDKNLPNEKVLPKHSLLYEYFTVYNELTKVKYVTEGMRKPAFLSGEQKKAIVDLLFKTNRKVTVKQLKEDYFKKIECFDSVEISGVEDRFNASLGTYHDLLKIIKDKDFLDNEENEDILEDIVLTLTLFEDREMIEERLKTYAHLFDDKVMKQLKRRRYTGWGRLSRKLINGIRDKQSGKTILDFLKSDGFANRNFMQLIHDDSLTFKEDIQKAQVSGQGDSLHEHIANLAGSPAIKKGILQTVKVVDELVKVMGRHKPENIVIEMARENQTTQKGQKNSRERMKRIEEGIKELGSQILKEHPVENTQLQNEKLYLYYLQNGRDMYVDQELDINRLSDYDVDHIVPQSFLKDDSIDNKVLTRSDKARGKSDNVPSEEVVKKMKNYWRQLLNAKLITQRKFDNLTKAERGGLSELDKAGFIKRQLVETRQITKHVAQILDSRMNTKYDENDKLIREVKVITLKSKLVSDFRKDFQFYKVREINNYHHAHDAYLNAVVGTALIKKYPKLESEFVYGDYKVYDVRKMIAKSEQEIGKATAKYFFYSNIMNFFKTEITLANGEIRKRPLIETNGETGEIVWDKGRDFATVRKVLSMPQVNIVKKTEVQTGGFSKESILPKRNSDKLIARKKDWDPKKYGGFDSPTVAYSVLVVAKVEKGKSKKLKSVKELLGITIMERSSFEKNPIDFLEAKGYKEVKKDLIIKLPKYSLFELENGRKRMLASAGELQKGNELALPSKYVNFLYLASHYEKLKGSPEDNEQKQLFVEQHKHYLDEIIEQISEFSKRVILADANLDKVLSAYNKHRDKPIREQAENIIHLFTLTNLGAPAAFKYFDTTIDRKRYTSTKEVLDATLIHQSITGLYETRIDLSQLGGDGGEAAAKGGGGSSGGTLQLDDEYRLYSPLVKPDQNIQFWLEQFPQAWAETAGMGLAKQVPPQVIQLKASATPVSVRQYPLSKEAQEGIRPHVQRLIQQGILVPVQSPWNTPLLPVRKPGTNDYRPVQDLREVNKRVQDIHPTVPNPYNLLCALPPQRSWYTVLDLKDAFFCLRLHPTSQPLFAFEWRDPGTGRTGQLTWTRLPQGFKNSPTIFNEALHRDLANFRIQHPQVTLLQYVDDLLLAGATKQDCLEGTKALLLELSDLGYRASAKKAQICRREVTYLGYSLRDGQRWLTEARKKTVVQIPAPTTAKQVREFLGTAGFCRLWIPGFATLAAPLYPLTKPKGEFSWAPEHQKAFDAIKKALLSAPALALPDVTKPFTLYVDERKGVARGVLTQTLGPWRRPVAYLSKKLDPVASGWPVCLKAIAAVAILVKDADKLTLGQNITVIAPHALENIVRQPPDRWMTNARMTHYQSLLLTERVTFAPPAALNPATLLPEETDEPVTHDCHQLLIEETGVRKDLTDIPLTGEVLTWFTDGSSYVVEGKRMAGAAVVDGTRTIWASSLPEGTSAQKAELMALTQALRLAEGKSINIYTDSRYAFATAHVHGAIYKQRGWLTSAGREIKNKEEILSLLEALHLPKRLAIIHCPGHQKAKDPISRGNQMADRVAKQAAQGVNLLAGKRTADGSEFEKRTADGSEFESPKKKAKVE

SEQ ID NO: 147 - protein, 2084 aa, synthetic construct
MPAAKRVKLDGGDKKYSIGLDIGTNSVGWAVITDEYKVPSKKFKVLGNTDRHSIKKNLIGALLFDSGETAEATRLKRTARRRYTRRKNRICYLQEIFSNEMAKVDDSFFHRLEESFLVEEDKKHERHPIFGNIVDEVAYHEKYPTIYHLRKKLVDSTDKADLRLIYLALAHMIKFRGHFLIEGDLNPDNSDVDKLFIQLVQTYNQLFEENPINASGVDAKAILSARLSKSRRLENLIAQLPGEKKNGLFGNLIALSLGLTPNFKSNFDLAEDAKLQLSKDTYDDDLDNLLAQIGDQYADLFLAAKNLSDAILLSDILRVNTEITKAPLSASMIKRYDEHHQDLTLLKALVRQQLPEKYKEIFFDQSKNGYAGYIDGGASQEEFYKFIKPILEKMDGTEELLVKLNREDLLRKQRTFDNGSIPHQIHLGELHAILRRQEDFYPFLKDNREKIEKILTFRIPYYVGPLARGNSRFAWMTRKSEETITPWNFEEVVDKGASAQSFIERMTNFDKNLPNEKVLPKHSLLYEYFTVYNELTKVKYVTEGMRKPAFLSGEQKKAIVDLLFKTNRKVTVKQLKEDYFKKIECFDSVEISGVEDRFNASLGTYHDLLKIIKDKDFLDNEENEDILEDIVLTLTLFEDREMIEERLKTYAHLFDDKVMKQLKRRRYTGWGRLSRKLINGIRDKQSGKTILDFLKSDGFANRNFMQLIHDDSLTFKEDIQKAQVSGQGDSLHEHIANLAGSPAIKKGILQTVKVVDELVKVMGRHKPENIVIEMARENQTTQKGQKNSRERMKRIEEGIKELGSQILKEHPVENTQLQNEKLYLYYLQNGRDMYVDQELDINRLSDYDVDHIVPQSFLKDDSIDNKVLTRSDKARGKSDNVPSEEVVKKMKNYWRQLLNAKLITQRKFDNLTKAERGGLSELDKAGFIKRQLVETRQITKHVAQILDSRMNTKYDENDKLIREVKVITLKSKLVSDFRKDFQFYKVREINNYHHAHDAYLNAVVGTALIKKYPKLESEFVYGDYKVYDVRKMIAKSEQEIGKATAKYFFYSNIMNFFKTEITLANGEIRKRPLIETNGETGEIVWDKGRDFATVRKVLSMPQVNIVKKTEVQTGGFSKESILPKRNSDKLIARKKDWDPKKYGGFDSPTVAYSVLVVAKVEKGKSKKLKSVKELLGITIMERSSFEKNPIDFLEAKGYKEVKKDLIIKLPKYSLFELENGRKRMLASAGELQKGNELALPSKYVNFLYLASHYEKLKGSPEDNEQKQLFVEQHKHYLDEIIEQISEFSKRVILADANLDKVLSAYNKHRDKPIREQAENIIHLFTLTNLGAPAAFKYFDTTIDRKRYTSTKEVLDATLIHQSITGLYETRIDLSQLGGDGGGGGGSGGTLQLDDEYRLYSPLVKPDQNIQFWLEQFPQAWAETAGMGLAKQVPPQVIQLKASATPVSVRQYPLSKEAQEGIRPHVQRLIQQGILVPVQSPWNTPLLPVRKPGTNDYRPVQDLREVNKRVQDIHPTVPNPYNLLCALPPQRSWYTVLDLKDAFFCLRLHPTSQPLFAFEWRDPGTGRTGQLTWTRLPQGFKNSPTIFNEALHRDLANFRIQHPQVTLLQYVDDLLLAGATKQDCLEGTKALLLELSDLGYRASAKKAQICRREVTYLGYSLRDGQRWLTEARKKTVVQIPAPTTAKQVREFLGTAGFCRLWIPGFATLAAPLYPLTKPKGEFSWAPEHQKAFDAIKKALLSAPALALPDVTKPFTLYVDERKGVARGVLTQTLGPWRRPVAYLSKKLDPVASGWPVCLKAIAAVAILVKDADKLTLGQNITVIAPHALENIVRQPPDRWMTNARMTHYQSLLLTERVTFAPPAALNPATLLPEETDEPVTHDCHQLLIEETGVRKDLTDIPLTGEVLTWFTDGSSYVVEGKRMAGAAVVDGTRTIWASSLPEGTSAQKAELMALTQALRLAEGKSINIYTDSRYAFATAHVHGAIYKQRGWLTSAGREIKNKEEILSLLEALHLPKRLAIIHCPGHQKAKDPISRGNQMADRVAKQAAQGVNLLAGKRTADGSEFEKRTADGSEFESPKKKAKVE

SEQ ID NO: 148 - protein, 2085 aa, synthetic construct
MPAAKRVKLDGGDKKYSIGLDIGTNSVGWAVITDEYKVPSKKFKVLGNTDRHSIKKNLIGALLFDSGETAEATRLKRTARRRYTRRKNRICYLQEIFSNEMAKVDDSFFHRLEESFLVEEDKKHERHPIFGNIVDEVAYHEKYPTIYHLRKKLVDSTDKADLRLIYLALAHMIKFRGHFLIEGDLNPDNSDVDKLFIQLVQTYNQLFEENPINASGVDAKAILSARLSKSRRLENLIAQLPGEKKNGLFGNLIALSLGLTPNFKSNFDLAEDAKLQLSKDTYDDDLDNLLAQIGDQYADLFLAAKNLSDAILLSDILRVNTEITKAPLSASMIKRYDEHHQDLTLLKALVRQQLPEKYKEIFFDQSKNGYAGYIDGGASQEEFYKFIKPILEKMDGTEELLVKLNREDLLRKQRTFDNGSIPHQIHLGELHAILRRQEDFYPFLKDNREKIEKILTFRIPYYVGPLARGNSRFAWMTRKSEETITPWNFEEVVDKGASAQSFIERMTNFDKNLPNEKVLPKHSLLYEYFTVYNELTKVKYVTEGMRKPAFLSGEQKKAIVDLLFKTNRKVTVKQLKEDYFKKIECFDSVEISGVEDRFNASLGTYHDLLKIIKDKDFLDNEENEDILEDIVLTLTLFEDREMIEERLKTYAHLFDDKVMKQLKRRRYTGWGRLSRKLINGIRDKQSGKTILDFLKSDGFANRNFMQLIHDDSLTFKEDIQKAQVSGQGDSLHEHIANLAGSPAIKKGILQTVKVVDELVKVMGRHKPENIVIEMARENQTTQKGQKNSRERMKRIEEGIKELGSQILKEHPVENTQLQNEKLYLYYLQNGRDMYVDQELDINRLSDYDVDHIVPQSFLKDDSIDNKVLTRSDKARGKSDNVPSEEVVKKMKNYWRQLLNAKLITQRKFDNLTKAERGGLSELDKAGFIKRQLVETRQITKHVAQILDSRMNTKYDENDKLIREVKVITLKSKLVSDFRKDFQFYKVREINNYHHAHDAYLNAVVGTALIKKYPKLESEFVYGDYKVYDVRKMIAKSEQEIGKATAKYFFYSNIMNFFKTEITLANGEIRKRPLIETNGETGEIVWDKGRDFATVRKVLSMPQVNIVKKTEVQTGGFSKESILPKRNSDKLIARKKDWDPKKYGGFDSPTVAYSVLVVAKVEKGKSKKLKSVKELLGITIMERSSFEKNPIDFLEAKGYKEVKKDLIIKLPKYSLFELENGRKRMLASAGELQKGNELALPSKYVNFLYLASHYEKLKGSPEDNEQKQLFVEQHKHYLDEIIEQISEFSKRVILADANLDKVLSAYNKHRDKPIREQAENIIHLFTLTNLGAPAAFKYFDTTIDRKRYTSTKEVLDATLIHQSITGLYETRIDLSQLGGDGGGSSPAPGGTLQLDDEYRLYSPLVKPDQNIQFWLEQFPQAWAETAGMGLAKQVPPQVIQLKASATPVSVRQYPLSKEAQEGIRPHVQRLIQQGILVPVQSPWNTPLLPVRKPGTNDYRPVQDLREVNKRVQDIHPTVPNPYNLLCALPPQRSWYTVLDLKDAFFCLRLHPTSQPLFAFEWRDPGTGRTGQLTWTRLPQGFKNSPTIFNEALHRDLANFRIQHPQVTLLQYVDDLLLAGATKQDCLEGTKALLLELSDLGYRASAKKAQICRREVTYLGYSLRDGQRWLTEARKKTVVQIPAPTTAKQVREFLGTAGFCRLWIPGFATLAAPLYPLTKPKGEFSWAPEHQKAFDAIKKALLSAPALALPDVTKPFTLYVDERKGVARGVLTQTLGPWRRPVAYLSKKLDPVASGWPVCLKAIAAVAILVKDADKLTLGQNITVIAPHALENIVRQPPDRWMTNARMTHYQSLLLTERVTFAPPAALNPATLLPEETDEPVTHDCHQLLIEETGVRKDLTDIPLTGEVLTWFTDGSSYVVEGKRMAGAAVVDGTRTIWASSLPEGTSAQKAELMALTQALRLAEGKSINIYTDSRYAFATAHVHGAIYKQRGWLTSAGREIKNKEEILSLLEALHLPKRLAIIHCPGHQKAKDPISRGNQMADRVAKQAAQGVNLLAGKRTADGSEFEKRTADGSEFESPKKKAKVE

SEQ ID NO: 149 - protein, 2083 aa, synthetic construct
MPAAKRVKLDGGDKKYSIGLDIGTNSVGWAVITDEYKVPSKKFKVLGNTDRHSIKKNLIGALLFDSGETAEATRLKRTARRRYTRRKNRICYLQEIFSNEMAKVDDSFFHRLEESFLVEEDKKHERHPIFGNIVDEVAYHEKYPTIYHLRKKLVDSTDKADLRLIYLALAHMIKFRGHFLIEGDLNPDNSDVDKLFIQLVQTYNQLFEENPINASGVDAKAILSARLSKSRRLENLIAQLPGEKKNGLFGNLIALSLGLTPNFKSNFDLAEDAKLQLSKDTYDDDLDNLLAQIGDQYADLFLAAKNLSDAILLSDILRVNTEITKAPLSASMIKRYDEHHQDLTLLKALVRQQLPEKYKEIFFDQSKNGYAGYIDGGASQEEFYKFIKPILEKMDGTEELLVKLNREDLLRKQRTFDNGSIPHQIHLGELHAILRRQEDFYPFLKDNREKIEKILTFRIPYYVGPLARGNSRFAWMTRKSEETITPWNFEEVVDKGASAQSFIERMTNFDKNLPNEKVLPKHSLLYEYFTVYNELTKVKYVTEGMRKPAFLSGEQKKAIVDLLFKTNRKVTVKQLKEDYFKKIECFDSVEISGVEDRFNASLGTYHDLLKIIKDKDFLDNEENEDILEDIVLTLTLFEDREMIEERLKTYAHLFDDKVMKQLKRRRYTGWGRLSRKLINGIRDKQSGKTILDFLKSDGFANRNFMQLIHDDSLTFKEDIQKAQVSGQGDSLHEHIANLAGSPAIKKGILQTVKVVDELVKVMGRHKPENIVIEMARENQTTQKGQKNSRERMKRIEEGIKELGSQILKEHPVENTQLQNEKLYLYYLQNGRDMYVDQELDINRLSDYDVDHIVPQSFLKDDSIDNKVLTRSDKARGKSDNVPSEEVVKKMKNYWRQLLNAKLITQRKFDNLTKAERGGLSELDKAGFIKRQLVETRQITKHVAQILDSRMNTKYDENDKLIREVKVITLKSKLVSDFRKDFQFYKVREINNYHHAHDAYLNAVVGTALIKKYPKLESEFVYGDYKVYDVRKMIAKSEQEIGKATAKYFFYSNIMNFFKTEITLANGEIRKRPLIETNGETGEIVWDKGRDFATVRKVLSMPQVNIVKKTEVQTGGFSKESILPKRNSDKLIARKKDWDPKKYGGFDSPTVAYSVLVVAKVEKGKSKKLKSVKELLGITIMERSSFEKNPIDFLEAKGYKEVKKDLIIKLPKYSLFELENGRKRMLASAGELQKGNELALPSKYVNFLYLASHYEKLKGSPEDNEQKQLFVEQHKHYLDEIIEQISEFSKRVILADANLDKVLSAYNKHRDKPIREQAENIIHLFTLTNLGAPAAFKYFDTTIDRKRYTSTKEVLDATLIHQSITGLYETRIDLSQLGGDGGGGGGGGTLQLDDEYRLYSPLVKPDQNIQFWLEQFPQAWAETAGMGLAKQVPPQVIQLKASATPVSVRQYPLSKEAQEGIRPHVQRLIQQGILVPVQSPWNTPLLPVRKPGTNDYRPVQDLREVNKRVQDIHPTVPNPYNLLCALPPQRSWYTVLDLKDAFFCLRLHPTSQPLFAFEWRDPGTGRTGQLTWTRLPQGFKNSPTIFNEALHRDLANFRIQHPQVTLLQYVDDLLLAGATKQDCLEGTKALLLELSDLGYRASAKKAQICRREVTYLGYSLRDGQRWLTEARKKTVVQIPAPTTAKQVREFLGTAGFCRLWIPGFATLAAPLYPLTKPKGEFSWAPEHQKAFDAIKKALLSAPALALPDVTKPFTLYVDERKGVARGVLTQTLGPWRRPVAYLSKKLDPVASGWPVCLKAIAAVAILVKDADKLTLGQNITVIAPHALENIVRQPPDRWMTNARMTHYQSLLLTERVTFAPPAALNPATLLPEETDEPVTHDCHQLLIEETGVRKDLTDIPLTGEVLTWFTDGSSYVVEGKRMAGAAVVDGTRTIWASSLPEGTSAQKAELMALTQALRLAEGKSINIYTDSRYAFATAHVHGAIYKQRGWLTSAGREIKNKEEILSLLEALHLPKRLAIIHCPGHQKAKDPISRGNQMADRVAKQAAQGVNLLAGKRTADGSEFEKRTADGSEFESPKKKAKVE

SEQ ID NO: 150 - protein, 2104 aa, synthetic construct
MPAAKRVKLDGGDKKYSIGLDIGTNSVGWAVITDEYKVPSKKFKVLGNTDRHSIKKNLIGALLFDSGETAEATRLKRTARRRYTRRKNRICYLQEIFSNEMAKVDDSFFHRLEESFLVEEDKKHERHPIFGNIVDEVAYHEKYPTIYHLRKKLVDSTDKADLRLIYLALAHMIKFRGHFLIEGDLNPDNSDVDKLFIQLVQTYNQLFEENPINASGVDAKAILSARLSKSRRLENLIAQLPGEKKNGLFGNLIALSLGLTPNFKSNFDLAEDAKLQLSKDTYDDDLDNLLAQIGDQYADLFLAAKNLSDAILLSDILRVNTEITKAPLSASMIKRYDEHHQDLTLLKALVRQQLPEKYKEIFFDQSKNGYAGYIDGGASQEEFYKFIKPILEKMDGTEELLVKLNREDLLRKQRTFDNGSIPHQIHLGELHAILRRQEDFYPFLKDNREKIEKILTFRIPYYVGPLARGNSRFAWMTRKSEETITPWNFEEVVDKGASAQSFIERMTNFDKNLPNEKVLPKHSLLYEYFTVYNELTKVKYVTEGMRKPAFLSGEQKKAIVDLLFKTNRKVTVKQLKEDYFKKIECFDSVEISGVEDRFNASLGTYHDLLKIIKDKDFLDNEENEDILEDIVLTLTLFEDREMIEERLKTYAHLFDDKVMKQLKRRRYTGWGRLSRKLINGIRDKQSGKTILDFLKSDGFANRNFMQLIHDDSLTFKEDIQKAQVSGQGDSLHEHIANLAGSPAIKKGILQTVKVVDELVKVMGRHKPENIVIEMARENQTTQKGQKNSRERMKRIEEGIKELGSQILKEHPVENTQLQNEKLYLYYLQNGRDMYVDQELDINRLSDYDVDHIVPQSFLKDDSIDNKVLTRSDKARGKSDNVPSEEVVKKMKNYWRQLLNAKLITQRKFDNLTKAERGGLSELDKAGFIKRQLVETRQITKHVAQILDSRMNTKYDENDKLIREVKVITLKSKLVSDFRKDFQFYKVREINNYHHAHDAYLNAVVGTALIKKYPKLESEFVYGDYKVYDVRKMIAKSEQEIGKATAKYFFYSNIMNFFKTEITLANGEIRKRPLIETNGETGEIVWDKGRDFATVRKVLSMPQVNIVKKTEVQTGGFSKESILPKRNSDKLIARKKDWDPKKYGGFDSPTVAYSVLVVAKVEKGKSKKLKSVKELLGITIMERSSFEKNPIDFLEAKGYKEVKKDLIIKLPKYSLFELENGRKRMLASAGELQKGNELALPSKYVNFLYLASHYEKLKGSPEDNEQKQLFVEQHKHYLDEIIEQISEFSKRVILADANLDKVLSAYNKHRDKPIREQAENIIHLFTLTNLGAPAAFKYFDTTIDRKRYTSTKEVLDATLIHQSITGLYETRIDLSQLGGDGGEAAAKEAAAKEAAAKEAAAKEAAAKGGTLQLDDEYRLYSPLVKPDQNIQFWLEQFPQAWAETAGMGLAKQVPPQVIQLKASATPVSVRQYPLSKEAQEGIRPHVQRLIQQGILVPVQSPWNTPLLPVRKPGTNDYRPVQDLREVNKRVQDIHPTVPNPYNLLCALPPQRSWYTVLDLKDAFFCLRLHPTSQPLFAFEWRDPGTGRTGQLTWTRLPQGFKNSPTIFNEALHRDLANFRIQHPQVTLLQYVDDLLLAGATKQDCLEGTKALLLELSDLGYRASAKKAQICRREVTYLGYSLRDGQRWLTEARKKTVVQIPAPTTAKQVREFLGTAGFCRLWIPGFATLAAPLYPLTKPKGEFSWAPEHQKAFDAIKKALLSAPALALPDVTKPFTLYVDERKGVARGVLTQTLGPWRRPVAYLSKKLDPVASGWPVCLKAIAAVAILVKDADKLTLGQNITVIAPHALENIVRQPPDRWMTNARMTHYQSLLLTERVTFAPPAALNPATLLPEETDEPVTHDCHQLLIEETGVRKDLTDIPLTGEVLTWFTDGSSYVVEGKRMAGAAVVDGTRTIWASSLPEGTSAQKAELMALTQALRLAEGKSINIYTDSRYAFATAHVHGAIYKQRGWLTSAGREIKNKEEILSLLEALHLPKRLAIIHCPGHQKAKDPISRGNQMADRVAKQAAQGVNLLAGKRTADGSEFEKRTADGSEFESPKKKAKVE

SEQ ID NO: 151 - protein, 2084 aa, synthetic construct
MPAAKRVKLDGGDKKYSIGLDIGTNSVGWAVITDEYKVPSKKFKVLGNTDRHSIKKNLIGALLFDSGETAEATRLKRTARRRYTRRKNRICYLQEIFSNEMAKVDDSFFHRLEESFLVEEDKKHERHPIFGNIVDEVAYHEKYPTIYHLRKKLVDSTDKADLRLIYLALAHMIKFRGHFLIEGDLNPDNSDVDKLFIQLVQTYNQLFEENPINASGVDAKAILSARLSKSRRLENLIAQLPGEKKNGLFGNLIALSLGLTPNFKSNFDLAEDAKLQLSKDTYDDDLDNLLAQIGDQYADLFLAAKNLSDAILLSDILRVNTEITKAPLSASMIKRYDEHHQDLTLLKALVRQQLPEKYKEIFFDQSKNGYAGYIDGGASQEEFYKFIKPILEKMDGTEELLVKLNREDLLRKQRTFDNGSIPHQIHLGELHAILRRQEDFYPFLKDNREKIEKILTFRIPYYVGPLARGNSRFAWMTRKSEETITPWNFEEVVDKGASAQSFIERMTNFDKNLPNEKVLPKHSLLYEYFTVYNELTKVKYVTEGMRKPAFLSGEQKKAIVDLLFKTNRKVTVKQLKEDYFKKIECFDSVEISGVEDRFNASLGTYHDLLKIIKDKDFLDNEENEDILEDIVLTLTLFEDREMIEERLKTYAHLFDDKVMKQLKRRRYTGWGRLSRKLINGIRDKQSGKTILDFLKSDGFANRNFMQLIHDDSLTFKEDIQKAQVSGQGDSLHEHIANLAGSPAIKKGILQTVKVVDELVKVMGRHKPENIVIEMARENQTTQKGQKNSRERMKRIEEGIKELGSQILKEHPVENTQLQNEKLYLYYLQNGRDMYVDQELDINRLSDYDVDHIVPQSFLKDDSIDNKVLTRSDKARGKSDNVPSEEVVKKMKNYWRQLLNAKLITQRKFDNLTKAERGGLSELDKAGFIKRQLVETRQITKHVAQILDSRMNTKYDENDKLIREVKVITLKSKLVSDFRKDFQFYKVREINNYHHAHDAYLNAVVGTALIKKYPKLESEFVYGDYKVYDVRKMIAKSEQEIGKATAKYFFYSNIMNFFKTEITLANGEIRKRPLIETNGETGEIVWDKGRDFATVRKVLSMPQVNIVKKTEVQTGGFSKESILPKRNSDKLIARKKDWDPKKYGGFDSPTVAYSVLVVAKVEKGKSKKLKSVKELLGITIMERSSFEKNPIDFLEAKGYKEVKKDLIIKLPKYSLFELENGRKRMLASAGELQKGNELALPSKYVNFLYLASHYEKLKGSPEDNEQKQLFVEQHKHYLDEIIEQISEFSKRVILADANLDKVLSAYNKHRDKPIREQAENIIHLFTLTNLGAPAAFKYFDTTIDRKRYTSTKEVLDATLIHQSITGLYETRIDLSQLGGDGGEAAAKGGTLQLDDEYRLYSPLVKPDQNIQFWLEQFPQAWAETAGMGLAKQVPPQVIQLKASATPVSVRQYPLSKEAQEGIRPHVQRLIQQGILVPVQSPWNTPLLPVRKPGTNDYRPVQDLREVNKRVQDIHPTVPNPYNLLCALPPQRSWYTVLDLKDAFFCLRLHPTSQPLFAFEWRDPGTGRTGQLTWTRLPQGFKNSPTIFNEALHRDLANFRIQHPQVTLLQYVDDLLLAGATKQDCLEGTKALLLELSDLGYRASAKKAQICRREVTYLGYSLRDGQRWLTEARKKTVVQIPAPTTAKQVREFLGTAGFCRLWIPGFATLAAPLYPLTKPKGEFSWAPEHQKAFDAIKKALLSAPALALPDVTKPFTLYVDERKGVARGVLTQTLGPWRRPVAYLSKKLDPVASGWPVCLKAIAAVAILVKDADKLTLGQNITVIAPHALENIVRQPPDRWMTNARMTHYQSLLLTERVTFAPPAALNPATLLPEETDEPVTHDCHQLLIEETGVRKDLTDIPLTGEVLTWFTDGSSYVVEGKRMAGAAVVDGTRTIWASSLPEGTSAQKAELMALTQALRLAEGKSINIYTDSRYAFATAHVHGAIYKQRGWLTSAGREIKNKEEILSLLEALHLPKRLAIIHCPGHQKAKDPISRGNQMADRVAKQAAQGVNLLAGKRTADGSEFEKRTADGSEFESPKKKAKVE

SEQ ID NO: 152 - protein, 2086 aa, synthetic construct
MPAAKRVKLDGGDKKYSIGLDIGTNSVGWAVITDEYKVPSKKFKVLGNTDRHSIKKNLIGALLFDSGETAEATRLKRTARRRYTRRKNRICYLQEIFSNEMAKVDDSFFHRLEESFLVEEDKKHERHPIFGNIVDEVAYHEKYPTIYHLRKKLVDSTDKADLRLIYLALAHMIKFRGHFLIEGDLNPDNSDVDKLFIQLVQTYNQLFEENPINASGVDAKAILSARLSKSRRLENLIAQLPGEKKNGLFGNLIALSLGLTPNFKSNFDLAEDAKLQLSKDTYDDDLDNLLAQIGDQYADLFLAAKNLSDAILLSDILRVNTEITKAPLSASMIKRYDEHHQDLTLLKALVRQQLPEKYKEIFFDQSKNGYAGYIDGGASQEEFYKFIKPILEKMDGTEELLVKLNREDLLRKQRTFDNGSIPHQIHLGELHAILRRQEDFYPFLKDNREKIEKILTFRIPYYVGPLARGNSRFAWMTRKSEETITPWNFEEVVDKGASAQSFIERMTNFDKNLPNEKVLPKHSLLYEYFTVYNELTKVKYVTEGMRKPAFLSGEQKKAIVDLLFKTNRKVTVKQLKEDYFKKIECFDSVEISGVEDRFNASLGTYHDLLKIIKDKDFLDNEENEDILEDIVLTLTLFEDREMIEERLKTYAHLFDDKVMKQLKRRRYTGWGRLSRKLINGIRDKQSGKTILDFLKSDGFANRNFMQLIHDDSLTFKEDIQKAQVSGQGDSLHEHIANLAGSPAIKKGILQTVKVVDELVKVMGRHKPENIVIEMARENQTTQKGQKNSRERMKRIEEGIKELGSQILKEHPVENTQLQNEKLYLYYLQNGRDMYVDQELDINRLSDYDVDHIVPQSFLKDDSIDNKVLTRSDKARGKSDNVPSEEVVKKMKNYWRQLLNAKLITQRKFDNLTKAERGGLSELDKAGFIKRQLVETRQITKHVAQILDSRMNTKYDENDKLIREVKVITLKSKLVSDFRKDFQFYKVREINNYHHAHDAYLNAVVGTALIKKYPKLESEFVYGDYKVYDVRKMIAKSEQEIGKATAKYFFYSNIMNFFKTEITLANGEIRKRPLIETNGETGEIVWDKGRDFATVRKVLSMPQVNIVKKTEVQTGGFSKESILPKRNSDKLIARKKDWDPKKYGGFDSPTVAYSVLVVAKVEKGKSKKLKSVKELLGITIMERSSFEKNPIDFLEAKGYKEVKKDLIIKLPKYSLFELENGRKRMLASAGELQKGNELALPSKYVNFLYLASHYEKLKGSPEDNEQKQLFVEQHKHYLDEIIEQISEFSKRVILADANLDKVLSAYNKHRDKPIREQAENIIHLFTLTNLGAPAAFKYFDTTIDRKRYTSTKEVLDATLIHQSITGLYETRIDLSQLGGDGGGGGGGGGGGTLQLDDEYRLYSPLVKPDQNIQFWLEQFPQAWAETAGMGLAKQVPPQVIQLKASATPVSVRQYPLSKEAQEGIRPHVQRLIQQGILVPVQSPWNTPLLPVRKPGTNDYRPVQDLREVNKRVQDIHPTVPNPYNLLCALPPQRSWYTVLDLKDAFFCLRLHPTSQPLFAFEWRDPGTGRTGQLTWTRLPQGFKNSPTIFNEALHRDLANFRIQHPQVTLLQYVDDLLLAGATKQDCLEGTKALLLELSDLGYRASAKKAQICRREVTYLGYSLRDGQRWLTEARKKTVVQIPAPTTAKQVREFLGTAGFCRLWIPGFATLAAPLYPLTKPKGEFSWAPEHQKAFDAIKKALLSAPALALPDVTKPFTLYVDERKGVARGVLTQTLGPWRRPVAYLSKKLDPVASGWPVCLKAIAAVAILVKDADKLTLGQNITVIAPHALENIVRQPPDRWMTNARMTHYQSLLLTERVTFAPPAALNPATLLPEETDEPVTHDCHQLLIEETGVRKDLTDIPLTGEVLTWFTDGSSYVVEGKRMAGAAVVDGTRTIWASSLPEGTSAQKAELMALTQALRLAEGKSINIYTDSRYAFATAHVHGAIYKQRGWLTSAGREIKNKEEILSLLEALHLPKRLAIIHCPGHQKAKDPISRGNQMADRVAKQAAQGVNLLAGKRTADGSEFEKRTADGSEFESPKKKAKVE

SEQ ID NO: 153 - protein, 2091 aa, synthetic construct
MPAAKRVKLDGGDKKYSIGLDIGTNSVGWAVITDEYKVPSKKFKVLGNTDRHSIKKNLIGALLFDSGETAEATRLKRTARRRYTRRKNRICYLQEIFSNEMAKVDDSFFHRLEESFLVEEDKKHERHPIFGNIVDEVAYHEKYPTIYHLRKKLVDSTDKADLRLIYLALAHMIKFRGHFLIEGDLNPDNSDVDKLFIQLVQTYNQLFEENPINASGVDAKAILSARLSKSRRLENLIAQLPGEKKNGLFGNLIALSLGLTPNFKSNFDLAEDAKLQLSKDTYDDDLDNLLAQIGDQYADLFLAAKNLSDAILLSDILRVNTEITKAPLSASMIKRYDEHHQDLTLLKALVRQQLPEKYKEIFFDQSKNGYAGYIDGGASQEEFYKFIKPILEKMDGTEELLVKLNREDLLRKQRTFDNGSIPHQIHLGELHAILRRQEDFYPFLKDNREKIEKILTFRIPYYVGPLARGNSRFAWMTRKSEETITPWNFEEVVDKGASAQSFIERMTNFDKNLPNEKVLPKHSLLYEYFTVYNELTKVKYVTEGMRKPAFLSGEQKKAIVDLLFKTNRKVTVKQLKEDYFKKIECFDSVEISGVEDRFNASLGTYHDLLKIIKDKDFLDNEENEDILEDIVLTLTLFEDREMIEERLKTYAHLFDDKVMKQLKRRRYTGWGRLSRKLINGIRDKQSGKTILDFLKSDGFANRNFMQLIHDDSLTFKEDIQKAQVSGQGDSLHEHIANLAGSPAIKKGILQTVKVVDELVKVMGRHKPENIVIEMARENQTTQKGQKNSRERMKRIEEGIKELGSQILKEHPVENTQLQNEKLYLYYLQNGRDMYVDQELDINRLSDYDVDHIVPQSFLKDDSIDNKVLTRSDKARGKSDNVPSEEVVKKMKNYWRQLLNAKLITQRKFDNLTKAERGGLSELDKAGFIKRQLVETRQITKHVAQILDSRMNTKYDENDKLIREVKVITLKSKLVSDFRKDFQFYKVREINNYHHAHDAYLNAVVGTALIKKYPKLESEFVYGDYKVYDVRKMIAKSEQEIGKATAKYFFYSNIMNFFKTEITLANGEIRKRPLIETNGETGEIVWDKGRDFATVRKVLSMPQVNIVKKTEVQTGGFSKESILPKRNSDKLIARKKDWDPKKYGGFDSPTVAYSVLVVAKVEKGKSKKLKSVKELLGITIMERSSFEKNPIDFLEAKGYKEVKKDLIIKLPKYSLFELENGRKRMLASAGELQKGNELALPSKYVNFLYLASHYEKLKGSPEDNEQKQLFVEQHKHYLDEIIEQISEFSKRVILADANLDKVLSAYNKHRDKPIREQAENIIHLFTLTNLGAPAAFKYFDTTIDRKRYTSTKEVLDATLIHQSITGLYETRIDLSQLGGDGGGSAGSAAGSGEFGGTLQLDDEYRLYSPLVKPDQNIQFWLEQFPQAWAETAGMGLAKQVPPQVIQLKASATPVSVRQYPLSKEAQEGIRPHVQRLIQQGILVPVQSPWNTPLLPVRKPGTNDYRPVQDLREVNKRVQDIHPTVPNPYNLLCALPPQRSWYTVLDLKDAFFCLRLHPTSQPLFAFEWRDPGTGRTGQLTWTRLPQGFKNSPTIFNEALHRDLANFRIQHPQVTLLQYVDDLLLAGATKQDCLEGTKALLLELSDLGYRASAKKAQICRREVTYLGYSLRDGQRWLTEARKKTVVQIPAPTTAKQVREFLGTAGFCRLWIPGFATLAAPLYPLTKPKGEFSWAPEHQKAFDAIKKALLSAPALALPDVTKPFTLYVDERKGVARGVLTQTLGPWRRPVAYLSKKLDPVASGWPVCLKAIAAVAILVKDADKLTLGQNITVIAPHALENIVRQPPDRWMTNARMTHYQSLLLTERVTFAPPAALNPATLLPEETDEPVTHDCHQLLIEETGVRKDLTDIPLTGEVLTWFTDGSSYVVEGKRMAGAAVVDGTRTIWASSLPEGTSAQKAELMALTQALRLAEGKSINIYTDSRYAFATAHVHGAIYKQRGWLTSAGREIKNKEEILSLLEALHLPKRLAIIHCPGHQKAKDPISRGNQMADRVAKQAAQGVNLLAGKRTADGSEFEKRTADGSEFESPKKKAKVE

SEQ ID NO: 154 - protein, 2090 aa, synthetic construct
MPAAKRVKLDGGDKKYSIGLDIGTNSVGWAVITDEYKVPSKKFKVLGNTDRHSIKKNLIGALLFDSGETAEATRLKRTARRRYTRRKNRICYLQEIFSNEMAKVDDSFFHRLEESFLVEEDKKHERHPIFGNIVDEVAYHEKYPTIYHLRKKLVDSTDKADLRLIYLALAHMIKFRGHFLIEGDLNPDNSDVDKLFIQLVQTYNQLFEENPINASGVDAKAILSARLSKSRRLENLIAQLPGEKKNGLFGNLIALSLGLTPNFKSNFDLAEDAKLQLSKDTYDDDLDNLLAQIGDQYADLFLAAKNLSDAILLSDILRVNTEITKAPLSASMIKRYDEHHQDLTLLKALVRQQLPEKYKEIFFDQSKNGYAGYIDGGASQEEFYKFIKPILEKMDGTEELLVKLNREDLLRKQRTFDNGSIPHQIHLGELHAILRRQEDFYPFLKDNREKIEKILTFRIPYYVGPLARGNSRFAWMTRKSEETITPWNFEEVVDKGASAQSFIERMTNFDKNLPNEKVLPKHSLLYEYFTVYNELTKVKYVTEGMRKPAFLSGEQKKAIVDLLFKTNRKVTVKQLKEDYFKKIECFDSVEISGVEDRFNASLGTYHDLLKIIKDKDFLDNEENEDILEDIVLTLTLFEDREMIEERLKTYAHLFDDKVMKQLKRRRYTGWGRLSRKLINGIRDKQSGKTILDFLKSDGFANRNFMQLIHDDSLTFKEDIQKAQVSGQGDSLHEHIANLAGSPAIKKGILQTVKVVDELVKVMGRHKPENIVIEMARENQTTQKGQKNSRERMKRIEEGIKELGSQILKEHPVENTQLQNEKLYLYYLQNGRDMYVDQELDINRLSDYDVDHIVPQSFLKDDSIDNKVLTRSDKARGKSDNVPSEEVVKKMKNYWRQLLNAKLITQRKFDNLTKAERGGLSELDKAGFIKRQLVETRQITKHVAQILDSRMNTKYDENDKLIREVKVITLKSKLVSDFRKDFQFYKVREINNYHHAHDAYLNAVVGTALIKKYPKLESEFVYGDYKVYDVRKMIAKSEQEIGKATAKYFFYSNIMNFFKTEITLANGEIRKRPLIETNGETGEIVWDKGRDFATVRKVLSMPQVNIVKKTEVQTGGFSKESILPKRNSDKLIARKKDWDPKKYGGFDSPTVAYSVLVVAKVEKGKSKKLKSVKELLGITIMERSSFEKNPIDFLEAKGYKEVKKDLIIKLPKYSLFELENGRKRMLASAGELQKGNELALPSKYVNFLYLASHYEKLKGSPEDNEQKQLFVEQHKHYLDEIIEQISEFSKRVILADANLDKVLSAYNKHRDKPIREQAENIIHLFTLTNLGAPAAFKYFDTTIDRKRYTSTKEVLDATLIHQSITGLYETRIDLSQLGGDGGGGSEAAAKPAPGGTLQLDDEYRLYSPLVKPDQNIQFWLEQFPQAWAETAGMGLAKQVPPQVIQLKASATPVSVRQYPLSKEAQEGIRPHVQRLIQQGILVPVQSPWNTPLLPVRKPGTNDYRPVQDLREVNKRVQDIHPTVPNPYNLLCALPPQRSWYTVLDLKDAFFCLRLHPTSQPLFAFEWRDPGTGRTGQLTWTRLPQGFKNSPTIFNEALHRDLANFRIQHPQVTLLQYVDDLLLAGATKQDCLEGTKALLLELSDLGYRASAKKAQICRREVTYLGYSLRDGQRWLTEARKKTVVQIPAPTTAKQVREFLGTAGFCRLWIPGFATLAAPLYPLTKPKGEFSWAPEHQKAFDAIKKALLSAPALALPDVTKPFTLYVDERKGVARGVLTQTLGPWRRPVAYLSKKLDPVASGWPVCLKAIAAVAILVKDADKLTLGQNITVIAPHALENIVRQPPDRWMTNARMTHYQSLLLTERVTFAPPAALNPATLLPEETDEPVTHDCHQLLIEETGVRKDLTDIPLTGEVLTWFTDGSSYVVEGKRMAGAAVVDGTRTIWASSLPEGTSAQKAELMALTQALRLAEGKSINIYTDSRYAFATAHVHGAIYKQRGWLTSAGREIKNKEEILSLLEALHLPKRLAIIHCPGHQKAKDPISRGNQMADRVAKQAAQGVNLLAGKRTADGSEFEKRTADGSEFESPKKKAKVE

SEQ ID NO: 155 - protein, 2088 aa, synthetic construct
MPAAKRVKLDGGDKKYSIGLDIGTNSVGWAVITDEYKVPSKKFKVLGNTDRHSIKKNLIGALLFDSGETAEATRLKRTARRRYTRRKNRICYLQEIFSNEMAKVDDSFFHRLEESFLVEEDKKHERHPIFGNIVDEVAYHEKYPTIYHLRKKLVDSTDKADLRLIYLALAHMIKFRGHFLIEGDLNPDNSDVDKLFIQLVQTYNQLFEENPINASGVDAKAILSARLSKSRRLENLIAQLPGEKKNGLFGNLIALSLGLTPNFKSNFDLAEDAKLQLSKDTYDDDLDNLLAQIGDQYADLFLAAKNLSDAILLSDILRVNTEITKAPLSASMIKRYDEHHQDLTLLKALVRQQLPEKYKEIFFDQSKNGYAGYIDGGASQEEFYKFIKPILEKMDGTEELLVKLNREDLLRKQRTFDNGSIPHQIHLGELHAILRRQEDFYPFLKDNREKIEKILTFRIPYYVGPLARGNSRFAWMTRKSEETITPWNFEEVVDKGASAQSFIERMTNFDKNLPNEKVLPKHSLLYEYFTVYNELTKVKYVTEGMRKPAFLSGEQKKAIVDLLFKTNRKVTVKQLKEDYFKKIECFDSVEISGVEDRFNASLGTYHDLLKIIKDKDFLDNEENEDILEDIVLTLTLFEDREMIEERLKTYAHLFDDKVMKQLKRRRYTGWGRLSRKLINGIRDKQSGKTILDFLKSDGFANRNFMQLIHDDSLTFKEDIQKAQVSGQGDSLHEHIANLAGSPAIKKGILQTVKVVDELVKVMGRHKPENIVIEMARENQTTQKGQKNSRERMKRIEEGIKELGSQILKEHPVENTQLQNEKLYLYYLQNGRDMYVDQELDINRLSDYDVDHIVPQSFLKDDSIDNKVLTRSDKARGKSDNVPSEEVVKKMKNYWRQLLNAKLITQRKFDNLTKAERGGLSELDKAGFIKRQLVETRQITKHVAQILDSRMNTKYDENDKLIREVKVITLKSKLVSDFRKDFQFYKVREINNYHHAHDAYLNAVVGTALIKKYPKLESEFVYGDYKVYDVRKMIAKSEQEIGKATAKYFFYSNIMNFFKTEITLANGEIRKRPLIETNGETGEIVWDKGRDFATVRKVLSMPQVNIVKKTEVQTGGFSKESILPKRNSDKLIARKKDWDPKKYGGFDSPTVAYSVLVVAKVEKGKSKKLKSVKELLGITIMERSSFEKNPIDFLEAKGYKEVKKDLIIKLPKYSLFELENGRKRMLASAGELQKGNELALPSKYVNFLYLASHYEKLKGSPEDNEQKQLFVEQHKHYLDEIIEQISEFSKRVILADANLDKVLSAYNKHRDKPIREQAENIIHLFTLTNLGAPAAFKYFDTTIDRKRYTSTKEVLDATLIHQSITGLYETRIDLSQLGGDGGGGSGSSPAPGGTLQLDDEYRLYSPLVKPDQNIQFWLEQFPQAWAETAGMGLAKQVPPQVIQLKASATPVSVRQYPLSKEAQEGIRPHVQRLIQQGILVPVQSPWNTPLLPVRKPGTNDYRPVQDLREVNKRVQDIHPTVPNPYNLLCALPPQRSWYTVLDLKDAFFCLRLHPTSQPLFAFEWRDPGTGRTGQLTWTRLPQGFKNSPTIFNEALHRDLANFRIQHPQVTLLQYVDDLLLAGATKQDCLEGTKALLLELSDLGYRASAKKAQICRREVTYLGYSLRDGQRWLTEARKKTVVQIPAPTTAKQVREFLGTAGFCRLWIPGFATLAAPLYPLTKPKGEFSWAPEHQKAFDAIKKALLSAPALALPDVTKPFTLYVDERKGVARGVLTQTLGPWRRPVAYLSKKLDPVASGWPVCLKAIAAVAILVKDADKLTLGQNITVIAPHALENIVRQPPDRWMTNARMTHYQSLLLTERVTFAPPAALNPATLLPEETDEPVTHDCHQLLIEETGVRKDLTDIPLTGEVLTWFTDGSSYVVEGKRMAGAAVVDGTRTIWASSLPEGTSAQKAELMALTQALRLAEGKSINIYTDSRYAFATAHVHGAIYKQRGWLTSAGREIKNKEEILSLLEALHLPKRLAIIHCPGHQKAKDPISRGNQMADRVAKQAAQGVNLLAGKRTADGSEFEKRTADGSEFESPKKKAKVE

SEQ ID NO: 156 - protein, 2125 aa, synthetic construct
MPAAKRVKLDGGDKKYSIGLDIGTNSVGWAVITDEYKVPSKKFKVLGNTDRHSIKKNLIGALLFDSGETAEATRLKRTARRRYTRRKNRICYLQEIFSNEMAKVDDSFFHRLEESFLVEEDKKHERHPIFGNIVDEVAYHEKYPTIYHLRKKLVDSTDKADLRLIYLALAHMIKFRGHFLIEGDLNPDNSDVDKLFIQLVQTYNQLFEENPINASGVDAKAILSARLSKSRRLENLIAQLPGEKKNGLFGNLIALSLGLTPNFKSNFDLAEDAKLQLSKDTYDDDLDNLLAQIGDQYADLFLAAKNLSDAILLSDILRVNTEITKAPLSASMIKRYDEHHQDLTLLKALVRQQLPEKYKEIFFDQSKNGYAGYIDGGASQEEFYKFIKPILEKMDGTEELLVKLNREDLLRKQRTFDNGSIPHQIHLGELHAILRRQEDFYPFLKDNREKIEKILTFRIPYYVGPLARGNSRFAWMTRKSEETITPWNFEEVVDKGASAQSFIERMTNFDKNLPNEKVLPKHSLLYEYFTVYNELTKVKYVTEGMRKPAFLSGEQKKAIVDLLFKTNRKVTVKQLKEDYFKKIECFDSVEISGVEDRFNASLGTYHDLLKIIKDKDFLDNEENEDILEDIVLTLTLFEDREMIEERLKTYAHLFDDKVMKQLKRRRYTGWGRLSRKLINGIRDKQSGKTILDFLKSDGFANRNFMQLIHDDSLTFKEDIQKAQVSGQGDSLHEHIANLAGSPAIKKGILQTVKVVDELVKVMGRHKPENIVIEMARENQTTQKGQKNSRERMKRIEEGIKELGSQILKEHPVENTQLQNEKLYLYYLQNGRDMYVDQELDINRLSDYDVDHIVPQSFLKDDSIDNKVLTRSDKARGKSDNVPSEEVVKKMKNYWRQLLNAKLITQRKFDNLTKAERGGLSELDKAGFIKRQLVETRQITKHVAQILDSRMNTKYDENDKLIREVKVITLKSKLVSDFRKDFQFYKVREINNYHHAHDAYLNAVVGTALIKKYPKLESEFVYGDYKVYDVRKMIAKSEQEIGKATAKYFFYSNIMNFFKTEITLANGEIRKRPLIETNGETGEIVWDKGRDFATVRKVLSMPQVNIVKKTEVQTGGFSKESILPKRNSDKLIARKKDWDPKKYGGFDSPTVAYSVLVVAKVEKGKSKKLKSVKELLGITIMERSSFEKNPIDFLEAKGYKEVKKDLIIKLPKYSLFELENGRKRMLASAGELQKGNELALPSKYVNFLYLASHYEKLKGSPEDNEQKQLFVEQHKHYLDEIIEQISEFSKRVILADANLDKVLSAYNKHRDKPIREQAENIIHLFTLTNLGAPAAFKYFDTTIDRKRYTSTKEVLDATLIHQSITGLYETRIDLSQLGGDGGAEAAAKEAAAKEAAAKEAAAKALEAEAAAKEAAAKEAAAKEAAAKAGGTLQLDDEYRLYSPLVKPDQNIQFWLEQFPQAWAETAGMGLAKQVPPQVIQLKASATPVSVRQYPLSKEAQEGIRPHVQRLIQQGILVPVQSPWNTPLLPVRKPGTNDYRPVQDLREVNKRVQDIHPTVPNPYNLLCALPPQRSWYTVLDLKDAFFCLRLHPTSQPLFAFEWRDPGTGRTGQLTWTRLPQGFKNSPTIFNEALHRDLANFRIQHPQVTLLQYVDDLLLAGATKQDCLEGTKALLLELSDLGYRASAKKAQICRREVTYLGYSLRDGQRWLTEARKKTVVQIPAPTTAKQVREFLGTAGFCRLWIPGFATLAAPLYPLTKPKGEFSWAPEHQKAFDAIKKALLSAPALALPDVTKPFTLYVDERKGVARGVLTQTLGPWRRPVAYLSKKLDPVASGWPVCLKAIAAVAILVKDADKLTLGQNITVIAPHALENIVRQPPDRWMTNARMTHYQSLLLTERVTFAPPAALNPATLLPEETDEPVTHDCHQLLIEETGVRKDLTDIPLTGEVLTWFTDGSSYVVEGKRMAGAAVVDGTRTIWASSLPEGTSAQKAELMALTQALRLAEGKSINIYTDSRYAFATAHVHGAIYKQRGWLTSAGREIKNKEEILSLLEALHLPKRLAIIHCPGHQKAKDPISRGNQMADRVAKQAAQGVNLLAGKRTADGSEFEKRTADGSEFESPKKKAKVE

SEQ ID NO: 157 - protein, 2092 aa, synthetic construct
MPAAKRVKLDGGDKKYSIGLDIGTNSVGWAVITDEYKVPSKKFKVLGNTDRHSIKKNLIGALLFDSGETAEATRLKRTARRRYTRRKNRICYLQEIFSNEMAKVDDSFFHRLEESFLVEEDKKHERHPIFGNIVDEVAYHEKYPTIYHLRKKLVDSTDKADLRLIYLALAHMIKFRGHFLIEGDLNPDNSDVDKLFIQLVQTYNQLFEENPINASGVDAKAILSARLSKSRRLENLIAQLPGEKKNGLFGNLIALSLGLTPNFKSNFDLAEDAKLQLSKDTYDDDLDNLLAQIGDQYADLFLAAKNLSDAILLSDILRVNTEITKAPLSASMIKRYDEHHQDLTLLKALVRQQLPEKYKEIFFDQSKNGYAGYIDGGASQEEFYKFIKPILEKMDGTEELLVKLNREDLLRKQRTFDNGSIPHQIHLGELHAILRRQEDFYPFLKDNREKIEKILTFRIPYYVGPLARGNSRFAWMTRKSEETITPWNFEEVVDKGASAQSFIERMTNFDKNLPNEKVLPKHSLLYEYFTVYNELTKVKYVTEGMRKPAFLSGEQKKAIVDLLFKTNRKVTVKQLKEDYFKKIECFDSVEISGVEDRFNASLGTYHDLLKIIKDKDFLDNEENEDILEDIVLTLTLFEDREMIEERLKTYAHLFDDKVMKQLKRRRYTGWGRLSRKLINGIRDKQSGKTILDFLKSDGFANRNFMQLIHDDSLTFKEDIQKAQVSGQGDSLHEHIANLAGSPAIKKGILQTVKVVDELVKVMGRHKPENIVIEMARENQTTQKGQKNSRERMKRIEEGIKELGSQILKEHPVENTQLQNEKLYLYYLQNGRDMYVDQELDINRLSDYDVDHIVPQSFLKDDSIDNKVLTRSDKARGKSDNVPSEEVVKKMKNYWRQLLNAKLITQRKFDNLTKAERGGLSELDKAGFIKRQLVETRQITKHVAQILDSRMNTKYDENDKLIREVKVITLKSKLVSDFRKDFQFYKVREINNYHHAHDAYLNAVVGTALIKKYPKLESEFVYGDYKVYDVRKMIAKSEQEIGKATAKYFFYSNIMNFFKTEITLANGEIRKRPLIETNGETGEIVWDKGRDFATVRKVLSMPQVNIVKKTEVQTGGFSKESILPKRNSDKLIARKKDWDPKKYGGFDSPTVAYSVLVVAKVEKGKSKKLKSVKELLGITIMERSSFEKNPIDFLEAKGYKEVKKDLIIKLPKYSLFELENGRKRMLASAGELQKGNELALPSKYVNFLYLASHYEKLKGSPEDNEQKQLFVEQHKHYLDEIIEQISEFSKRVILADANLDKVLSAYNKHRDKPIREQAENIIHLFTLTNLGAPAAFKYFDTTIDRKRYTSTKEVLDATLIHQSITGLYETRIDLSQLGGDGGPAPAPAPAPAPAPGGTLQLDDEYRLYSPLVKPDQNIQFWLEQFPQAWAETAGMGLAKQVPPQVIQLKASATPVSVRQYPLSKEAQEGIRPHVQRLIQQGILVPVQSPWNTPLLPVRKPGTNDYRPVQDLREVNKRVQDIHPTVPNPYNLLCALPPQRSWYTVLDLKDAFFCLRLHPTSQPLFAFEWRDPGTGRTGQLTWTRLPQGFKNSPTIFNEALHRDLANFRIQHPQVTLLQYVDDLLLAGATKQDCLEGTKALLLELSDLGYRASAKKAQICRREVTYLGYSLRDGQRWLTEARKKTVVQIPAPTTAKQVREFLGTAGFCRLWIPGFATLAAPLYPLTKPKGEFSWAPEHQKAFDAIKKALLSAPALALPDVTKPFTLYVDERKGVARGVLTQTLGPWRRPVAYLSKKLDPVASGWPVCLKAIAAVAILVKDADKLTLGQNITVIAPHALENIVRQPPDRWMTNARMTHYQSLLLTERVTFAPPAALNPATLLPEETDEPVTHDCHQLLIEETGVRKDLTDIPLTGEVLTWFTDGSSYVVEGKRMAGAAVVDGTRTIWASSLPEGTSAQKAELMALTQALRLAEGKSINIYTDSRYAFATAHVHGAIYKQRGWLTSAGREIKNKEEILSLLEALHLPKRLAIIHCPGHQKAKDPISRGNQMADRVAKQAAQGVNLLAGKRTADGSEFEKRTADGSEFESPKKKAKVE

SEQ ID NO: 158 - protein, 2087 aa, synthetic construct
MPAAKRVKLDGGDKKYSIGLDIGTNSVGWAVITDEYKVPSKKFKVLGNTDRHSIKKNLIGALLFDSGETAEATRLKRTARRRYTRRKNRICYLQEIFSNEMAKVDDSFFHRLEESFLVEEDKKHERHPIFGNIVDEVAYHEKYPTIYHLRKKLVDSTDKADLRLIYLALAHMIKFRGHFLIEGDLNPDNSDVDKLFIQLVQTYNQLFEENPINASGVDAKAILSARLSKSRRLENLIAQLPGEKKNGLFGNLIALSLGLTPNFKSNFDLAEDAKLQLSKDTYDDDLDNLLAQIGDQYADLFLAAKNLSDAILLSDILRVNTEITKAPLSASMIKRYDEHHQDLTLLKALVRQQLPEKYKEIFFDQSKNGYAGYIDGGASQEEFYKFIKPILEKMDGTEELLVKLNREDLLRKQRTFDNGSIPHQIHLGELHAILRRQEDFYPFLKDNREKIEKILTFRIPYYVGPLARGNSRFAWMTRKSEETITPWNFEEVVDKGASAQSFIERMTNFDKNLPNEKVLPKHSLLYEYFTVYNELTKVKYVTEGMRKPAFLSGEQKKAIVDLLFKTNRKVTVKQLKEDYFKKIECFDSVEISGVEDRFNASLGTYHDLLKIIKDKDFLDNEENEDILEDIVLTLTLFEDREMIEERLKTYAHLFDDKVMKQLKRRRYTGWGRLSRKLINGIRDKQSGKTILDFLKSDGFANRNFMQLIHDDSLTFKEDIQKAQVSGQGDSLHEHIANLAGSPAIKKGILQTVKVVDELVKVMGRHKPENIVIEMARENQTTQKGQKNSRERMKRIEEGIKELGSQILKEHPVENTQLQNEKLYLYYLQNGRDMYVDQELDINRLSDYDVDHIVPQSFLKDDSIDNKVLTRSDKARGKSDNVPSEEVVKKMKNYWRQLLNAKLITQRKFDNLTKAERGGLSELDKAGFIKRQLVETRQITKHVAQILDSRMNTKYDENDKLIREVKVITLKSKLVSDFRKDFQFYKVREINNYHHAHDAYLNAVVGTALIKKYPKLESEFVYGDYKVYDVRKMIAKSEQEIGKATAKYFFYSNIMNFFKTEITLANGEIRKRPLIETNGETGEIVWDKGRDFATVRKVLSMPQVNIVKKTEVQTGGFSKESILPKRNSDKLIARKKDWDPKKYGGFDSPTVAYSVLVVAKVEKGKSKKLKSVKELLGITIMERSSFEKNPIDFLEAKGYKEVKKDLIIKLPKYSLFELENGRKRMLASAGELQKGNELALPSKYVNFLYLASHYEKLKGSPEDNEQKQLFVEQHKHYLDEIIEQISEFSKRVILADANLDKVLSAYNKHRDKPIREQAENIIHLFTLTNLGAPAAFKYFDTTIDRKRYTSTKEVLDATLIHQSITGLYETRIDLSQLGGDGGEAAAKGGSGGTLQLDDEYRLYSPLVKPDQNIQFWLEQFPQAWAETAGMGLAKQVPPQVIQLKASATPVSVRQYPLSKEAQEGIRPHVQRLIQQGILVPVQSPWNTPLLPVRKPGTNDYRPVQDLREVNKRVQDIHPTVPNPYNLLCALPPQRSWYTVLDLKDAFFCLRLHPTSQPLFAFEWRDPGTGRTGQLTWTRLPQGFKNSPTIFNEALHRDLANFRIQHPQVTLLQYVDDLLLAGATKQDCLEGTKALLLELSDLGYRASAKKAQICRREVTYLGYSLRDGQRWLTEARKKTVVQIPAPTTAKQVREFLGTAGFCRLWIPGFATLAAPLYPLTKPKGEFSWAPEHQKAFDAIKKALLSAPALALPDVTKPFTLYVDERKGVARGVLTQTLGPWRRPVAYLSKKLDPVASGWPVCLKAIAAVAILVKDADKLTLGQNITVIAPHALENIVRQPPDRWMTNARMTHYQSLLLTERVTFAPPAALNPATLLPEETDEPVTHDCHQLLIEETGVRKDLTDIPLTGEVLTWFTDGSSYVVEGKRMAGAAVVDGTRTIWASSLPEGTSAQKAELMALTQALRLAEGKSINIYTDSRYAFATAHVHGAIYKQRGWLTSAGREIKNKEEILSLLEALHLPKRLAIIHCPGHQKAKDPISRGNQMADRVAKQAAQGVNLLAGKRTADGSEFEKRTADGSEFESPKKKAKVE

SEQ ID NO: 159 - protein, 2094 aa, synthetic construct
MPAAKRVKLDGGDKKYSIGLDIGTNSVGWAVITDEYKVPSKKFKVLGNTDRHSIKKNLIGALLFDSGETAEATRLKRTARRRYTRRKNRICYLQEIFSNEMAKVDDSFFHRLEESFLVEEDKKHERHPIFGNIVDEVAYHEKYPTIYHLRKKLVDSTDKADLRLIYLALAHMIKFRGHFLIEGDLNPDNSDVDKLFIQLVQTYNQLFEENPINASGVDAKAILSARLSKSRRLENLIAQLPGEKKNGLFGNLIALSLGLTPNFKSNFDLAEDAKLQLSKDTYDDDLDNLLAQIGDQYADLFLAAKNLSDAILLSDILRVNTEITKAPLSASMIKRYDEHHQDLTLLKALVRQQLPEKYKEIFFDQSKNGYAGYIDGGASQEEFYKFIKPILEKMDGTEELLVKLNREDLLRKQRTFDNGSIPHQIHLGELHAILRRQEDFYPFLKDNREKIEKILTFRIPYYVGPLARGNSRFAWMTRKSEETITPWNFEEVVDKGASAQSFIERMTNFDKNLPNEKVLPKHSLLYEYFTVYNELTKVKYVTEGMRKPAFLSGEQKKAIVDLLFKTNRKVTVKQLKEDYFKKIECFDSVEISGVEDRFNASLGTYHDLLKIIKDKDFLDNEENEDILEDIVLTLTLFEDREMIEERLKTYAHLFDDKVMKQLKRRRYTGWGRLSRKLINGIRDKQSGKTILDFLKSDGFANRNFMQLIHDDSLTFKEDIQKAQVSGQGDSLHEHIANLAGSPAIKKGILQTVKVVDELVKVMGRHKPENIVIEMARENQTTQKGQKNSRERMKRIEEGIKELGSQILKEHPVENTQLQNEKLYLYYLQNGRDMYVDQELDINRLSDYDVDHIVPQSFLKDDSIDNKVLTRSDKARGKSDNVPSEEVVKKMKNYWRQLLNAKLITQRKFDNLTKAERGGLSELDKAGFIKRQLVETRQITKHVAQILDSRMNTKYDENDKLIREVKVITLKSKLVSDFRKDFQFYKVREINNYHHAHDAYLNAVVGTALIKKYPKLESEFVYGDYKVYDVRKMIAKSEQEIGKATAKYFFYSNIMNFFKTEITLANGEIRKRPLIETNGETGEIVWDKGRDFATVRKVLSMPQVNIVKKTEVQTGGFSKESILPKRNSDKLIARKKDWDPKKYGGFDSPTVAYSVLVVAKVEKGKSKKLKSVKELLGITIMERSSFEKNPIDFLEAKGYKEVKKDLIIKLPKYSLFELENGRKRMLASAGELQKGNELALPSKYVNFLYLASHYEKLKGSPEDNEQKQLFVEQHKHYLDEIIEQISEFSKRVILADANLDKVLSAYNKHRDKPIREQAENIIHLFTLTNLGAPAAFKYFDTTIDRKRYTSTKEVLDATLIHQSITGLYETRIDLSQLGGDGGGGGGSGGGGSGGGGSGGTLQLDDEYRLYSPLVKPDQNIQFWLEQFPQAWAETAGMGLAKQVPPQVIQLKASATPVSVRQYPLSKEAQEGIRPHVQRLIQQGILVPVQSPWNTPLLPVRKPGTNDYRPVQDLREVNKRVQDIHPTVPNPYNLLCALPPQRSWYTVLDLKDAFFCLRLHPTSQPLFAFEWRDPGTGRTGQLTWTRLPQGFKNSPTIFNEALHRDLANFRIQHPQVTLLQYVDDLLLAGATKQDCLEGTKALLLELSDLGYRASAKKAQICRREVTYLGYSLRDGQRWLTEARKKTVVQIPAPTTAKQVREFLGTAGFCRLWIPGFATLAAPLYPLTKPKGEFSWAPEHQKAFDAIKKALLSAPALALPDVTKPFTLYVDERKGVARGVLTQTLGPWRRPVAYLSKKLDPVASGWPVCLKAIAAVAILVKDADKLTLGQNITVIAPHALENIVRQPPDRWMTNARMTHYQSLLLTERVTFAPPAALNPATLLPEETDEPVTHDCHQLLIEETGVRKDLTDIPLTGEVLTWFTDGSSYVVEGKRMAGAAVVDGTRTIWASSLPEGTSAQKAELMALTQALRLAEGKSINIYTDSRYAFATAHVHGAIYKQRGWLTSAGREIKNKEEILSLLEALHLPKRLAIIHCPGHQKAKDPISRGNQMADRVAKQAAQGVNLLAGKRTADGSEFEKRTADGSEFESPKKKAKVE

SEQ ID NO: 160 - protein, 2090 aa, synthetic construct
MPAAKRVKLDGGDKKYSIGLDIGTNSVGWAVITDEYKVPSKKFKVLGNTDRHSIKKNLIGALLFDSGETAEATRLKRTARRRYTRRKNRICYLQEIFSNEMAKVDDSFFHRLEESFLVEEDKKHERHPIFGNIVDEVAYHEKYPTIYHLRKKLVDSTDKADLRLIYLALAHMIKFRGHFLIEGDLNPDNSDVDKLFIQLVQTYNQLFEENPINASGVDAKAILSARLSKSRRLENLIAQLPGEKKNGLFGNLIALSLGLTPNFKSNFDLAEDAKLQLSKDTYDDDLDNLLAQIGDQYADLFLAAKNLSDAILLSDILRVNTEITKAPLSASMIKRYDEHHQDLTLLKALVRQQLPEKYKEIFFDQSKNGYAGYIDGGASQEEFYKFIKPILEKMDGTEELLVKLNREDLLRKQRTFDNGSIPHQIHLGELHAILRRQEDFYPFLKDNREKIEKILTFRIPYYVGPLARGNSRFAWMTRKSEETITPWNFEEVVDKGASAQSFIERMTNFDKNLPNEKVLPKHSLLYEYFTVYNELTKVKYVTEGMRKPAFLSGEQKKAIVDLLFKTNRKVTVKQLKEDYFKKIECFDSVEISGVEDRFNASLGTYHDLLKIIKDKDFLDNEENEDILEDIVLTLTLFEDREMIEERLKTYAHLFDDKVMKQLKRRRYTGWGRLSRKLINGIRDKQSGKTILDFLKSDGFANRNFMQLIHDDSLTFKEDIQKAQVSGQGDSLHEHIANLAGSPAIKKGILQTVKVVDELVKVMGRHKPENIVIEMARENQTTQKGQKNSRERMKRIEEGIKELGSQILKEHPVENTQLQNEKLYLYYLQNGRDMYVDQELDINRLSDYDVDHIVPQSFLKDDSIDNKVLTRSDKARGKSDNVPSEEVVKKMKNYWRQLLNAKLITQRKFDNLTKAERGGLSELDKAGFIKRQLVETRQITKHVAQILDSRMNTKYDENDKLIREVKVITLKSKLVSDFRKDFQFYKVREINNYHHAHDAYLNAVVGTALIKKYPKLESEFVYGDYKVYDVRKMIAKSEQEIGKATAKYFFYSNIMNFFKTEITLANGEIRKRPLIETNGETGEIVWDKGRDFATVRKVLSMPQVNIVKKTEVQTGGFSKESILPKRNSDKLIARKKDWDPKKYGGFDSPTVAYSVLVVAKVEKGKSKKLKSVKELLGITIMERSSFEKNPIDFLEAKGYKEVKKDLIIKLPKYSLFELENGRKRMLASAGELQKGNELALPSKYVNFLYLASHYEKLKGSPEDNEQKQLFVEQHKHYLDEIIEQISEFSKRVILADANLDKVLSAYNKHRDKPIREQAENIIHLFTLTNLGAPAAFKYFDTTIDRKRYTSTKEVLDATLIHQSITGLYETRIDLSQLGGDGGEAAAKGSSGGGGGTLQLDDEYRLYSPLVKPDQNIQFWLEQFPQAWAETAGMGLAKQVPPQVIQLKASATPVSVRQYPLSKEAQEGIRPHVQRLIQQGILVPVQSPWNTPLLPVRKPGTNDYRPVQDLREVNKRVQDIHPTVPNPYNLLCALPPQRSWYTVLDLKDAFFCLRLHPTSQPLFAFEWRDPGTGRTGQLTWTRLPQGFKNSPTIFNEALHRDLANFRIQHPQVTLLQYVDDLLLAGATKQDCLEGTKALLLELSDLGYRASAKKAQICRREVTYLGYSLRDGQRWLTEARKKTVVQIPAPTTAKQVREFLGTAGFCRLWIPGFATLAAPLYPLTKPKGEFSWAPEHQKAFDAIKKALLSAPALALPDVTKPFTLYVDERKGVARGVLTQTLGPWRRPVAYLSKKLDPVASGWPVCLKAIAAVAILVKDADKLTLGQNITVIAPHALENIVRQPPDRWMTNARMTHYQSLLLTERVTFAPPAALNPATLLPEETDEPVTHDCHQLLIEETGVRKDLTDIPLTGEVLTWFTDGSSYVVEGKRMAGAAVVDGTRTIWASSLPEGTSAQKAELMALTQALRLAEGKSINIYTDSRYAFATAHVHGAIYKQRGWLTSAGREIKNKEEILSLLEALHLPKRLAIIHCPGHQKAKDPISRGNQMADRVAKQAAQGVNLLAGKRTADGSEFEKRTADGSEFESPKKKAKVE

SEQ ID NO: 161 - protein, 2094 aa, synthetic construct
MPAAKRVKLDGGDKKYSIGLDIGTNSVGWAVITDEYKVPSKKFKVLGNTDRHSIKKNLIGALLFDSGETAEATRLKRTARRRYTRRKNRICYLQEIFSNEMAKVDDSFFHRLEESFLVEEDKKHERHPIFGNIVDEVAYHEKYPTIYHLRKKLVDSTDKADLRLIYLALAHMIKFRGHFLIEGDLNPDNSDVDKLFIQLVQTYNQLFEENPINASGVDAKAILSARLSKSRRLENLIAQLPGEKKNGLFGNLIALSLGLTPNFKSNFDLAEDAKLQLSKDTYDDDLDNLLAQIGDQYADLFLAAKNLSDAILLSDILRVNTEITKAPLSASMIKRYDEHHQDLTLLKALVRQQLPEKYKEIFFDQSKNGYAGYIDGGASQEEFYKFIKPILEKMDGTEELLVKLNREDLLRKQRTFDNGSIPHQIHLGELHAILRRQEDFYPFLKDNREKIEKILTFRIPYYVGPLARGNSRFAWMTRKSEETITPWNFEEVVDKGASAQSFIERMTNFDKNLPNEKVLPKHSLLYEYFTVYNELTKVKYVTEGMRKPAFLSGEQKKAIVDLLFKTNRKVTVKQLKEDYFKKIECFDSVEISGVEDRFNASLGTYHDLLKIIKDKDFLDNEENEDILEDIVLTLTLFEDREMIEERLKTYAHLFDDKVMKQLKRRRYTGWGRLSRKLINGIRDKQSGKTILDFLKSDGFANRNFMQLIHDDSLTFKEDIQKAQVSGQGDSLHEHIANLAGSPAIKKGILQTVKVVDELVKVMGRHKPENIVIEMARENQTTQKGQKNSRERMKRIEEGIKELGSQILKEHPVENTQLQNEKLYLYYLQNGRDMYVDQELDINRLSDYDVDHIVPQSFLKDDSIDNKVLTRSDKARGKSDNVPSEEVVKKMKNYWRQLLNAKLITQRKFDNLTKAERGGLSELDKAGFIKRQLVETRQITKHVAQILDSRMNTKYDENDKLIREVKVITLKSKLVSDFRKDFQFYKVREINNYHHAHDAYLNAVVGTALIKKYPKLESEFVYGDYKVYDVRKMIAKSEQEIGKATAKYFFYSNIMNFFKTEITLANGEIRKRPLIETNGETGEIVWDKGRDFATVRKVLSMPQVNIVKKTEVQTGGFSKESILPKRNSDKLIARKKDWDPKKYGGFDSPTVAYSVLVVAKVEKGKSKKLKSVKELLGITIMERSSFEKNPIDFLEAKGYKEVKKDLIIKLPKYSLFELENGRKRMLASAGELQKGNELALPSKYVNFLYLASHYEKLKGSPEDNEQKQLFVEQHKHYLDEIIEQISEFSKRVILADANLDKVLSAYNKHRDKPIREQAENIIHLFTLTNLGAPAAFKYFDTTIDRKRYTSTKEVLDATLIHQSITGLYETRIDLSQLGGDGGGGGGSEAAAKGGGGSGGTLQLDDEYRLYSPLVKPDQNIQFWLEQFPQAWAETAGMGLAKQVPPQVIQLKASATPVSVRQYPLSKEAQEGIRPHVQRLIQQGILVPVQSPWNTPLLPVRKPGTNDYRPVQDLREVNKRVQDIHPTVPNPYNLLCALPPQRSWYTVLDLKDAFFCLRLHPTSQPLFAFEWRDPGTGRTGQLTWTRLPQGFKNSPTIFNEALHRDLANFRIQHPQVTLLQYVDDLLLAGATKQDCLEGTKALLLELSDLGYRASAKKAQICRREVTYLGYSLRDGQRWLTEARKKTVVQIPAPTTAKQVREFLGTAGFCRLWIPGFATLAAPLYPLTKPKGEFSWAPEHQKAFDAIKKALLSAPALALPDVTKPFTLYVDERKGVARGVLTQTLGPWRRPVAYLSKKLDPVASGWPVCLKAIAAVAILVKDADKLTLGQNITVIAPHALENIVRQPPDRWMTNARMTHYQSLLLTERVTFAPPAALNPATLLPEETDEPVTHDCHQLLIEETGVRKDLTDIPLTGEVLTWFTDGSSYVVEGKRMAGAAVVDGTRTIWASSLPEGTSAQKAELMALTQALRLAEGKSINIYTDSRYAFATAHVHGAIYKQRGWLTSAGREIKNKEEILSLLEALHLPKRLAIIHCPGHQKAKDPISRGNQMADRVAKQAAQGVNLLAGKRTADGSEFEKRTADGSEFESPKKKAKVE

SEQ ID NO: 162 - protein, 2088 aa, synthetic construct
MPAAKRVKLDGGDKKYSIGLDIGTNSVGWAVITDEYKVPSKKFKVLGNTDRHSIKKNLIGALLFDSGETAEATRLKRTARRRYTRRKNRICYLQEIFSNEMAKVDDSFFHRLEESFLVEEDKKHERHPIFGNIVDEVAYHEKYPTIYHLRKKLVDSTDKADLRLIYLALAHMIKFRGHFLIEGDLNPDNSDVDKLFIQLVQTYNQLFEENPINASGVDAKAILSARLSKSRRLENLIAQLPGEKKNGLFGNLIALSLGLTPNFKSNFDLAEDAKLQLSKDTYDDDLDNLLAQIGDQYADLFLAAKNLSDAILLSDILRVNTEITKAPLSASMIKRYDEHHQDLTLLKALVRQQLPEKYKEIFFDQSKNGYAGYIDGGASQEEFYKFIKPILEKMDGTEELLVKLNREDLLRKQRTFDNGSIPHQIHLGELHAILRRQEDFYPFLKDNREKIEKILTFRIPYYVGPLARGNSRFAWMTRKSEETITPWNFEEVVDKGASAQSFIERMTNFDKNLPNEKVLPKHSLLYEYFTVYNELTKVKYVTEGMRKPAFLSGEQKKAIVDLLFKTNRKVTVKQLKEDYFKKIECFDSVEISGVEDRFNASLGTYHDLLKIIKDKDFLDNEENEDILEDIVLTLTLFEDREMIEERLKTYAHLFDDKVMKQLKRRRYTGWGRLSRKLINGIRDKQSGKTILDFLKSDGFANRNFMQLIHDDSLTFKEDIQKAQVSGQGDSLHEHIANLAGSPAIKKGILQTVKVVDELVKVMGRHKPENIVIEMARENQTTQKGQKNSRERMKRIEEGIKELGSQILKEHPVENTQLQNEKLYLYYLQNGRDMYVDQELDINRLSDYDVDHIVPQSFLKDDSIDNKVLTRSDKARGKSDNVPSEEVVKKMKNYWRQLLNAKLITQRKFDNLTKAERGGLSELDKAGFIKRQLVETRQITKHVAQILDSRMNTKYDENDKLIREVKVITLKSKLVSDFRKDFQFYKVREINNYHHAHDAYLNAVVGTALIKKYPKLESEFVYGDYKVYDVRKMIAKSEQEIGKATAKYFFYSNIMNFFKTEITLANGEIRKRPLIETNGETGEIVWDKGRDFATVRKVLSMPQVNIVKKTEVQTGGFSKESILPKRNSDKLIARKKDWDPKKYGGFDSPTVAYSVLVVAKVEKGKSKKLKSVKELLGITIMERSSFEKNPIDFLEAKGYKEVKKDLIIKLPKYSLFELENGRKRMLASAGELQKGNELALPSKYVNFLYLASHYEKLKGSPEDNEQKQLFVEQHKHYLDEIIEQISEFSKRVILADANLDKVLSAYNKHRDKPIREQAENIIHLFTLTNLGAPAAFKYFDTTIDRKRYTSTKEVLDATLIHQSITGLYETRIDLSQLGGDGGGSSGGGGGSGGTLQLDDEYRLYSPLVKPDQNIQFWLEQFPQAWAETAGMGLAKQVPPQVIQLKASATPVSVRQYPLSKEAQEGIRPHVQRLIQQGILVPVQSPWNTPLLPVRKPGTNDYRPVQDLREVNKRVQDIHPTVPNPYNLLCALPPQRSWYTVLDLKDAFFCLRLHPTSQPLFAFEWRDPGTGRTGQLTWTRLPQGFKNSPTIFNEALHRDLANFRIQHPQVTLLQYVDDLLLAGATKQDCLEGTKALLLELSDLGYRASAKKAQICRREVTYLGYSLRDGQRWLTEARKKTVVQIPAPTTAKQVREFLGTAGFCRLWIPGFATLAAPLYPLTKPKGEFSWAPEHQKAFDAIKKALLSAPALALPDVTKPFTLYVDERKGVARGVLTQTLGPWRRPVAYLSKKLDPVASGWPVCLKAIAAVAILVKDADKLTLGQNITVIAPHALENIVRQPPDRWMTNARMTHYQSLLLTERVTFAPPAALNPATLLPEETDEPVTHDCHQLLIEETGVRKDLTDIPLTGEVLTWFTDGSSYVVEGKRMAGAAVVDGTRTIWASSLPEGTSAQKAELMALTQALRLAEGKSINIYTDSRYAFATAHVHGAIYKQRGWLTSAGREIKNKEEILSLLEALHLPKRLAIIHCPGHQKAKDPISRGNQMADRVAKQAAQGVNLLAGKRTADGSEFEKRTADGSEFESPKKKAKVE

SEQ ID NO: 163 - protein, 2084 aa, synthetic construct
MPAAKRVKLDGGDKKYSIGLDIGTNSVGWAVITDEYKVPSKKFKVLGNTDRHSIKKNLIGALLFDSGETAEATRLKRTARRRYTRRKNRICYLQEIFSNEMAKVDDSFFHRLEESFLVEEDKKHERHPIFGNIVDEVAYHEKYPTIYHLRKKLVDSTDKADLRLIYLALAHMIKFRGHFLIEGDLNPDNSDVDKLFIQLVQTYNQLFEENPINASGVDAKAILSARLSKSRRLENLIAQLPGEKKNGLFGNLIALSLGLTPNFKSNFDLAEDAKLQLSKDTYDDDLDNLLAQIGDQYADLFLAAKNLSDAILLSDILRVNTEITKAPLSASMIKRYDEHHQDLTLLKALVRQQLPEKYKEIFFDQSKNGYAGYIDGGASQEEFYKFIKPILEKMDGTEELLVKLNREDLLRKQRTFDNGSIPHQIHLGELHAILRRQEDFYPFLKDNREKIEKILTFRIPYYVGPLARGNSRFAWMTRKSEETITPWNFEEVVDKGASAQSFIERMTNFDKNLPNEKVLPKHSLLYEYFTVYNELTKVKYVTEGMRKPAFLSGEQKKAIVDLLFKTNRKVTVKQLKEDYFKKIECFDSVEISGVEDRFNASLGTYHDLLKIIKDKDFLDNEENEDILEDIVLTLTLFEDREMIEERLKTYAHLFDDKVMKQLKRRRYTGWGRLSRKLINGIRDKQSGKTILDFLKSDGFANRNFMQLIHDDSLTFKEDIQKAQVSGQGDSLHEHIANLAGSPAIKKGILQTVKVVDELVKVMGRHKPENIVIEMARENQTTQKGQKNSRERMKRIEEGIKELGSQILKEHPVENTQLQNEKLYLYYLQNGRDMYVDQELDINRLSDYDVDHIVPQSFLKDDSIDNKVLTRSDKARGKSDNVPSEEVVKKMKNYWRQLLNAKLITQRKFDNLTKAERGGLSELDKAGFIKRQLVETRQITKHVAQILDSRMNTKYDENDKLIREVKVITLKSKLVSDFRKDFQFYKVREINNYHHAHDAYLNAVVGTALIKKYPKLESEFVYGDYKVYDVRKMIAKSEQEIGKATAKYFFYSNIMNFFKTEITLANGEIRKRPLIETNGETGEIVWDKGRDFATVRKVLSMPQVNIVKKTEVQTGGFSKESILPKRNSDKLIARKKDWDPKKYGGFDSPTVAYSVLVVAKVEKGKSKKLKSVKELLGITIMERSSFEKNPIDFLEAKGYKEVKKDLIIKLPKYSLFELENGRKRMLASAGELQKGNELALPSKYVNFLYLASHYEKLKGSPEDNEQKQLFVEQHKHYLDEIIEQISEFSKRVILADANLDKVLSAYNKHRDKPIREQAENIIHLFTLTNLGAPAAFKYFDTTIDRKRYTSTKEVLDATLIHQSITGLYETRIDLSQLGGDGGPAPAPGGTLQLDDEYRLYSPLVKPDQNIQFWLEQFPQAWAETAGMGLAKQVPPQVIQLKASATPVSVRQYPLSKEAQEGIRPHVQRLIQQGILVPVQSPWNTPLLPVRKPGTNDYRPVQDLREVNKRVQDIHPTVPNPYNLLCALPPQRSWYTVLDLKDAFFCLRLHPTSQPLFAFEWRDPGTGRTGQLTWTRLPQGFKNSPTIFNEALHRDLANFRIQHPQVTLLQYVDDLLLAGATKQDCLEGTKALLLELSDLGYRASAKKAQICRREVTYLGYSLRDGQRWLTEARKKTVVQIPAPTTAKQVREFLGTAGFCRLWIPGFATLAAPLYPLTKPKGEFSWAPEHQKAFDAIKKALLSAPALALPDVTKPFTLYVDERKGVARGVLTQTLGPWRRPVAYLSKKLDPVASGWPVCLKAIAAVAILVKDADKLTLGQNITVIAPHALENIVRQPPDRWMTNARMTHYQSLLLTERVTFAPPAALNPATLLPEETDEPVTHDCHQLLIEETGVRKDLTDIPLTGEVLTWFTDGSSYVVEGKRMAGAAVVDGTRTIWASSLPEGTSAQKAELMALTQALRLAEGKSINIYTDSRYAFATAHVHGAIYKQRGWLTSAGREIKNKEEILSLLEALHLPKRLAIIHCPGHQKAKDPISRGNQMADRVAKQAAQGVNLLAGKRTADGSEFEKRTADGSEFESPKKKAKVE

SEQ ID NO: 164 - protein, 2090 aa, synthetic construct
MPAAKRVKLDGGDKKYSIGLDIGTNSVGWAVITDEYKVPSKKFKVLGNTDRHSIKKNLIGALLFDSGETAEATRLKRTARRRYTRRKNRICYLQEIFSNEMAKVDDSFFHRLEESFLVEEDKKHERHPIFGNIVDEVAYHEKYPTIYHLRKKLVDSTDKADLRLIYLALAHMIKFRGHFLIEGDLNPDNSDVDKLFIQLVQTYNQLFEENPINASGVDAKAILSARLSKSRRLENLIAQLPGEKKNGLFGNLIALSLGLTPNFKSNFDLAEDAKLQLSKDTYDDDLDNLLAQIGDQYADLFLAAKNLSDAILLSDILRVNTEITKAPLSASMIKRYDEHHQDLTLLKALVRQQLPEKYKEIFFDQSKNGYAGYIDGGASQEEFYKFIKPILEKMDGTEELLVKLNREDLLRKQRTFDNGSIPHQIHLGELHAILRRQEDFYPFLKDNREKIEKILTFRIPYYVGPLARGNSRFAWMTRKSEETITPWNFEEVVDKGASAQSFIERMTNFDKNLPNEKVLPKHSLLYEYFTVYNELTKVKYVTEGMRKPAFLSGEQKKAIVDLLFKTNRKVTVKQLKEDYFKKIECFDSVEISGVEDRFNASLGTYHDLLKIIKDKDFLDNEENEDILEDIVLTLTLFEDREMIEERLKTYAHLFDDKVMKQLKRRRYTGWGRLSRKLINGIRDKQSGKTILDFLKSDGFANRNFMQLIHDDSLTFKEDIQKAQVSGQGDSLHEHIANLAGSPAIKKGILQTVKVVDELVKVMGRHKPENIVIEMARENQTTQKGQKNSRERMKRIEEGIKELGSQILKEHPVENTQLQNEKLYLYYLQNGRDMYVDQELDINRLSDYDVDHIVPQSFLKDDSIDNKVLTRSDKARGKSDNVPSEEVVKKMKNYWRQLLNAKLITQRKFDNLTKAERGGLSELDKAGFIKRQLVETRQITKHVAQILDSRMNTKYDENDKLIREVKVITLKSKLVSDFRKDFQFYKVREINNYHHAHDAYLNAVVGTALIKKYPKLESEFVYGDYKVYDVRKMIAKSEQEIGKATAKYFFYSNIMNFFKTEITLANGEIRKRPLIETNGETGEIVWDKGRDFATVRKVLSMPQVNIVKKTEVQTGGFSKESILPKRNSDKLIARKKDWDPKKYGGFDSPTVAYSVLVVAKVEKGKSKKLKSVKELLGITIMERSSFEKNPIDFLEAKGYKEVKKDLIIKLPKYSLFELENGRKRMLASAGELQKGNELALPSKYVNFLYLASHYEKLKGSPEDNEQKQLFVEQHKHYLDEIIEQISEFSKRVILADANLDKVLSAYNKHRDKPIREQAENIIHLFTLTNLGAPAAFKYFDTTIDRKRYTSTKEVLDATLIHQSITGLYETRIDLSQLGGDGGGGSPAPEAAAKGGTLQLDDEYRLYSPLVKPDQNIQFWLEQFPQAWAETAGMGLAKQVPPQVIQLKASATPVSVRQYPLSKEAQEGIRPHVQRLIQQGILVPVQSPWNTPLLPVRKPGTNDYRPVQDLREVNKRVQDIHPTVPNPYNLLCALPPQRSWYTVLDLKDAFFCLRLHPTSQPLFAFEWRDPGTGRTGQLTWTRLPQGFKNSPTIFNEALHRDLANFRIQHPQVTLLQYVDDLLLAGATKQDCLEGTKALLLELSDLGYRASAKKAQICRREVTYLGYSLRDGQRWLTEARKKTVVQIPAPTTAKQVREFLGTAGFCRLWIPGFATLAAPLYPLTKPKGEFSWAPEHQKAFDAIKKALLSAPALALPDVTKPFTLYVDERKGVARGVLTQTLGPWRRPVAYLSKKLDPVASGWPVCLKAIAAVAILVKDADKLTLGQNITVIAPHALENIVRQPPDRWMTNARMTHYQSLLLTERVTFAPPAALNPATLLPEETDEPVTHDCHQLLIEETGVRKDLTDIPLTGEVLTWFTDGSSYVVEGKRMAGAAVVDGTRTIWASSLPEGTSAQKAELMALTQALRLAEGKSINIYTDSRYAFATAHVHGAIYKQRGWLTSAGREIKNKEEILSLLEALHLPKRLAIIHCPGHQKAKDPISRGNQMADRVAKQAAQGVNLLAGKRTADGSEFEKRTADGSEFESPKKKAKVE

SEQ ID NO: 165 - protein, 2085 aa, synthetic construct
MPAAKRVKLDGGDKKYSIGLDIGTNSVGWAVITDEYKVPSKKFKVLGNTDRHSIKKNLIGALLFDSGETAEATRLKRTARRRYTRRKNRICYLQEIFSNEMAKVDDSFFHRLEESFLVEEDKKHERHPIFGNIVDEVAYHEKYPTIYHLRKKLVDSTDKADLRLIYLALAHMIKFRGHFLIEGDLNPDNSDVDKLFIQLVQTYNQLFEENPINASGVDAKAILSARLSKSRRLENLIAQLPGEKKNGLFGNLIALSLGLTPNFKSNFDLAEDAKLQLSKDTYDDDLDNLLAQIGDQYADLFLAAKNLSDAILLSDILRVNTEITKAPLSASMIKRYDEHHQDLTLLKALVRQQLPEKYKEIFFDQSKNGYAGYIDGGASQEEFYKFIKPILEKMDGTEELLVKLNREDLLRKQRTFDNGSIPHQIHLGELHAILRRQEDFYPFLKDNREKIEKILTFRIPYYVGPLARGNSRFAWMTRKSEETITPWNFEEVVDKGASAQSFIERMTNFDKNLPNEKVLPKHSLLYEYFTVYNELTKVKYVTEGMRKPAFLSGEQKKAIVDLLFKTNRKVTVKQLKEDYFKKIECFDSVEISGVEDRFNASLGTYHDLLKIIKDKDFLDNEENEDILEDIVLTLTLFEDREMIEERLKTYAHLFDDKVMKQLKRRRYTGWGRLSRKLINGIRDKQSGKTILDFLKSDGFANRNFMQLIHDDSLTFKEDIQKAQVSGQGDSLHEHIANLAGSPAIKKGILQTVKVVDELVKVMGRHKPENIVIEMARENQTTQKGQKNSRERMKRIEEGIKELGSQILKEHPVENTQLQNEKLYLYYLQNGRDMYVDQELDINRLSDYDVDHIVPQSFLKDDSIDNKVLTRSDKARGKSDNVPSEEVVKKMKNYWRQLLNAKLITQRKFDNLTKAERGGLSELDKAGFIKRQLVETRQITKHVAQILDSRMNTKYDENDKLIREVKVITLKSKLVSDFRKDFQFYKVREINNYHHAHDAYLNAVVGTALIKKYPKLESEFVYGDYKVYDVRKMIAKSEQEIGKATAKYFFYSNIMNFFKTEITLANGEIRKRPLIETNGETGEIVWDKGRDFATVRKVLSMPQVNIVKKTEVQTGGFSKESILPKRNSDKLIARKKDWDPKKYGGFDSPTVAYSVLVVAKVEKGKSKKLKSVKELLGITIMERSSFEKNPIDFLEAKGYKEVKKDLIIKLPKYSLFELENGRKRMLASAGELQKGNELALPSKYVNFLYLASHYEKLKGSPEDNEQKQLFVEQHKHYLDEIIEQISEFSKRVILADANLDKVLSAYNKHRDKPIREQAENIIHLFTLTNLGAPAAFKYFDTTIDRKRYTSTKEVLDATLIHQSITGLYETRIDLSQLGGDGGGSSGGSGGTLQLDDEYRLYSPLVKPDQNIQFWLEQFPQAWAETAGMGLAKQVPPQVIQLKASATPVSVRQYPLSKEAQEGIRPHVQRLIQQGILVPVQSPWNTPLLPVRKPGTNDYRPVQDLREVNKRVQDIHPTVPNPYNLLCALPPQRSWYTVLDLKDAFFCLRLHPTSQPLFAFEWRDPGTGRTGQLTWTRLPQGFKNSPTIFNEALHRDLANFRIQHPQVTLLQYVDDLLLAGATKQDCLEGTKALLLELSDLGYRASAKKAQICRREVTYLGYSLRDGQRWLTEARKKTVVQIPAPTTAKQVREFLGTAGFCRLWIPGFATLAAPLYPLTKPKGEFSWAPEHQKAFDAIKKALLSAPALALPDVTKPFTLYVDERKGVARGVLTQTLGPWRRPVAYLSKKLDPVASGWPVCLKAIAAVAILVKDADKLTLGQNITVIAPHALENIVRQPPDRWMTNARMTHYQSLLLTERVTFAPPAALNPATLLPEETDEPVTHDCHQLLIEETGVRKDLTDIPLTGEVLTWFTDGSSYVVEGKRMAGAAVVDGTRTIWASSLPEGTSAQKAELMALTQALRLAEGKSINIYTDSRYAFATAHVHGAIYKQRGWLTSAGREIKNKEEILSLLEALHLPKRLAIIHCPGHQKAKDPISRGNQMADRVAKQAAQGVNLLAGKRTADGSEFEKRTADGSEFESPKKKAKVE

SEQ ID NO: 166 - protein, 2084 aa, synthetic construct
MPAAKRVKLDGGDKKYSIGLDIGTNSVGWAVITDEYKVPSKKFKVLGNTDRHSIKKNLIGALLFDSGETAEATRLKRTARRRYTRRKNRICYLQEIFSNEMAKVDDSFFHRLEESFLVEEDKKHERHPIFGNIVDEVAYHEKYPTIYHLRKKLVDSTDKADLRLIYLALAHMIKFRGHFLIEGDLNPDNSDVDKLFIQLVQTYNQLFEENPINASGVDAKAILSARLSKSRRLENLIAQLPGEKKNGLFGNLIALSLGLTPNFKSNFDLAEDAKLQLSKDTYDDDLDNLLAQIGDQYADLFLAAKNLSDAILLSDILRVNTEITKAPLSASMIKRYDEHHQDLTLLKALVRQQLPEKYKEIFFDQSKNGYAGYIDGGASQEEFYKFIKPILEKMDGTEELLVKLNREDLLRKQRTFDNGSIPHQIHLGELHAILRRQEDFYPFLKDNREKIEKILTFRIPYYVGPLARGNSRFAWMTRKSEETITPWNFEEVVDKGASAQSFIERMTNFDKNLPNEKVLPKHSLLYEYFTVYNELTKVKYVTEGMRKPAFLSGEQKKAIVDLLFKTNRKVTVKQLKEDYFKKIECFDSVEISGVEDRFNASLGTYHDLLKIIKDKDFLDNEENEDILEDIVLTLTLFEDREMIEERLKTYAHLFDDKVMKQLKRRRYTGWGRLSRKLINGIRDKQSGKTILDFLKSDGFANRNFMQLIHDDSLTFKEDIQKAQVSGQGDSLHEHIANLAGSPAIKKGILQTVKVVDELVKVMGRHKPENIVIEMARENQTTQKGQKNSRERMKRIEEGIKELGSQILKEHPVENTQLQNEKLYLYYLQNGRDMYVDQELDINRLSDYDVDHIVPQSFLKDDSIDNKVLTRSDKARGKSDNVPSEEVVKKMKNYWRQLLNAKLITQRKFDNLTKAERGGLSELDKAGFIKRQLVETRQITKHVAQILDSRMNTKYDENDKLIREVKVITLKSKLVSDFRKDFQFYKVREINNYHHAHDAYLNAVVGTALIKKYPKLESEFVYGDYKVYDVRKMIAKSEQEIGKATAKYFFYSNIMNFFKTEITLANGEIRKRPLIETNGETGEIVWDKGRDFATVRKVLSMPQVNIVKKTEVQTGGFSKESILPKRNSDKLIARKKDWDPKKYGGFDSPTVAYSVLVVAKVEKGKSKKLKSVKELLGITIMERSSFEKNPIDFLEAKGYKEVKKDLIIKLPKYSLFELENGRKRMLASAGELQKGNELALPSKYVNFLYLASHYEKLKGSPEDNEQKQLFVEQHKHYLDEIIEQISEFSKRVILADANLDKVLSAYNKHRDKPIREQAENIIHLFTLTNLGAPAAFKYFDTTIDRKRYTSTKEVLDATLIHQSITGLYETRIDLSQLGGDGGGGGGGGGTLQLDDEYRLYSPLVKPDQNIQFWLEQFPQAWAETAGMGLAKQVPPQVIQLKASATPVSVRQYPLSKEAQEGIRPHVQRLIQQGILVPVQSPWNTPLLPVRKPGTNDYRPVQDLREVNKRVQDIHPTVPNPYNLLCALPPQRSWYTVLDLKDAFFCLRLHPTSQPLFAFEWRDPGTGRTGQLTWTRLPQGFKNSPTIFNEALHRDLANFRIQHPQVTLLQYVDDLLLAGATKQDCLEGTKALLLELSDLGYRASAKKAQICRREVTYLGYSLRDGQRWLTEARKKTVVQIPAPTTAKQVREFLGTAGFCRLWIPGFATLAAPLYPLTKPKGEFSWAPEHQKAFDAIKKALLSAPALALPDVTKPFTLYVDERKGVARGVLTQTLGPWRRPVAYLSKKLDPVASGWPVCLKAIAAVAILVKDADKLTLGQNITVIAPHALENIVRQPPDRWMTNARMTHYQSLLLTERVTFAPPAALNPATLLPEETDEPVTHDCHQLLIEETGVRKDLTDIPLTGEVLTWFTDGSSYVVEGKRMAGAAVVDGTRTIWASSLPEGTSAQKAELMALTQALRLAEGKSINIYTDSRYAFATAHVHGAIYKQRGWLTSAGREIKNKEEILSLLEALHLPKRLAIIHCPGHQKAKDPISRGNQMADRVAKQAAQGVNLLAGKRTADGSEFEKRTADGSEFESPKKKAKVE

SEQ ID NO: 167 - protein, 2088 aa, synthetic construct
MPAAKRVKLDGGDKKYSIGLDIGTNSVGWAVITDEYKVPSKKFKVLGNTDRHSIKKNLIGALLFDSGETAEATRLKRTARRRYTRRKNRICYLQEIFSNEMAKVDDSFFHRLEESFLVEEDKKHERHPIFGNIVDEVAYHEKYPTIYHLRKKLVDSTDKADLRLIYLALAHMIKFRGHFLIEGDLNPDNSDVDKLFIQLVQTYNQLFEENPINASGVDAKAILSARLSKSRRLENLIAQLPGEKKNGLFGNLIALSLGLTPNFKSNFDLAEDAKLQLSKDTYDDDLDNLLAQIGDQYADLFLAAKNLSDAILLSDILRVNTEITKAPLSASMIKRYDEHHQDLTLLKALVRQQLPEKYKEIFFDQSKNGYAGYIDGGASQEEFYKFIKPILEKMDGTEELLVKLNREDLLRKQRTFDNGSIPHQIHLGELHAILRRQEDFYPFLKDNREKIEKILTFRIPYYVGPLARGNSRFAWMTRKSEETITPWNFEEVVDKGASAQSFIERMTNFDKNLPNEKVLPKHSLLYEYFTVYNELTKVKYVTEGMRKPAFLSGEQKKAIVDLLFKTNRKVTVKQLKEDYFKKIECFDSVEISGVEDRFNASLGTYHDLLKIIKDKDFLDNEENEDILEDIVLTLTLFEDREMIEERLKTYAHLFDDKVMKQLKRRRYTGWGRLSRKLINGIRDKQSGKTILDFLKSDGFANRNFMQLIHDDSLTFKEDIQKAQVSGQGDSLHEHIANLAGSPAIKKGILQTVKVVDELVKVMGRHKPENIVIEMARENQTTQKGQKNSRERMKRIEEGIKELGSQILKEHPVENTQLQNEKLYLYYLQNGRDMYVDQELDINRLSDYDVDHIVPQSFLKDDSIDNKVLTRSDKARGKSDNVPSEEVVKKMKNYWRQLLNAKLITQRKFDNLTKAERGGLSELDKAGFIKRQLVETRQITKHVAQILDSRMNTKYDENDKLIREVKVITLKSKLVSDFRKDFQFYKVREINNYHHAHDAYLNAVVGTALIKKYPKLESEFVYGDYKVYDVRKMIAKSEQEIGKATAKYFFYSNIMNFFKTEITLANGEIRKRPLIETNGETGEIVWDKGRDFATVRKVLSMPQVNIVKKTEVQTGGFSKESILPKRNSDKLIARKKDWDPKKYGGFDSPTVAYSVLVVAKVEKGKSKKLKSVKELLGITIMERSSFEKNPIDFLEAKGYKEVKKDLIIKLPKYSLFELENGRKRMLASAGELQKGNELALPSKYVNFLYLASHYEKLKGSPEDNEQKQLFVEQHKHYLDEIIEQISEFSKRVILADANLDKVLSAYNKHRDKPIREQAENIIHLFTLTNLGAPAAFKYFDTTIDRKRYTSTKEVLDATLIHQSITGLYETRIDLSQLGGDGGPAPGGSGGGGGTLQLDDEYRLYSPLVKPDQNIQFWLEQFPQAWAETAGMGLAKQVPPQVIQLKASATPVSVRQYPLSKEAQEGIRPHVQRLIQQGILVPVQSPWNTPLLPVRKPGTNDYRPVQDLREVNKRVQDIHPTVPNPYNLLCALPPQRSWYTVLDLKDAFFCLRLHPTSQPLFAFEWRDPGTGRTGQLTWTRLPQGFKNSPTIFNEALHRDLANFRIQHPQVTLLQYVDDLLLAGATKQDCLEGTKALLLELSDLGYRASAKKAQICRREVTYLGYSLRDGQRWLTEARKKTVVQIPAPTTAKQVREFLGTAGFCRLWIPGFATLAAPLYPLTKPKGEFSWAPEHQKAFDAIKKALLSAPALALPDVTKPFTLYVDERKGVARGVLTQTLGPWRRPVAYLSKKLDPVASGWPVCLKAIAAVAILVKDADKLTLGQNITVIAPHALENIVRQPPDRWMTNARMTHYQSLLLTERVTFAPPAALNPATLLPEETDEPVTHDCHQLLIEETGVRKDLTDIPLTGEVLTWFTDGSSYVVEGKRMAGAAVVDGTRTIWASSLPEGTSAQKAELMALTQALRLAEGKSINIYTDSRYAFATAHVHGAIYKQRGWLTSAGREIKNKEEILSLLEALHLPKRLAIIHCPGHQKAKDPISRGNQMADRVAKQAAQGVNLLAGKRTADGSEFEKRTADGSEFESPKKKAKVE

SEQ ID NO: 168 - protein, 2090 aa, synthetic construct
MPAAKRVKLDGGDKKYSIGLDIGTNSVGWAVITDEYKVPSKKFKVLGNTDRHSIKKNLIGALLFDSGETAEATRLKRTARRRYTRRKNRICYLQEIFSNEMAKVDDSFFHRLEESFLVEEDKKHERHPIFGNIVDEVAYHEKYPTIYHLRKKLVDSTDKADLRLIYLALAHMIKFRGHFLIEGDLNPDNSDVDKLFIQLVQTYNQLFEENPINASGVDAKAILSARLSKSRRLENLIAQLPGEKKNGLFGNLIALSLGLTPNFKSNFDLAEDAKLQLSKDTYDDDLDNLLAQIGDQYADLFLAAKNLSDAILLSDILRVNTEITKAPLSASMIKRYDEHHQDLTLLKALVRQQLPEKYKEIFFDQSKNGYAGYIDGGASQEEFYKFIKPILEKMDGTEELLVKLNREDLLRKQRTFDNGSIPHQIHLGELHAILRRQEDFYPFLKDNREKIEKILTFRIPYYVGPLARGNSRFAWMTRKSEETITPWNFEEVVDKGASAQSFIERMTNFDKNLPNEKVLPKHSLLYEYFTVYNELTKVKYVTEGMRKPAFLSGEQKKAIVDLLFKTNRKVTVKQLKEDYFKKIECFDSVEISGVEDRFNASLGTYHDLLKIIKDKDFLDNEENEDILEDIVLTLTLFEDREMIEERLKTYAHLFDDKVMKQLKRRRYTGWGRLSRKLINGIRDKQSGKTILDFLKSDGFANRNFMQLIHDDSLTFKEDIQKAQVSGQGDSLHEHIANLAGSPAIKKGILQTVKVVDELVKVMGRHKPENIVIEMARENQTTQKGQKNSRERMKRIEEGIKELGSQILKEHPVENTQLQNEKLYLYYLQNGRDMYVDQELDINRLSDYDVDHIVPQSFLKDDSIDNKVLTRSDKARGKSDNVPSEEVVKKMKNYWRQLLNAKLITQRKFDNLTKAERGGLSELDKAGFIKRQLVETRQITKHVAQILDSRMNTKYDENDKLIREVKVITLKSKLVSDFRKDFQFYKVREINNYHHAHDAYLNAVVGTALIKKYPKLESEFVYGDYKVYDVRKMIAKSEQEIGKATAKYFFYSNIMNFFKTEITLANGEIRKRPLIETNGETGEIVWDKGRDFATVRKVLSMPQVNIVKKTEVQTGGFSKESILPKRNSDKLIARKKDWDPKKYGGFDSPTVAYSVLVVAKVEKGKSKKLKSVKELLGITIMERSSFEKNPIDFLEAKGYKEVKKDLIIKLPKYSLFELENGRKRMLASAGELQKGNELALPSKYVNFLYLASHYEKLKGSPEDNEQKQLFVEQHKHYLDEIIEQISEFSKRVILADANLDKVLSAYNKHRDKPIREQAENIIHLFTLTNLGAPAAFKYFDTTIDRKRYTSTKEVLDATLIHQSITGLYETRIDLSQLGGDGGEAAAKPAPGGSGGTLQLDDEYRLYSPLVKPDQNIQFWLEQFPQAWAETAGMGLAKQVPPQVIQLKASATPVSVRQYPLSKEAQEGIRPHVQRLIQQGILVPVQSPWNTPLLPVRKPGTNDYRPVQDLREVNKRVQDIHPTVPNPYNLLCALPPQRSWYTVLDLKDAFFCLRLHPTSQPLFAFEWRDPGTGRTGQLTWTRLPQGFKNSPTIFNEALHRDLANFRIQHPQVTLLQYVDDLLLAGATKQDCLEGTKALLLELSDLGYRASAKKAQICRREVTYLGYSLRDGQRWLTEARKKTVVQIPAPTTAKQVREFLGTAGFCRLWIPGFATLAAPLYPLTKPKGEFSWAPEHQKAFDAIKKALLSAPALALPDVTKPFTLYVDERKGVARGVLTQTLGPWRRPVAYLSKKLDPVASGWPVCLKAIAAVAILVKDADKLTLGQNITVIAPHALENIVRQPPDRWMTNARMTHYQSLLLTERVTFAPPAALNPATLLPEETDEPVTHDCHQLLIEETGVRKDLTDIPLTGEVLTWFTDGSSYVVEGKRMAGAAVVDGTRTIWASSLPEGTSAQKAELMALTQALRLAEGKSINIYTDSRYAFATAHVHGAIYKQRGWLTSAGREIKNKEEILSLLEALHLPKRLAIIHCPGHQKAKDPISRGNQMADRVAKQAAQGVNLLAGKRTADGSEFEKRTADGSEFESPKKKAKVE

SEQ ID NO: 169 - protein, 2088 aa, synthetic construct
MPAAKRVKLDGGDKKYSIGLDIGTNSVGWAVITDEYKVPSKKFKVLGNTDRHSIKKNLIGALLFDSGETAEATRLKRTARRRYTRRKNRICYLQEIFSNEMAKVDDSFFHRLEESFLVEEDKKHERHPIFGNIVDEVAYHEKYPTIYHLRKKLVDSTDKADLRLIYLALAHMIKFRGHFLIEGDLNPDNSDVDKLFIQLVQTYNQLFEENPINASGVDAKAILSARLSKSRRLENLIAQLPGEKKNGLFGNLIALSLGLTPNFKSNFDLAEDAKLQLSKDTYDDDLDNLLAQIGDQYADLFLAAKNLSDAILLSDILRVNTEITKAPLSASMIKRYDEHHQDLTLLKALVRQQLPEKYKEIFFDQSKNGYAGYIDGGASQEEFYKFIKPILEKMDGTEELLVKLNREDLLRKQRTFDNGSIPHQIHLGELHAILRRQEDFYPFLKDNREKIEKILTFRIPYYVGPLARGNSRFAWMTRKSEETITPWNFEEVVDKGASAQSFIERMTNFDKNLPNEKVLPKHSLLYEYFTVYNELTKVKYVTEGMRKPAFLSGEQKKAIVDLLFKTNRKVTVKQLKEDYFKKIECFDSVEISGVEDRFNASLGTYHDLLKIIKDKDFLDNEENEDILEDIVLTLTLFEDREMIEERLKTYAHLFDDKVMKQLKRRRYTGWGRLSRKLINGIRDKQSGKTILDFLKSDGFANRNFMQLIHDDSLTFKEDIQKAQVSGQGDSLHEHIANLAGSPAIKKGILQTVKVVDELVKVMGRHKPENIVIEMARENQTTQKGQKNSRERMKRIEEGIKELGSQILKEHPVENTQLQNEKLYLYYLQNGRDMYVDQELDINRLSDYDVDHIVPQSFLKDDSIDNKVLTRSDKARGKSDNVPSEEVVKKMKNYWRQLLNAKLITQRKFDNLTKAERGGLSELDKAGFIKRQLVETRQITKHVAQILDSRMNTKYDENDKLIREVKVITLKSKLVSDFRKDFQFYKVREINNYHHAHDAYLNAVVGTALIKKYPKLESEFVYGDYKVYDVRKMIAKSEQEIGKATAKYFFYSNIMNFFKTEITLANGEIRKRPLIETNGETGEIVWDKGRDFATVRKVLSMPQVNIVKKTEVQTGGFSKESILPKRNSDKLIARKKDWDPKKYGGFDSPTVAYSVLVVAKVEKGKSKKLKSVKELLGITIMERSSFEKNPIDFLEAKGYKEVKKDLIIKLPKYSLFELENGRKRMLASAGELQKGNELALPSKYVNFLYLASHYEKLKGSPEDNEQKQLFVEQHKHYLDEIIEQISEFSKRVILADANLDKVLSAYNKHRDKPIREQAENIIHLFTLTNLGAPAAFKYFDTTIDRKRYTSTKEVLDATLIHQSITGLYETRIDLSQLGGDGGGGGPAPGGSGGTLQLDDEYRLYSPLVKPDQNIQFWLEQFPQAWAETAGMGLAKQVPPQVIQLKASATPVSVRQYPLSKEAQEGIRPHVQRLIQQGILVPVQSPWNTPLLPVRKPGTNDYRPVQDLREVNKRVQDIHPTVPNPYNLLCALPPQRSWYTVLDLKDAFFCLRLHPTSQPLFAFEWRDPGTGRTGQLTWTRLPQGFKNSPTIFNEALHRDLANFRIQHPQVTLLQYVDDLLLAGATKQDCLEGTKALLLELSDLGYRASAKKAQICRREVTYLGYSLRDGQRWLTEARKKTVVQIPAPTTAKQVREFLGTAGFCRLWIPGFATLAAPLYPLTKPKGEFSWAPEHQKAFDAIKKALLSAPALALPDVTKPFTLYVDERKGVARGVLTQTLGPWRRPVAYLSKKLDPVASGWPVCLKAIAAVAILVKDADKLTLGQNITVIAPHALENIVRQPPDRWMTNARMTHYQSLLLTERVTFAPPAALNPATLLPEETDEPVTHDCHQLLIEETGVRKDLTDIPLTGEVLTWFTDGSSYVVEGKRMAGAAVVDGTRTIWASSLPEGTSAQKAELMALTQALRLAEGKSINIYTDSRYAFATAHVHGAIYKQRGWLTSAGREIKNKEEILSLLEALHLPKRLAIIHCPGHQKAKDPISRGNQMADRVAKQAAQGVNLLAGKRTADGSEFEKRTADGSEFESPKKKAKVE

SEQ ID NO: 170 - protein, 2090 aa, synthetic construct
MPAAKRVKLDGGDKKYSIGLDIGTNSVGWAVITDEYKVPSKKFKVLGNTDRHSIKKNLIGALLFDSGETAEATRLKRTARRRYTRRKNRICYLQEIFSNEMAKVDDSFFHRLEESFLVEEDKKHERHPIFGNIVDEVAYHEKYPTIYHLRKKLVDSTDKADLRLIYLALAHMIKFRGHFLIEGDLNPDNSDVDKLFIQLVQTYNQLFEENPINASGVDAKAILSARLSKSRRLENLIAQLPGEKKNGLFGNLIALSLGLTPNFKSNFDLAEDAKLQLSKDTYDDDLDNLLAQIGDQYADLFLAAKNLSDAILLSDILRVNTEITKAPLSASMIKRYDEHHQDLTLLKALVRQQLPEKYKEIFFDQSKNGYAGYIDGGASQEEFYKFIKPILEKMDGTEELLVKLNREDLLRKQRTFDNGSIPHQIHLGELHAILRRQEDFYPFLKDNREKIEKILTFRIPYYVGPLARGNSRFAWMTRKSEETITPWNFEEVVDKGASAQSFIERMTNFDKNLPNEKVLPKHSLLYEYFTVYNELTKVKYVTEGMRKPAFLSGEQKKAIVDLLFKTNRKVTVKQLKEDYFKKIECFDSVEISGVEDRFNASLGTYHDLLKIIKDKDFLDNEENEDILEDIVLTLTLFEDREMIEERLKTYAHLFDDKVMKQLKRRRYTGWGRLSRKLINGIRDKQSGKTILDFLKSDGFANRNFMQLIHDDSLTFKEDIQKAQVSGQGDSLHEHIANLAGSPAIKKGILQTVKVVDELVKVMGRHKPENIVIEMARENQTTQKGQKNSRERMKRIEEGIKELGSQILKEHPVENTQLQNEKLYLYYLQNGRDMYVDQELDINRLSDYDVDHIVPQSFLKDDSIDNKVLTRSDKARGKSDNVPSEEVVKKMKNYWRQLLNAKLITQRKFDNLTKAERGGLSELDKAGFIKRQLVETRQITKHVAQILDSRMNTKYDENDKLIREVKVITLKSKLVSDFRKDFQFYKVREINNYHHAHDAYLNAVVGTALIKKYPKLESEFVYGDYKVYDVRKMIAKSEQEIGKATAKYFFYSNIMNFFKTEITLANGEIRKRPLIETNGETGEIVWDKGRDFATVRKVLSMPQVNIVKKTEVQTGGFSKESILPKRNSDKLIARKKDWDPKKYGGFDSPTVAYSVLVVAKVEKGKSKKLKSVKELLGITIMERSSFEKNPIDFLEAKGYKEVKKDLIIKLPKYSLFELENGRKRMLASAGELQKGNELALPSKYVNFLYLASHYEKLKGSPEDNEQKQLFVEQHKHYLDEIIEQISEFSKRVILADANLDKVLSAYNKHRDKPIREQAENIIHLFTLTNLGAPAAFKYFDTTIDRKRYTSTKEVLDATLIHQSITGLYETRIDLSQLGGDGGGSSGGSEAAAKGGTLQLDDEYRLYSPLVKPDQNIQFWLEQFPQAWAETAGMGLAKQVPPQVIQLKASATPVSVRQYPLSKEAQEGIRPHVQRLIQQGILVPVQSPWNTPLLPVRKPGTNDYRPVQDLREVNKRVQDIHPTVPNPYNLLCALPPQRSWYTVLDLKDAFFCLRLHPTSQPLFAFEWRDPGTGRTGQLTWTRLPQGFKNSPTIFNEALHRDLANFRIQHPQVTLLQYVDDLLLAGATKQDCLEGTKALLLELSDLGYRASAKKAQICRREVTYLGYSLRDGQRWLTEARKKTVVQIPAPTTAKQVREFLGTAGFCRLWIPGFATLAAPLYPLTKPKGEFSWAPEHQKAFDAIKKALLSAPALALPDVTKPFTLYVDERKGVARGVLTQTLGPWRRPVAYLSKKLDPVASGWPVCLKAIAAVAILVKDADKLTLGQNITVIAPHALENIVRQPPDRWMTNARMTHYQSLLLTERVTFAPPAALNPATLLPEETDEPVTHDCHQLLIEETGVRKDLTDIPLTGEVLTWFTDGSSYVVEGKRMAGAAVVDGTRTIWASSLPEGTSAQKAELMALTQALRLAEGKSINIYTDSRYAFATAHVHGAIYKQRGWLTSAGREIKNKEEILSLLEALHLPKRLAIIHCPGHQKAKDPISRGNQMADRVAKQAAQGVNLLAGKRTADGSEFEKRTADGSEFESPKKKAKVE

SEQ ID NO: 171 - protein, 2088 aa, synthetic construct
MPAAKRVKLDGGDKKYSIGLDIGTNSVGWAVITDEYKVPSKKFKVLGNTDRHSIKKNLIGALLFDSGETAEATRLKRTARRRYTRRKNRICYLQEIFSNEMAKVDDSFFHRLEESFLVEEDKKHERHPIFGNIVDEVAYHEKYPTIYHLRKKLVDSTDKADLRLIYLALAHMIKFRGHFLIEGDLNPDNSDVDKLFIQLVQTYNQLFEENPINASGVDAKAILSARLSKSRRLENLIAQLPGEKKNGLFGNLIALSLGLTPNFKSNFDLAEDAKLQLSKDTYDDDLDNLLAQIGDQYADLFLAAKNLSDAILLSDILRVNTEITKAPLSASMIKRYDEHHQDLTLLKALVRQQLPEKYKEIFFDQSKNGYAGYIDGGASQEEFYKFIKPILEKMDGTEELLVKLNREDLLRKQRTFDNGSIPHQIHLGELHAILRRQEDFYPFLKDNREKIEKILTFRIPYYVGPLARGNSRFAWMTRKSEETITPWNFEEVVDKGASAQSFIERMTNFDKNLPNEKVLPKHSLLYEYFTVYNELTKVKYVTEGMRKPAFLSGEQKKAIVDLLFKTNRKVTVKQLKEDYFKKIECFDSVEISGVEDRFNASLGTYHDLLKIIKDKDFLDNEENEDILEDIVLTLTLFEDREMIEERLKTYAHLFDDKVMKQLKRRRYTGWGRLSRKLINGIRDKQSGKTILDFLKSDGFANRNFMQLIHDDSLTFKEDIQKAQVSGQGDSLHEHIANLAGSPAIKKGILQTVKVVDELVKVMGRHKPENIVIEMARENQTTQKGQKNSRERMKRIEEGIKELGSQILKEHPVENTQLQNEKLYLYYLQNGRDMYVDQELDINRLSDYDVDHIVPQSFLKDDSIDNKVLTRSDKARGKSDNVPSEEVVKKMKNYWRQLLNAKLITQRKFDNLTKAERGGLSELDKAGFIKRQLVETRQITKHVAQILDSRMNTKYDENDKLIREVKVITLKSKLVSDFRKDFQFYKVREINNYHHAHDAYLNAVVGTALIKKYPKLESEFVYGDYKVYDVRKMIAKSEQEIGKATAKYFFYSNIMNFFKTEITLANGEIRKRPLIETNGETGEIVWDKGRDFATVRKVLSMPQVNIVKKTEVQTGGFSKESILPKRNSDKLIARKKDWDPKKYGGFDSPTVAYSVLVVAKVEKGKSKKLKSVKELLGITIMERSSFEKNPIDFLEAKGYKEVKKDLIIKLPKYSLFELENGRKRMLASAGELQKGNELALPSKYVNFLYLASHYEKLKGSPEDNEQKQLFVEQHKHYLDEIIEQISEFSKRVILADANLDKVLSAYNKHRDKPIREQAENIIHLFTLTNLGAPAAFKYFDTTIDRKRYTSTKEVLDATLIHQSITGLYETRIDLSQLGGDGGGSSPAPGGSGGTLQLDDEYRLYSPLVKPDQNIQFWLEQFPQAWAETAGMGLAKQVPPQVIQLKASATPVSVRQYPLSKEAQEGIRPHVQRLIQQGILVPVQSPWNTPLLPVRKPGTNDYRPVQDLREVNKRVQDIHPTVPNPYNLLCALPPQRSWYTVLDLKDAFFCLRLHPTSQPLFAFEWRDPGTGRTGQLTWTRLPQGFKNSPTIFNEALHRDLANFRIQHPQVTLLQYVDDLLLAGATKQDCLEGTKALLLELSDLGYRASAKKAQICRREVTYLGYSLRDGQRWLTEARKKTVVQIPAPTTAKQVREFLGTAGFCRLWIPGFATLAAPLYPLTKPKGEFSWAPEHQKAFDAIKKALLSAPALALPDVTKPFTLYVDERKGVARGVLTQTLGPWRRPVAYLSKKLDPVASGWPVCLKAIAAVAILVKDADKLTLGQNITVIAPHALENIVRQPPDRWMTNARMTHYQSLLLTERVTFAPPAALNPATLLPEETDEPVTHDCHQLLIEETGVRKDLTDIPLTGEVLTWFTDGSSYVVEGKRMAGAAVVDGTRTIWASSLPEGTSAQKAELMALTQALRLAEGKSINIYTDSRYAFATAHVHGAIYKQRGWLTSAGREIKNKEEILSLLEALHLPKRLAIIHCPGHQKAKDPISRGNQMADRVAKQAAQGVNLLAGKRTADGSEFEKRTADGSEFESPKKKAKVE

SEQ ID NO: 172 - protein, 2090 aa, synthetic construct
MPAAKRVKLDGGDKKYSIGLDIGTNSVGWAVITDEYKVPSKKFKVLGNTDRHSIKKNLIGALLFDSGETAEATRLKRTARRRYTRRKNRICYLQEIFSNEMAKVDDSFFHRLEESFLVEEDKKHERHPIFGNIVDEVAYHEKYPTIYHLRKKLVDSTDKADLRLIYLALAHMIKFRGHFLIEGDLNPDNSDVDKLFIQLVQTYNQLFEENPINASGVDAKAILSARLSKSRRLENLIAQLPGEKKNGLFGNLIALSLGLTPNFKSNFDLAEDAKLQLSKDTYDDDLDNLLAQIGDQYADLFLAAKNLSDAILLSDILRVNTEITKAPLSASMIKRYDEHHQDLTLLKALVRQQLPEKYKEIFFDQSKNGYAGYIDGGASQEEFYKFIKPILEKMDGTEELLVKLNREDLLRKQRTFDNGSIPHQIHLGELHAILRRQEDFYPFLKDNREKIEKILTFRIPYYVGPLARGNSRFAWMTRKSEETITPWNFEEVVDKGASAQSFIERMTNFDKNLPNEKVLPKHSLLYEYFTVYNELTKVKYVTEGMRKPAFLSGEQKKAIVDLLFKTNRKVTVKQLKEDYFKKIECFDSVEISGVEDRFNASLGTYHDLLKIIKDKDFLDNEENEDILEDIVLTLTLFEDREMIEERLKTYAHLFDDKVMKQLKRRRYTGWGRLSRKLINGIRDKQSGKTILDFLKSDGFANRNFMQLIHDDSLTFKEDIQKAQVSGQGDSLHEHIANLAGSPAIKKGILQTVKVVDELVKVMGRHKPENIVIEMARENQTTQKGQKNSRERMKRIEEGIKELGSQILKEHPVENTQLQNEKLYLYYLQNGRDMYVDQELDINRLSDYDVDHIVPQSFLKDDSIDNKVLTRSDKARGKSDNVPSEEVVKKMKNYWRQLLNAKLITQRKFDNLTKAERGGLSELDKAGFIKRQLVETRQITKHVAQILDSRMNTKYDENDKLIREVKVITLKSKLVSDFRKDFQFYKVREINNYHHAHDAYLNAVVGTALIKKYPKLESEFVYGDYKVYDVRKMIAKSEQEIGKATAKYFFYSNIMNFFKTEITLANGEIRKRPLIETNGETGEIVWDKGRDFATVRKVLSMPQVNIVKKTEVQTGGFSKESILPKRNSDKLIARKKDWDPKKYGGFDSPTVAYSVLVVAKVEKGKSKKLKSVKELLGITIMERSSFEKNPIDFLEAKGYKEVKKDLIIKLPKYSLFELENGRKRMLASAGELQKGNELALPSKYVNFLYLASHYEKLKGSPEDNEQKQLFVEQHKHYLDEIIEQISEFSKRVILADANLDKVLSAYNKHRDKPIREQAENIIHLFTLTNLGAPAAFKYFDTTIDRKRYTSTKEVLDATLIHQSITGLYETRIDLSQLGGDGGGGSGGGEAAAKGGTLQLDDEYRLYSPLVKPDQNIQFWLEQFPQAWAETAGMGLAKQVPPQVIQLKASATPVSVRQYPLSKEAQEGIRPHVQRLIQQGILVPVQSPWNTPLLPVRKPGTNDYRPVQDLREVNKRVQDIHPTVPNPYNLLCALPPQRSWYTVLDLKDAFFCLRLHPTSQPLFAFEWRDPGTGRTGQLTWTRLPQGFKNSPTIFNEALHRDLANFRIQHPQVTLLQYVDDLLLAGATKQDCLEGTKALLLELSDLGYRASAKKAQICRREVTYLGYSLRDGQRWLTEARKKTVVQIPAPTTAKQVREFLGTAGFCRLWIPGFATLAAPLYPLTKPKGEFSWAPEHQKAFDAIKKALLSAPALALPDVTKPFTLYVDERKGVARGVLTQTLGPWRRPVAYLSKKLDPVASGWPVCLKAIAAVAILVKDADKLTLGQNITVIAPHALENIVRQPPDRWMTNARMTHYQSLLLTERVTFAPPAALNPATLLPEETDEPVTHDCHQLLIEETGVRKDLTDIPLTGEVLTWFTDGSSYVVEGKRMAGAAVVDGTRTIWASSLPEGTSAQKAELMALTQALRLAEGKSINIYTDSRYAFATAHVHGAIYKQRGWLTSAGREIKNKEEILSLLEALHLPKRLAIIHCPGHQKAKDPISRGNQMADRVAKQAAQGVNLLAGKRTADGSEFEKRTADGSEFESPKKKAKVE

SEQ ID NO: 173 - protein, 2088 aa, synthetic construct
MPAAKRVKLDGGDKKYSIGLDIGTNSVGWAVITDEYKVPSKKFKVLGNTDRHSIKKNLIGALLFDSGETAEATRLKRTARRRYTRRKNRICYLQEIFSNEMAKVDDSFFHRLEESFLVEEDKKHERHPIFGNIVDEVAYHEKYPTIYHLRKKLVDSTDKADLRLIYLALAHMIKFRGHFLIEGDLNPDNSDVDKLFIQLVQTYNQLFEENPINASGVDAKAILSARLSKSRRLENLIAQLPGEKKNGLFGNLIALSLGLTPNFKSNFDLAEDAKLQLSKDTYDDDLDNLLAQIGDQYADLFLAAKNLSDAILLSDILRVNTEITKAPLSASMIKRYDEHHQDLTLLKALVRQQLPEKYKEIFFDQSKNGYAGYIDGGASQEEFYKFIKPILEKMDGTEELLVKLNREDLLRKQRTFDNGSIPHQIHLGELHAILRRQEDFYPFLKDNREKIEKILTFRIPYYVGPLARGNSRFAWMTRKSEETITPWNFEEVVDKGASAQSFIERMTNFDKNLPNEKVLPKHSLLYEYFTVYNELTKVKYVTEGMRKPAFLSGEQKKAIVDLLFKTNRKVTVKQLKEDYFKKIECFDSVEISGVEDRFNASLGTYHDLLKIIKDKDFLDNEENEDILEDIVLTLTLFEDREMIEERLKTYAHLFDDKVMKQLKRRRYTGWGRLSRKLINGIRDKQSGKTILDFLKSDGFANRNFMQLIHDDSLTFKEDIQKAQVSGQGDSLHEHIANLAGSPAIKKGILQTVKVVDELVKVMGRHKPENIVIEMARENQTTQKGQKNSRERMKRIEEGIKELGSQILKEHPVENTQLQNEKLYLYYLQNGRDMYVDQELDINRLSDYDVDHIVPQSFLKDDSIDNKVLTRSDKARGKSDNVPSEEVVKKMKNYWRQLLNAKLITQRKFDNLTKAERGGLSELDKAGFIKRQLVETRQITKHVAQILDSRMNTKYDENDKLIREVKVITLKSKLVSDFRKDFQFYKVREINNYHHAHDAYLNAVVGTALIKKYPKLESEFVYGDYKVYDVRKMIAKSEQEIGKATAKYFFYSNIMNFFKTEITLANGEIRKRPLIETNGETGEIVWDKGRDFATVRKVLSMPQVNIVKKTEVQTGGFSKESILPKRNSDKLIARKKDWDPKKYGGFDSPTVAYSVLVVAKVEKGKSKKLKSVKELLGITIMERSSFEKNPIDFLEAKGYKEVKKDLIIKLPKYSLFELENGRKRMLASAGELQKGNELALPSKYVNFLYLASHYEKLKGSPEDNEQKQLFVEQHKHYLDEIIEQISEFSKRVILADANLDKVLSAYNKHRDKPIREQAENIIHLFTLTNLGAPAAFKYFDTTIDRKRYTSTKEVLDATLIHQSITGLYETRIDLSQLGGDGGPAPGGGGGSGGTLQLDDEYRLYSPLVKPDQNIQFWLEQFPQAWAETAGMGLAKQVPPQVIQLKASATPVSVRQYPLSKEAQEGIRPHVQRLIQQGILVPVQSPWNTPLLPVRKPGTNDYRPVQDLREVNKRVQDIHPTVPNPYNLLCALPPQRSWYTVLDLKDAFFCLRLHPTSQPLFAFEWRDPGTGRTGQLTWTRLPQGFKNSPTIFNEALHRDLANFRIQHPQVTLLQYVDDLLLAGATKQDCLEGTKALLLELSDLGYRASAKKAQICRREVTYLGYSLRDGQRWLTEARKKTVVQIPAPTTAKQVREFLGTAGFCRLWIPGFATLAAPLYPLTKPKGEFSWAPEHQKAFDAIKKALLSAPALALPDVTKPFTLYVDERKGVARGVLTQTLGPWRRPVAYLSKKLDPVASGWPVCLKAIAAVAILVKDADKLTLGQNITVIAPHALENIVRQPPDRWMTNARMTHYQSLLLTERVTFAPPAALNPATLLPEETDEPVTHDCHQLLIEETGVRKDLTDIPLTGEVLTWFTDGSSYVVEGKRMAGAAVVDGTRTIWASSLPEGTSAQKAELMALTQALRLAEGKSINIYTDSRYAFATAHVHGAIYKQRGWLTSAGREIKNKEEILSLLEALHLPKRLAIIHCPGHQKAKDPISRGNQMADRVAKQAAQGVNLLAGKRTADGSEFEKRTADGSEFESPKKKAKVE

SEQ ID NO: 174 - protein, 2085 aa, synthetic construct
MPAAKRVKLDGGDKKYSIGLDIGTNSVGWAVITDEYKVPSKKFKVLGNTDRHSIKKNLIGALLFDSGETAEATRLKRTARRRYTRRKNRICYLQEIFSNEMAKVDDSFFHRLEESFLVEEDKKHERHPIFGNIVDEVAYHEKYPTIYHLRKKLVDSTDKADLRLIYLALAHMIKFRGHFLIEGDLNPDNSDVDKLFIQLVQTYNQLFEENPINASGVDAKAILSARLSKSRRLENLIAQLPGEKKNGLFGNLIALSLGLTPNFKSNFDLAEDAKLQLSKDTYDDDLDNLLAQIGDQYADLFLAAKNLSDAILLSDILRVNTEITKAPLSASMIKRYDEHHQDLTLLKALVRQQLPEKYKEIFFDQSKNGYAGYIDGGASQEEFYKFIKPILEKMDGTEELLVKLNREDLLRKQRTFDNGSIPHQIHLGELHAILRRQEDFYPFLKDNREKIEKILTFRIPYYVGPLARGNSRFAWMTRKSEETITPWNFEEVVDKGASAQSFIERMTNFDKNLPNEKVLPKHSLLYEYFTVYNELTKVKYVTEGMRKPAFLSGEQKKAIVDLLFKTNRKVTVKQLKEDYFKKIECFDSVEISGVEDRFNASLGTYHDLLKIIKDKDFLDNEENEDILEDIVLTLTLFEDREMIEERLKTYAHLFDDKVMKQLKRRRYTGWGRLSRKLINGIRDKQSGKTILDFLKSDGFANRNFMQLIHDDSLTFKEDIQKAQVSGQGDSLHEHIANLAGSPAIKKGILQTVKVVDELVKVMGRHKPENIVIEMARENQTTQKGQKNSRERMKRIEEGIKELGSQILKEHPVENTQLQNEKLYLYYLQNGRDMYVDQELDINRLSDYDVDHIVPQSFLKDDSIDNKVLTRSDKARGKSDNVPSEEVVKKMKNYWRQLLNAKLITQRKFDNLTKAERGGLSELDKAGFIKRQLVETRQITKHVAQILDSRMNTKYDENDKLIREVKVITLKSKLVSDFRKDFQFYKVREINNYHHAHDAYLNAVVGTALIKKYPKLESEFVYGDYKVYDVRKMIAKSEQEIGKATAKYFFYSNIMNFFKTEITLANGEIRKRPLIETNGETGEIVWDKGRDFATVRKVLSMPQVNIVKKTEVQTGGFSKESILPKRNSDKLIARKKDWDPKKYGGFDSPTVAYSVLVVAKVEKGKSKKLKSVKELLGITIMERSSFEKNPIDFLEAKGYKEVKKDLIIKLPKYSLFELENGRKRMLASAGELQKGNELALPSKYVNFLYLASHYEKLKGSPEDNEQKQLFVEQHKHYLDEIIEQISEFSKRVILADANLDKVLSAYNKHRDKPIREQAENIIHLFTLTNLGAPAAFKYFDTTIDRKRYTSTKEVLDATLIHQSITGLYETRIDLSQLGGDGGGSSGGGGGTLQLDDEYRLYSPLVKPDQNIQFWLEQFPQAWAETAGMGLAKQVPPQVIQLKASATPVSVRQYPLSKEAQEGIRPHVQRLIQQGILVPVQSPWNTPLLPVRKPGTNDYRPVQDLREVNKRVQDIHPTVPNPYNLLCALPPQRSWYTVLDLKDAFFCLRLHPTSQPLFAFEWRDPGTGRTGQLTWTRLPQGFKNSPTIFNEALHRDLANFRIQHPQVTLLQYVDDLLLAGATKQDCLEGTKALLLELSDLGYRASAKKAQICRREVTYLGYSLRDGQRWLTEARKKTVVQIPAPTTAKQVREFLGTAGFCRLWIPGFATLAAPLYPLTKPKGEFSWAPEHQKAFDAIKKALLSAPALALPDVTKPFTLYVDERKGVARGVLTQTLGPWRRPVAYLSKKLDPVASGWPVCLKAIAAVAILVKDADKLTLGQNITVIAPHALENIVRQPPDRWMTNARMTHYQSLLLTERVTFAPPAALNPATLLPEETDEPVTHDCHQLLIEETGVRKDLTDIPLTGEVLTWFTDGSSYVVEGKRMAGAAVVDGTRTIWASSLPEGTSAQKAELMALTQALRLAEGKSINIYTDSRYAFATAHVHGAIYKQRGWLTSAGREIKNKEEILSLLEALHLPKRLAIIHCPGHQKAKDPISRGNQMADRVAKQAAQGVNLLAGKRTADGSEFEKRTADGSEFESPKKKAKVE

SEQ ID NO: 175 - protein, 2088 aa, synthetic construct
MPAAKRVKLDGGDKKYSIGLDIGTNSVGWAVITDEYKVPSKKFKVLGNTDRHSIKKNLIGALLFDSGETAEATRLKRTARRRYTRRKNRICYLQEIFSNEMAKVDDSFFHRLEESFLVEEDKKHERHPIFGNIVDEVAYHEKYPTIYHLRKKLVDSTDKADLRLIYLALAHMIKFRGHFLIEGDLNPDNSDVDKLFIQLVQTYNQLFEENPINASGVDAKAILSARLSKSRRLENLIAQLPGEKKNGLFGNLIALSLGLTPNFKSNFDLAEDAKLQLSKDTYDDDLDNLLAQIGDQYADLFLAAKNLSDAILLSDILRVNTEITKAPLSASMIKRYDEHHQDLTLLKALVRQQLPEKYKEIFFDQSKNGYAGYIDGGASQEEFYKFIKPILEKMDGTEELLVKLNREDLLRKQRTFDNGSIPHQIHLGELHAILRRQEDFYPFLKDNREKIEKILTFRIPYYVGPLARGNSRFAWMTRKSEETITPWNFEEVVDKGASAQSFIERMTNFDKNLPNEKVLPKHSLLYEYFTVYNELTKVKYVTEGMRKPAFLSGEQKKAIVDLLFKTNRKVTVKQLKEDYFKKIECFDSVEISGVEDRFNASLGTYHDLLKIIKDKDFLDNEENEDILEDIVLTLTLFEDREMIEERLKTYAHLFDDKVMKQLKRRRYTGWGRLSRKLINGIRDKQSGKTILDFLKSDGFANRNFMQLIHDDSLTFKEDIQKAQVSGQGDSLHEHIANLAGSPAIKKGILQTVKVVDELVKVMGRHKPENIVIEMARENQTTQKGQKNSRERMKRIEEGIKELGSQILKEHPVENTQLQNEKLYLYYLQNGRDMYVDQELDINRLSDYDVDHIVPQSFLKDDSIDNKVLTRSDKARGKSDNVPSEEVVKKMKNYWRQLLNAKLITQRKFDNLTKAERGGLSELDKAGFIKRQLVETRQITKHVAQILDSRMNTKYDENDKLIREVKVITLKSKLVSDFRKDFQFYKVREINNYHHAHDAYLNAVVGTALIKKYPKLESEFVYGDYKVYDVRKMIAKSEQEIGKATAKYFFYSNIMNFFKTEITLANGEIRKRPLIETNGETGEIVWDKGRDFATVRKVLSMPQVNIVKKTEVQTGGFSKESILPKRNSDKLIARKKDWDPKKYGGFDSPTVAYSVLVVAKVEKGKSKKLKSVKELLGITIMERSSFEKNPIDFLEAKGYKEVKKDLIIKLPKYSLFELENGRKRMLASAGELQKGNELALPSKYVNFLYLASHYEKLKGSPEDNEQKQLFVEQHKHYLDEIIEQISEFSKRVILADANLDKVLSAYNKHRDKPIREQAENIIHLFTLTNLGAPAAFKYFDTTIDRKRYTSTKEVLDATLIHQSITGLYETRIDLSQLGGDGGGGSPAPGSSGGTLQLDDEYRLYSPLVKPDQNIQFWLEQFPQAWAETAGMGLAKQVPPQVIQLKASATPVSVRQYPLSKEAQEGIRPHVQRLIQQGILVPVQSPWNTPLLPVRKPGTNDYRPVQDLREVNKRVQDIHPTVPNPYNLLCALPPQRSWYTVLDLKDAFFCLRLHPTSQPLFAFEWRDPGTGRTGQLTWTRLPQGFKNSPTIFNEALHRDLANFRIQHPQVTLLQYVDDLLLAGATKQDCLEGTKALLLELSDLGYRASAKKAQICRREVTYLGYSLRDGQRWLTEARKKTVVQIPAPTTAKQVREFLGTAGFCRLWIPGFATLAAPLYPLTKPKGEFSWAPEHQKAFDAIKKALLSAPALALPDVTKPFTLYVDERKGVARGVLTQTLGPWRRPVAYLSKKLDPVASGWPVCLKAIAAVAILVKDADKLTLGQNITVIAPHALENIVRQPPDRWMTNARMTHYQSLLLTERVTFAPPAALNPATLLPEETDEPVTHDCHQLLIEETGVRKDLTDIPLTGEVLTWFTDGSSYVVEGKRMAGAAVVDGTRTIWASSLPEGTSAQKAELMALTQALRLAEGKSINIYTDSRYAFATAHVHGAIYKQRGWLTSAGREIKNKEEILSLLEALHLPKRLAIIHCPGHQKAKDPISRGNQMADRVAKQAAQGVNLLAGKRTADGSEFEKRTADGSEFESPKKKAKVE

SEQ ID NO: 176 - protein, 2085 aa, synthetic construct
MPAAKRVKLDGGDKKYSIGLDIGTNSVGWAVITDEYKVPSKKFKVLGNTDRHSIKKNLIGALLFDSGETAEATRLKRTARRRYTRRKNRICYLQEIFSNEMAKVDDSFFHRLEESFLVEEDKKHERHPIFGNIVDEVAYHEKYPTIYHLRKKLVDSTDKADLRLIYLALAHMIKFRGHFLIEGDLNPDNSDVDKLFIQLVQTYNQLFEENPINASGVDAKAILSARLSKSRRLENLIAQLPGEKKNGLFGNLIALSLGLTPNFKSNFDLAEDAKLQLSKDTYDDDLDNLLAQIGDQYADLFLAAKNLSDAILLSDILRVNTEITKAPLSASMIKRYDEHHQDLTLLKALVRQQLPEKYKEIFFDQSKNGYAGYIDGGASQEEFYKFIKPILEKMDGTEELLVKLNREDLLRKQRTFDNGSIPHQIHLGELHAILRRQEDFYPFLKDNREKIEKILTFRIPYYVGPLARGNSRFAWMTRKSEETITPWNFEEVVDKGASAQSFIERMTNFDKNLPNEKVLPKHSLLYEYFTVYNELTKVKYVTEGMRKPAFLSGEQKKAIVDLLFKTNRKVTVKQLKEDYFKKIECFDSVEISGVEDRFNASLGTYHDLLKIIKDKDFLDNEENEDILEDIVLTLTLFEDREMIEERLKTYAHLFDDKVMKQLKRRRYTGWGRLSRKLINGIRDKQSGKTILDFLKSDGFANRNFMQLIHDDSLTFKEDIQKAQVSGQGDSLHEHIANLAGSPAIKKGILQTVKVVDELVKVMGRHKPENIVIEMARENQTTQKGQKNSRERMKRIEEGIKELGSQILKEHPVENTQLQNEKLYLYYLQNGRDMYVDQELDINRLSDYDVDHIVPQSFLKDDSIDNKVLTRSDKARGKSDNVPSEEVVKKMKNYWRQLLNAKLITQRKFDNLTKAERGGLSELDKAGFIKRQLVETRQITKHVAQILDSRMNTKYDENDKLIREVKVITLKSKLVSDFRKDFQFYKVREINNYHHAHDAYLNAVVGTALIKKYPKLESEFVYGDYKVYDVRKMIAKSEQEIGKATAKYFFYSNIMNFFKTEITLANGEIRKRPLIETNGETGEIVWDKGRDFATVRKVLSMPQVNIVKKTEVQTGGFSKESILPKRNSDKLIARKKDWDPKKYGGFDSPTVAYSVLVVAKVEKGKSKKLKSVKELLGITIMERSSFEKNPIDFLEAKGYKEVKKDLIIKLPKYSLFELENGRKRMLASAGELQKGNELALPSKYVNFLYLASHYEKLKGSPEDNEQKQLFVEQHKHYLDEIIEQISEFSKRVILADANLDKVLSAYNKHRDKPIREQAENIIHLFTLTNLGAPAAFKYFDTTIDRKRYTSTKEVLDATLIHQSITGLYETRIDLSQLGGDGGGGSGSSGGTLQLDDEYRLYSPLVKPDQNIQFWLEQFPQAWAETAGMGLAKQVPPQVIQLKASATPVSVRQYPLSKEAQEGIRPHVQRLIQQGILVPVQSPWNTPLLPVRKPGTNDYRPVQDLREVNKRVQDIHPTVPNPYNLLCALPPQRSWYTVLDLKDAFFCLRLHPTSQPLFAFEWRDPGTGRTGQLTWTRLPQGFKNSPTIFNEALHRDLANFRIQHPQVTLLQYVDDLLLAGATKQDCLEGTKALLLELSDLGYRASAKKAQICRREVTYLGYSLRDGQRWLTEARKKTVVQIPAPTTAKQVREFLGTAGFCRLWIPGFATLAAPLYPLTKPKGEFSWAPEHQKAFDAIKKALLSAPALALPDVTKPFTLYVDERKGVARGVLTQTLGPWRRPVAYLSKKLDPVASGWPVCLKAIAAVAILVKDADKLTLGQNITVIAPHALENIVRQPPDRWMTNARMTHYQSLLLTERVTFAPPAALNPATLLPEETDEPVTHDCHQLLIEETGVRKDLTDIPLTGEVLTWFTDGSSYVVEGKRMAGAAVVDGTRTIWASSLPEGTSAQKAELMALTQALRLAEGKSINIYTDSRYAFATAHVHGAIYKQRGWLTSAGREIKNKEEILSLLEALHLPKRLAIIHCPGHQKAKDPISRGNQMADRVAKQAAQGVNLLAGKRTADGSEFEKRTADGSEFESPKKKAKVE

SEQ ID NO: 177 - protein, 2082 aa, synthetic construct
MPAAKRVKLDGGDKKYSIGLDIGTNSVGWAVITDEYKVPSKKFKVLGNTDRHSIKKNLIGALLFDSGETAEATRLKRTARRRYTRRKNRICYLQEIFSNEMAKVDDSFFHRLEESFLVEEDKKHERHPIFGNIVDEVAYHEKYPTIYHLRKKLVDSTDKADLRLIYLALAHMIKFRGHFLIEGDLNPDNSDVDKLFIQLVQTYNQLFEENPINASGVDAKAILSARLSKSRRLENLIAQLPGEKKNGLFGNLIALSLGLTPNFKSNFDLAEDAKLQLSKDTYDDDLDNLLAQIGDQYADLFLAAKNLSDAILLSDILRVNTEITKAPLSASMIKRYDEHHQDLTLLKALVRQQLPEKYKEIFFDQSKNGYAGYIDGGASQEEFYKFIKPILEKMDGTEELLVKLNREDLLRKQRTFDNGSIPHQIHLGELHAILRRQEDFYPFLKDNREKIEKILTFRIPYYVGPLARGNSRFAWMTRKSEETITPWNFEEVVDKGASAQSFIERMTNFDKNLPNEKVLPKHSLLYEYFTVYNELTKVKYVTEGMRKPAFLSGEQKKAIVDLLFKTNRKVTVKQLKEDYFKKIECFDSVEISGVEDRFNASLGTYHDLLKIIKDKDFLDNEENEDILEDIVLTLTLFEDREMIEERLKTYAHLFDDKVMKQLKRRRYTGWGRLSRKLINGIRDKQSGKTILDFLKSDGFANRNFMQLIHDDSLTFKEDIQKAQVSGQGDSLHEHIANLAGSPAIKKGILQTVKVVDELVKVMGRHKPENIVIEMARENQTTQKGQKNSRERMKRIEEGIKELGSQILKEHPVENTQLQNEKLYLYYLQNGRDMYVDQELDINRLSDYDVDHIVPQSFLKDDSIDNKVLTRSDKARGKSDNVPSEEVVKKMKNYWRQLLNAKLITQRKFDNLTKAERGGLSELDKAGFIKRQLVETRQITKHVAQILDSRMNTKYDENDKLIREVKVITLKSKLVSDFRKDFQFYKVREINNYHHAHDAYLNAVVGTALIKKYPKLESEFVYGDYKVYDVRKMIAKSEQEIGKATAKYFFYSNIMNFFKTEITLANGEIRKRPLIETNGETGEIVWDKGRDFATVRKVLSMPQVNIVKKTEVQTGGFSKESILPKRNSDKLIARKKDWDPKKYGGFDSPTVAYSVLVVAKVEKGKSKKLKSVKELLGITIMERSSFEKNPIDFLEAKGYKEVKKDLIIKLPKYSLFELENGRKRMLASAGELQKGNELALPSKYVNFLYLASHYEKLKGSPEDNEQKQLFVEQHKHYLDEIIEQISEFSKRVILADANLDKVLSAYNKHRDKPIREQAENIIHLFTLTNLGAPAAFKYFDTTIDRKRYTSTKEVLDATLIHQSITGLYETRIDLSQLGGDGGPAPGGTLQLDDEYRLYSPLVKPDQNIQFWLEQFPQAWAETAGMGLAKQVPPQVIQLKASATPVSVRQYPLSKEAQEGIRPHVQRLIQQGILVPVQSPWNTPLLPVRKPGTNDYRPVQDLREVNKRVQDIHPTVPNPYNLLCALPPQRSWYTVLDLKDAFFCLRLHPTSQPLFAFEWRDPGTGRTGQLTWTRLPQGFKNSPTIFNEALHRDLANFRIQHPQVTLLQYVDDLLLAGATKQDCLEGTKALLLELSDLGYRASAKKAQICRREVTYLGYSLRDGQRWLTEARKKTVVQIPAPTTAKQVREFLGTAGFCRLWIPGFATLAAPLYPLTKPKGEFSWAPEHQKAFDAIKKALLSAPALALPDVTKPFTLYVDERKGVARGVLTQTLGPWRRPVAYLSKKLDPVASGWPVCLKAIAAVAILVKDADKLTLGQNITVIAPHALENIVRQPPDRWMTNARMTHYQSLLLTERVTFAPPAALNPATLLPEETDEPVTHDCHQLLIEETGVRKDLTDIPLTGEVLTWFTDGSSYVVEGKRMAGAAVVDGTRTIWASSLPEGTSAQKAELMALTQALRLAEGKSINIYTDSRYAFATAHVHGAIYKQRGWLTSAGREIKNKEEILSLLEALHLPKRLAIIHCPGHQKAKDPISRGNQMADRVAKQAAQGVNLLAGKRTADGSEFEKRTADGSEFESPKKKAKVE

SEQ ID NO: 178 - protein, 2085 aa, synthetic construct
MPAAKRVKLDGGDKKYSIGLDIGTNSVGWAVITDEYKVPSKKFKVLGNTDRHSIKKNLIGALLFDSGETAEATRLKRTARRRYTRRKNRICYLQEIFSNEMAKVDDSFFHRLEESFLVEEDKKHERHPIFGNIVDEVAYHEKYPTIYHLRKKLVDSTDKADLRLIYLALAHMIKFRGHFLIEGDLNPDNSDVDKLFIQLVQTYNQLFEENPINASGVDAKAILSARLSKSRRLENLIAQLPGEKKNGLFGNLIALSLGLTPNFKSNFDLAEDAKLQLSKDTYDDDLDNLLAQIGDQYADLFLAAKNLSDAILLSDILRVNTEITKAPLSASMIKRYDEHHQDLTLLKALVRQQLPEKYKEIFFDQSKNGYAGYIDGGASQEEFYKFIKPILEKMDGTEELLVKLNREDLLRKQRTFDNGSIPHQIHLGELHAILRRQEDFYPFLKDNREKIEKILTFRIPYYVGPLARGNSRFAWMTRKSEETITPWNFEEVVDKGASAQSFIERMTNFDKNLPNEKVLPKHSLLYEYFTVYNELTKVKYVTEGMRKPAFLSGEQKKAIVDLLFKTNRKVTVKQLKEDYFKKIECFDSVEISGVEDRFNASLGTYHDLLKIIKDKDFLDNEENEDILEDIVLTLTLFEDREMIEERLKTYAHLFDDKVMKQLKRRRYTGWGRLSRKLINGIRDKQSGKTILDFLKSDGFANRNFMQLIHDDSLTFKEDIQKAQVSGQGDSLHEHIANLAGSPAIKKGILQTVKVVDELVKVMGRHKPENIVIEMARENQTTQKGQKNSRERMKRIEEGIKELGSQILKEHPVENTQLQNEKLYLYYLQNGRDMYVDQELDINRLSDYDVDHIVPQSFLKDDSIDNKVLTRSDKARGKSDNVPSEEVVKKMKNYWRQLLNAKLITQRKFDNLTKAERGGLSELDKAGFIKRQLVETRQITKHVAQILDSRMNTKYDENDKLIREVKVITLKSKLVSDFRKDFQFYKVREINNYHHAHDAYLNAVVGTALIKKYPKLESEFVYGDYKVYDVRKMIAKSEQEIGKATAKYFFYSNIMNFFKTEITLANGEIRKRPLIETNGETGEIVWDKGRDFATVRKVLSMPQVNIVKKTEVQTGGFSKESILPKRNSDKLIARKKDWDPKKYGGFDSPTVAYSVLVVAKVEKGKSKKLKSVKELLGITIMERSSFEKNPIDFLEAKGYKEVKKDLIIKLPKYSLFELENGRKRMLASAGELQKGNELALPSKYVNFLYLASHYEKLKGSPEDNEQKQLFVEQHKHYLDEIIEQISEFSKRVILADANLDKVLSAYNKHRDKPIREQAENIIHLFTLTNLGAPAAFKYFDTTIDRKRYTSTKEVLDATLIHQSITGLYETRIDLSQLGGDGGGSSGSSGGTLQLDDEYRLYSPLVKPDQNIQFWLEQFPQAWAETAGMGLAKQVPPQVIQLKASATPVSVRQYPLSKEAQEGIRPHVQRLIQQGILVPVQSPWNTPLLPVRKPGTNDYRPVQDLREVNKRVQDIHPTVPNPYNLLCALPPQRSWYTVLDLKDAFFCLRLHPTSQPLFAFEWRDPGTGRTGQLTWTRLPQGFKNSPTIFNEALHRDLANFRIQHPQVTLLQYVDDLLLAGATKQDCLEGTKALLLELSDLGYRASAKKAQICRREVTYLGYSLRDGQRWLTEARKKTVVQIPAPTTAKQVREFLGTAGFCRLWIPGFATLAAPLYPLTKPKGEFSWAPEHQKAFDAIKKALLSAPALALPDVTKPFTLYVDERKGVARGVLTQTLGPWRRPVAYLSKKLDPVASGWPVCLKAIAAVAILVKDADKLTLGQNITVIAPHALENIVRQPPDRWMTNARMTHYQSLLLTERVTFAPPAALNPATLLPEETDEPVTHDCHQLLIEETGVRKDLTDIPLTGEVLTWFTDGSSYVVEGKRMAGAAVVDGTRTIWASSLPEGTSAQKAELMALTQALRLAEGKSINIYTDSRYAFATAHVHGAIYKQRGWLTSAGREIKNKEEILSLLEALHLPKRLAIIHCPGHQKAKDPISRGNQMADRVAKQAAQGVNLLAGKRTADGSEFEKRTADGSEFESPKKKAKVE

SEQ ID NO: 179 - protein, 2085 aa, synthetic construct
MPAAKRVKLDGGDKKYSIGLDIGTNSVGWAVITDEYKVPSKKFKVLGNTDRHSIKKNLIGALLFDSGETAEATRLKRTARRRYTRRKNRICYLQEIFSNEMAKVDDSFFHRLEESFLVEEDKKHERHPIFGNIVDEVAYHEKYPTIYHLRKKLVDSTDKADLRLIYLALAHMIKFRGHFLIEGDLNPDNSDVDKLFIQLVQTYNQLFEENPINASGVDAKAILSARLSKSRRLENLIAQLPGEKKNGLFGNLIALSLGLTPNFKSNFDLAEDAKLQLSKDTYDDDLDNLLAQIGDQYADLFLAAKNLSDAILLSDILRVNTEITKAPLSASMIKRYDEHHQDLTLLKALVRQQLPEKYKEIFFDQSKNGYAGYIDGGASQEEFYKFIKPILEKMDGTEELLVKLNREDLLRKQRTFDNGSIPHQIHLGELHAILRRQEDFYPFLKDNREKIEKILTFRIPYYVGPLARGNSRFAWMTRKSEETITPWNFEEVVDKGASAQSFIERMTNFDKNLPNEKVLPKHSLLYEYFTVYNELTKVKYVTEGMRKPAFLSGEQKKAIVDLLFKTNRKVTVKQLKEDYFKKIECFDSVEISGVEDRFNASLGTYHDLLKIIKDKDFLDNEENEDILEDIVLTLTLFEDREMIEERLKTYAHLFDDKVMKQLKRRRYTGWGRLSRKLINGIRDKQSGKTILDFLKSDGFANRNFMQLIHDDSLTFKEDIQKAQVSGQGDSLHEHIANLAGSPAIKKGILQTVKVVDELVKVMGRHKPENIVIEMARENQTTQKGQKNSRERMKRIEEGIKELGSQILKEHPVENTQLQNEKLYLYYLQNGRDMYVDQELDINRLSDYDVDHIVPQSFLKDDSIDNKVLTRSDKARGKSDNVPSEEVVKKMKNYWRQLLNAKLITQRKFDNLTKAERGGLSELDKAGFIKRQLVETRQITKHVAQILDSRMNTKYDENDKLIREVKVITLKSKLVSDFRKDFQFYKVREINNYHHAHDAYLNAVVGTALIKKYPKLESEFVYGDYKVYDVRKMIAKSEQEIGKATAKYFFYSNIMNFFKTEITLANGEIRKRPLIETNGETGEIVWDKGRDFATVRKVLSMPQVNIVKKTEVQTGGFSKESILPKRNSDKLIARKKDWDPKKYGGFDSPTVAYSVLVVAKVEKGKSKKLKSVKELLGITIMERSSFEKNPIDFLEAKGYKEVKKDLIIKLPKYSLFELENGRKRMLASAGELQKGNELALPSKYVNFLYLASHYEKLKGSPEDNEQKQLFVEQHKHYLDEIIEQISEFSKRVILADANLDKVLSAYNKHRDKPIREQAENIIHLFTLTNLGAPAAFKYFDTTIDRKRYTSTKEVLDATLIHQSITGLYETRIDLSQLGGDGGGGGGGSGGTLQLDDEYRLYSPLVKPDQNIQFWLEQFPQAWAETAGMGLAKQVPPQVIQLKASATPVSVRQYPLSKEAQEGIRPHVQRLIQQGILVPVQSPWNTPLLPVRKPGTNDYRPVQDLREVNKRVQDIHPTVPNPYNLLCALPPQRSWYTVLDLKDAFFCLRLHPTSQPLFAFEWRDPGTGRTGQLTWTRLPQGFKNSPTIFNEALHRDLANFRIQHPQVTLLQYVDDLLLAGATKQDCLEGTKALLLELSDLGYRASAKKAQICRREVTYLGYSLRDGQRWLTEARKKTVVQIPAPTTAKQVREFLGTAGFCRLWIPGFATLAAPLYPLTKPKGEFSWAPEHQKAFDAIKKALLSAPALALPDVTKPFTLYVDERKGVARGVLTQTLGPWRRPVAYLSKKLDPVASGWPVCLKAIAAVAILVKDADKLTLGQNITVIAPHALENIVRQPPDRWMTNARMTHYQSLLLTERVTFAPPAALNPATLLPEETDEPVTHDCHQLLIEETGVRKDLTDIPLTGEVLTWFTDGSSYVVEGKRMAGAAVVDGTRTIWASSLPEGTSAQKAELMALTQALRLAEGKSINIYTDSRYAFATAHVHGAIYKQRGWLTSAGREIKNKEEILSLLEALHLPKRLAIIHCPGHQKAKDPISRGNQMADRVAKQAAQGVNLLAGKRTADGSEFEKRTADGSEFESPKKKAKVE

SEQ ID NO: 180 - protein, 2088 aa, synthetic construct
MPAAKRVKLDGGDKKYSIGLDIGTNSVGWAVITDEYKVPSKKFKVLGNTDRHSIKKNLIGALLFDSGETAEATRLKRTARRRYTRRKNRICYLQEIFSNEMAKVDDSFFHRLEESFLVEEDKKHERHPIFGNIVDEVAYHEKYPTIYHLRKKLVDSTDKADLRLIYLALAHMIKFRGHFLIEGDLNPDNSDVDKLFIQLVQTYNQLFEENPINASGVDAKAILSARLSKSRRLENLIAQLPGEKKNGLFGNLIALSLGLTPNFKSNFDLAEDAKLQLSKDTYDDDLDNLLAQIGDQYADLFLAAKNLSDAILLSDILRVNTEITKAPLSASMIKRYDEHHQDLTLLKALVRQQLPEKYKEIFFDQSKNGYAGYIDGGASQEEFYKFIKPILEKMDGTEELLVKLNREDLLRKQRTFDNGSIPHQIHLGELHAILRRQEDFYPFLKDNREKIEKILTFRIPYYVGPLARGNSRFAWMTRKSEETITPWNFEEVVDKGASAQSFIERMTNFDKNLPNEKVLPKHSLLYEYFTVYNELTKVKYVTEGMRKPAFLSGEQKKAIVDLLFKTNRKVTVKQLKEDYFKKIECFDSVEISGVEDRFNASLGTYHDLLKIIKDKDFLDNEENEDILEDIVLTLTLFEDREMIEERLKTYAHLFDDKVMKQLKRRRYTGWGRLSRKLINGIRDKQSGKTILDFLKSDGFANRNFMQLIHDDSLTFKEDIQKAQVSGQGDSLHEHIANLAGSPAIKKGILQTVKVVDELVKVMGRHKPENIVIEMARENQTTQKGQKNSRERMKRIEEGIKELGSQILKEHPVENTQLQNEKLYLYYLQNGRDMYVDQELDINRLSDYDVDHIVPQSFLKDDSIDNKVLTRSDKARGKSDNVPSEEVVKKMKNYWRQLLNAKLITQRKFDNLTKAERGGLSELDKAGFIKRQLVETRQITKHVAQILDSRMNTKYDENDKLIREVKVITLKSKLVSDFRKDFQFYKVREINNYHHAHDAYLNAVVGTALIKKYPKLESEFVYGDYKVYDVRKMIAKSEQEIGKATAKYFFYSNIMNFFKTEITLANGEIRKRPLIETNGETGEIVWDKGRDFATVRKVLSMPQVNIVKKTEVQTGGFSKESILPKRNSDKLIARKKDWDPKKYGGFDSPTVAYSVLVVAKVEKGKSKKLKSVKELLGITIMERSSFEKNPIDFLEAKGYKEVKKDLIIKLPKYSLFELENGRKRMLASAGELQKGNELALPSKYVNFLYLASHYEKLKGSPEDNEQKQLFVEQHKHYLDEIIEQISEFSKRVILADANLDKVLSAYNKHRDKPIREQAENIIHLFTLTNLGAPAAFKYFDTTIDRKRYTSTKEVLDATLIHQSITGLYETRIDLSQLGGDGGGGGGSSGGSGGTLQLDDEYRLYSPLVKPDQNIQFWLEQFPQAWAETAGMGLAKQVPPQVIQLKASATPVSVRQYPLSKEAQEGIRPHVQRLIQQGILVPVQSPWNTPLLPVRKPGTNDYRPVQDLREVNKRVQDIHPTVPNPYNLLCALPPQRSWYTVLDLKDAFFCLRLHPTSQPLFAFEWRDPGTGRTGQLTWTRLPQGFKNSPTIFNEALHRDLANFRIQHPQVTLLQYVDDLLLAGATKQDCLEGTKALLLELSDLGYRASAKKAQICRREVTYLGYSLRDGQRWLTEARKKTVVQIPAPTTAKQVREFLGTAGFCRLWIPGFATLAAPLYPLTKPKGEFSWAPEHQKAFDAIKKALLSAPALALPDVTKPFTLYVDERKGVARGVLTQTLGPWRRPVAYLSKKLDPVASGWPVCLKAIAAVAILVKDADKLTLGQNITVIAPHALENIVRQPPDRWMTNARMTHYQSLLLTERVTFAPPAALNPATLLPEETDEPVTHDCHQLLIEETGVRKDLTDIPLTGEVLTWFTDGSSYVVEGKRMAGAAVVDGTRTIWASSLPEGTSAQKAELMALTQALRLAEGKSINIYTDSRYAFATAHVHGAIYKQRGWLTSAGREIKNKEEILSLLEALHLPKRLAIIHCPGHQKAKDPISRGNQMADRVAKQAAQGVNLLAGKRTADGSEFEKRTADGSEFESPKKKAKVE

SEQ ID NO: 181 - protein, 2088 aa, synthetic construct
MPAAKRVKLDGGDKKYSIGLDIGTNSVGWAVITDEYKVPSKKFKVLGNTDRHSIKKNLIGALLFDSGETAEATRLKRTARRRYTRRKNRICYLQEIFSNEMAKVDDSFFHRLEESFLVEEDKKHERHPIFGNIVDEVAYHEKYPTIYHLRKKLVDSTDKADLRLIYLALAHMIKFRGHFLIEGDLNPDNSDVDKLFIQLVQTYNQLFEENPINASGVDAKAILSARLSKSRRLENLIAQLPGEKKNGLFGNLIALSLGLTPNFKSNFDLAEDAKLQLSKDTYDDDLDNLLAQIGDQYADLFLAAKNLSDAILLSDILRVNTEITKAPLSASMIKRYDEHHQDLTLLKALVRQQLPEKYKEIFFDQSKNGYAGYIDGGASQEEFYKFIKPILEKMDGTEELLVKLNREDLLRKQRTFDNGSIPHQIHLGELHAILRRQEDFYPFLKDNREKIEKILTFRIPYYVGPLARGNSRFAWMTRKSEETITPWNFEEVVDKGASAQSFIERMTNFDKNLPNEKVLPKHSLLYEYFTVYNELTKVKYVTEGMRKPAFLSGEQKKAIVDLLFKTNRKVTVKQLKEDYFKKIECFDSVEISGVEDRFNASLGTYHDLLKIIKDKDFLDNEENEDILEDIVLTLTLFEDREMIEERLKTYAHLFDDKVMKQLKRRRYTGWGRLSRKLINGIRDKQSGKTILDFLKSDGFANRNFMQLIHDDSLTFKEDIQKAQVSGQGDSLHEHIANLAGSPAIKKGILQTVKVVDELVKVMGRHKPENIVIEMARENQTTQKGQKNSRERMKRIEEGIKELGSQILKEHPVENTQLQNEKLYLYYLQNGRDMYVDQELDINRLSDYDVDHIVPQSFLKDDSIDNKVLTRSDKARGKSDNVPSEEVVKKMKNYWRQLLNAKLITQRKFDNLTKAERGGLSELDKAGFIKRQLVETRQITKHVAQILDSRMNTKYDENDKLIREVKVITLKSKLVSDFRKDFQFYKVREINNYHHAHDAYLNAVVGTALIKKYPKLESEFVYGDYKVYDVRKMIAKSEQEIGKATAKYFFYSNIMNFFKTEITLANGEIRKRPLIETNGETGEIVWDKGRDFATVRKVLSMPQVNIVKKTEVQTGGFSKESILPKRNSDKLIARKKDWDPKKYGGFDSPTVAYSVLVVAKVEKGKSKKLKSVKELLGITIMERSSFEKNPIDFLEAKGYKEVKKDLIIKLPKYSLFELENGRKRMLASAGELQKGNELALPSKYVNFLYLASHYEKLKGSPEDNEQKQLFVEQHKHYLDEIIEQISEFSKRVILADANLDKVLSAYNKHRDKPIREQAENIIHLFTLTNLGAPAAFKYFDTTIDRKRYTSTKEVLDATLIHQSITGLYETRIDLSQLGGDGGGSSGSSGSSGGTLQLDDEYRLYSPLVKPDQNIQFWLEQFPQAWAETAGMGLAKQVPPQVIQLKASATPVSVRQYPLSKEAQEGIRPHVQRLIQQGILVPVQSPWNTPLLPVRKPGTNDYRPVQDLREVNKRVQDIHPTVPNPYNLLCALPPQRSWYTVLDLKDAFFCLRLHPTSQPLFAFEWRDPGTGRTGQLTWTRLPQGFKNSPTIFNEALHRDLANFRIQHPQVTLLQYVDDLLLAGATKQDCLEGTKALLLELSDLGYRASAKKAQICRREVTYLGYSLRDGQRWLTEARKKTVVQIPAPTTAKQVREFLGTAGFCRLWIPGFATLAAPLYPLTKPKGEFSWAPEHQKAFDAIKKALLSAPALALPDVTKPFTLYVDERKGVARGVLTQTLGPWRRPVAYLSKKLDPVASGWPVCLKAIAAVAILVKDADKLTLGQNITVIAPHALENIVRQPPDRWMTNARMTHYQSLLLTERVTFAPPAALNPATLLPEETDEPVTHDCHQLLIEETGVRKDLTDIPLTGEVLTWFTDGSSYVVEGKRMAGAAVVDGTRTIWASSLPEGTSAQKAELMALTQALRLAEGKSINIYTDSRYAFATAHVHGAIYKQRGWLTSAGREIKNKEEILSLLEALHLPKRLAIIHCPGHQKAKDPISRGNQMADRVAKQAAQGVNLLAGKRTADGSEFEKRTADGSEFESPKKKAKVE

SEQ ID NO: 182 - protein, 2088 aa, synthetic construct
MPAAKRVKLDGGDKKYSIGLDIGTNSVGWAVITDEYKVPSKKFKVLGNTDRHSIKKNLIGALLFDSGETAEATRLKRTARRRYTRRKNRICYLQEIFSNEMAKVDDSFFHRLEESFLVEEDKKHERHPIFGNIVDEVAYHEKYPTIYHLRKKLVDSTDKADLRLIYLALAHMIKFRGHFLIEGDLNPDNSDVDKLFIQLVQTYNQLFEENPINASGVDAKAILSARLSKSRRLENLIAQLPGEKKNGLFGNLIALSLGLTPNFKSNFDLAEDAKLQLSKDTYDDDLDNLLAQIGDQYADLFLAAKNLSDAILLSDILRVNTEITKAPLSASMIKRYDEHHQDLTLLKALVRQQLPEKYKEIFFDQSKNGYAGYIDGGASQEEFYKFIKPILEKMDGTEELLVKLNREDLLRKQRTFDNGSIPHQIHLGELHAILRRQEDFYPFLKDNREKIEKILTFRIPYYVGPLARGNSRFAWMTRKSEETITPWNFEEVVDKGASAQSFIERMTNFDKNLPNEKVLPKHSLLYEYFTVYNELTKVKYVTEGMRKPAFLSGEQKKAIVDLLFKTNRKVTVKQLKEDYFKKIECFDSVEISGVEDRFNASLGTYHDLLKIIKDKDFLDNEENEDILEDIVLTLTLFEDREMIEERLKTYAHLFDDKVMKQLKRRRYTGWGRLSRKLINGIRDKQSGKTILDFLKSDGFANRNFMQLIHDDSLTFKEDIQKAQVSGQGDSLHEHIANLAGSPAIKKGILQTVKVVDELVKVMGRHKPENIVIEMARENQTTQKGQKNSRERMKRIEEGIKELGSQILKEHPVENTQLQNEKLYLYYLQNGRDMYVDQELDINRLSDYDVDHIVPQSFLKDDSIDNKVLTRSDKARGKSDNVPSEEVVKKMKNYWRQLLNAKLITQRKFDNLTKAERGGLSELDKAGFIKRQLVETRQITKHVAQILDSRMNTKYDENDKLIREVKVITLKSKLVSDFRKDFQFYKVREINNYHHAHDAYLNAVVGTALIKKYPKLESEFVYGDYKVYDVRKMIAKSEQEIGKATAKYFFYSNIMNFFKTEITLANGEIRKRPLIETNGETGEIVWDKGRDFATVRKVLSMPQVNIVKKTEVQTGGFSKESILPKRNSDKLIARKKDWDPKKYGGFDSPTVAYSVLVVAKVEKGKSKKLKSVKELLGITIMERSSFEKNPIDFLEAKGYKEVKKDLIIKLPKYSLFELENGRKRMLASAGELQKGNELALPSKYVNFLYLASHYEKLKGSPEDNEQKQLFVEQHKHYLDEIIEQISEFSKRVILADANLDKVLSAYNKHRDKPIREQAENIIHLFTLTNLGAPAAFKYFDTTIDRKRYTSTKEVLDATLIHQSITGLYETRIDLSQLGGDGGGSSGGSGGGGGTLQLDDEYRLYSPLVKPDQNIQFWLEQFPQAWAETAGMGLAKQVPPQVIQLKASATPVSVRQYPLSKEAQEGIRPHVQRLIQQGILVPVQSPWNTPLLPVRKPGTNDYRPVQDLREVNKRVQDIHPTVPNPYNLLCALPPQRSWYTVLDLKDAFFCLRLHPTSQPLFAFEWRDPGTGRTGQLTWTRLPQGFKNSPTIFNEALHRDLANFRIQHPQVTLLQYVDDLLLAGATKQDCLEGTKALLLELSDLGYRASAKKAQICRREVTYLGYSLRDGQRWLTEARKKTVVQIPAPTTAKQVREFLGTAGFCRLWIPGFATLAAPLYPLTKPKGEFSWAPEHQKAFDAIKKALLSAPALALPDVTKPFTLYVDERKGVARGVLTQTLGPWRRPVAYLSKKLDPVASGWPVCLKAIAAVAILVKDADKLTLGQNITVIAPHALENIVRQPPDRWMTNARMTHYQSLLLTERVTFAPPAALNPATLLPEETDEPVTHDCHQLLIEETGVRKDLTDIPLTGEVLTWFTDGSSYVVEGKRMAGAAVVDGTRTIWASSLPEGTSAQKAELMALTQALRLAEGKSINIYTDSRYAFATAHVHGAIYKQRGWLTSAGREIKNKEEILSLLEALHLPKRLAIIHCPGHQKAKDPISRGNQMADRVAKQAAQGVNLLAGKRTADGSEFEKRTADGSEFESPKKKAKVE

SEQ ID NO: 183 - protein, 2085 aa, synthetic construct
MPAAKRVKLDGGDKKYSIGLDIGTNSVGWAVITDEYKVPSKKFKVLGNTDRHSIKKNLIGALLFDSGETAEATRLKRTARRRYTRRKNRICYLQEIFSNEMAKVDDSFFHRLEESFLVEEDKKHERHPIFGNIVDEVAYHEKYPTIYHLRKKLVDSTDKADLRLIYLALAHMIKFRGHFLIEGDLNPDNSDVDKLFIQLVQTYNQLFEENPINASGVDAKAILSARLSKSRRLENLIAQLPGEKKNGLFGNLIALSLGLTPNFKSNFDLAEDAKLQLSKDTYDDDLDNLLAQIGDQYADLFLAAKNLSDAILLSDILRVNTEITKAPLSASMIKRYDEHHQDLTLLKALVRQQLPEKYKEIFFDQSKNGYAGYIDGGASQEEFYKFIKPILEKMDGTEELLVKLNREDLLRKQRTFDNGSIPHQIHLGELHAILRRQEDFYPFLKDNREKIEKILTFRIPYYVGPLARGNSRFAWMTRKSEETITPWNFEEVVDKGASAQSFIERMTNFDKNLPNEKVLPKHSLLYEYFTVYNELTKVKYVTEGMRKPAFLSGEQKKAIVDLLFKTNRKVTVKQLKEDYFKKIECFDSVEISGVEDRFNASLGTYHDLLKIIKDKDFLDNEENEDILEDIVLTLTLFEDREMIEERLKTYAHLFDDKVMKQLKRRRYTGWGRLSRKLINGIRDKQSGKTILDFLKSDGFANRNFMQLIHDDSLTFKEDIQKAQVSGQGDSLHEHIANLAGSPAIKKGILQTVKVVDELVKVMGRHKPENIVIEMARENQTTQKGQKNSRERMKRIEEGIKELGSQILKEHPVENTQLQNEKLYLYYLQNGRDMYVDQELDINRLSDYDVDHIVPQSFLKDDSIDNKVLTRSDKARGKSDNVPSEEVVKKMKNYWRQLLNAKLITQRKFDNLTKAERGGLSELDKAGFIKRQLVETRQITKHVAQILDSRMNTKYDENDKLIREVKVITLKSKLVSDFRKDFQFYKVREINNYHHAHDAYLNAVVGTALIKKYPKLESEFVYGDYKVYDVRKMIAKSEQEIGKATAKYFFYSNIMNFFKTEITLANGEIRKRPLIETNGETGEIVWDKGRDFATVRKVLSMPQVNIVKKTEVQTGGFSKESILPKRNSDKLIARKKDWDPKKYGGFDSPTVAYSVLVVAKVEKGKSKKLKSVKELLGITIMERSSFEKNPIDFLEAKGYKEVKKDLIIKLPKYSLFELENGRKRMLASAGELQKGNELALPSKYVNFLYLASHYEKLKGSPEDNEQKQLFVEQHKHYLDEIIEQISEFSKRVILADANLDKVLSAYNKHRDKPIREQAENIIHLFTLTNLGAPAAFKYFDTTIDRKRYTSTKEVLDATLIHQSITGLYETRIDLSQLGGDGGGGGGGGGGTLQLDDEYRLYSPLVKPDQNIQFWLEQFPQAWAETAGMGLAKQVPPQVIQLKASATPVSVRQYPLSKEAQEGIRPHVQRLIQQGILVPVQSPWNTPLLPVRKPGTNDYRPVQDLREVNKRVQDIHPTVPNPYNLLCALPPQRSWYTVLDLKDAFFCLRLHPTSQPLFAFEWRDPGTGRTGQLTWTRLPQGFKNSPTIFNEALHRDLANFRIQHPQVTLLQYVDDLLLAGATKQDCLEGTKALLLELSDLGYRASAKKAQICRREVTYLGYSLRDGQRWLTEARKKTVVQIPAPTTAKQVREFLGTAGFCRLWIPGFATLAAPLYPLTKPKGEFSWAPEHQKAFDAIKKALLSAPALALPDVTKPFTLYVDERKGVARGVLTQTLGPWRRPVAYLSKKLDPVASGWPVCLKAIAAVAILVKDADKLTLGQNITVIAPHALENIVRQPPDRWMTNARMTHYQSLLLTERVTFAPPAALNPATLLPEETDEPVTHDCHQLLIEETGVRKDLTDIPLTGEVLTWFTDGSSYVVEGKRMAGAAVVDGTRTIWASSLPEGTSAQKAELMALTQALRLAEGKSINIYTDSRYAFATAHVHGAIYKQRGWLTSAGREIKNKEEILSLLEALHLPKRLAIIHCPGHQKAKDPISRGNQMADRVAKQAAQGVNLLAGKRTADGSEFEKRTADGSEFESPKKKAKVE

SEQ ID NO: 184 - protein, 2085 aa, synthetic construct
MPAAKRVKLDGGDKKYSIGLDIGTNSVGWAVITDEYKVPSKKFKVLGNTDRHSIKKNLIGALLFDSGETAEATRLKRTARRRYTRRKNRICYLQEIFSNEMAKVDDSFFHRLEESFLVEEDKKHERHPIFGNIVDEVAYHEKYPTIYHLRKKLVDSTDKADLRLIYLALAHMIKFRGHFLIEGDLNPDNSDVDKLFIQLVQTYNQLFEENPINASGVDAKAILSARLSKSRRLENLIAQLPGEKKNGLFGNLIALSLGLTPNFKSNFDLAEDAKLQLSKDTYDDDLDNLLAQIGDQYADLFLAAKNLSDAILLSDILRVNTEITKAPLSASMIKRYDEHHQDLTLLKALVRQQLPEKYKEIFFDQSKNGYAGYIDGGASQEEFYKFIKPILEKMDGTEELLVKLNREDLLRKQRTFDNGSIPHQIHLGELHAILRRQEDFYPFLKDNREKIEKILTFRIPYYVGPLARGNSRFAWMTRKSEETITPWNFEEVVDKGASAQSFIERMTNFDKNLPNEKVLPKHSLLYEYFTVYNELTKVKYVTEGMRKPAFLSGEQKKAIVDLLFKTNRKVTVKQLKEDYFKKIECFDSVEISGVEDRFNASLGTYHDLLKIIKDKDFLDNEENEDILEDIVLTLTLFEDREMIEERLKTYAHLFDDKVMKQLKRRRYTGWGRLSRKLINGIRDKQSGKTILDFLKSDGFANRNFMQLIHDDSLTFKEDIQKAQVSGQGDSLHEHIANLAGSPAIKKGILQTVKVVDELVKVMGRHKPENIVIEMARENQTTQKGQKNSRERMKRIEEGIKELGSQILKEHPVENTQLQNEKLYLYYLQNGRDMYVDQELDINRLSDYDVDHIVPQSFLKDDSIDNKVLTRSDKARGKSDNVPSEEVVKKMKNYWRQLLNAKLITQRKFDNLTKAERGGLSELDKAGFIKRQLVETRQITKHVAQILDSRMNTKYDENDKLIREVKVITLKSKLVSDFRKDFQFYKVREINNYHHAHDAYLNAVVGTALIKKYPKLESEFVYGDYKVYDVRKMIAKSEQEIGKATAKYFFYSNIMNFFKTEITLANGEIRKRPLIETNGETGEIVWDKGRDFATVRKVLSMPQVNIVKKTEVQTGGFSKESILPKRNSDKLIARKKDWDPKKYGGFDSPTVAYSVLVVAKVEKGKSKKLKSVKELLGITIMERSSFEKNPIDFLEAKGYKEVKKDLIIKLPKYSLFELENGRKRMLASAGELQKGNELALPSKYVNFLYLASHYEKLKGSPEDNEQKQLFVEQHKHYLDEIIEQISEFSKRVILADANLDKVLSAYNKHRDKPIREQAENIIHLFTLTNLGAPAAFKYFDTTIDRKRYTSTKEVLDATLIHQSITGLYETRIDLSQLGGDGGGGSGGGGGTLQLDDEYRLYSPLVKPDQNIQFWLEQFPQAWAETAGMGLAKQVPPQVIQLKASATPVSVRQYPLSKEAQEGIRPHVQRLIQQGILVPVQSPWNTPLLPVRKPGTNDYRPVQDLREVNKRVQDIHPTVPNPYNLLCALPPQRSWYTVLDLKDAFFCLRLHPTSQPLFAFEWRDPGTGRTGQLTWTRLPQGFKNSPTIFNEALHRDLANFRIQHPQVTLLQYVDDLLLAGATKQDCLEGTKALLLELSDLGYRASAKKAQICRREVTYLGYSLRDGQRWLTEARKKTVVQIPAPTTAKQVREFLGTAGFCRLWIPGFATLAAPLYPLTKPKGEFSWAPEHQKAFDAIKKALLSAPALALPDVTKPFTLYVDERKGVARGVLTQTLGPWRRPVAYLSKKLDPVASGWPVCLKAIAAVAILVKDADKLTLGQNITVIAPHALENIVRQPPDRWMTNARMTHYQSLLLTERVTFAPPAALNPATLLPEETDEPVTHDCHQLLIEETGVRKDLTDIPLTGEVLTWFTDGSSYVVEGKRMAGAAVVDGTRTIWASSLPEGTSAQKAELMALTQALRLAEGKSINIYTDSRYAFATAHVHGAIYKQRGWLTSAGREIKNKEEILSLLEALHLPKRLAIIHCPGHQKAKDPISRGNQMADRVAKQAAQGVNLLAGKRTADGSEFEKRTADGSEFESPKKKAKVE

SEQ ID NO: 185 - protein, 2087 aa, synthetic construct
MPAAKRVKLDGGDKKYSIGLDIGTNSVGWAVITDEYKVPSKKFKVLGNTDRHSIKKNLIGALLFDSGETAEATRLKRTARRRYTRRKNRICYLQEIFSNEMAKVDDSFFHRLEESFLVEEDKKHERHPIFGNIVDEVAYHEKYPTIYHLRKKLVDSTDKADLRLIYLALAHMIKFRGHFLIEGDLNPDNSDVDKLFIQLVQTYNQLFEENPINASGVDAKAILSARLSKSRRLENLIAQLPGEKKNGLFGNLIALSLGLTPNFKSNFDLAEDAKLQLSKDTYDDDLDNLLAQIGDQYADLFLAAKNLSDAILLSDILRVNTEITKAPLSASMIKRYDEHHQDLTLLKALVRQQLPEKYKEIFFDQSKNGYAGYIDGGASQEEFYKFIKPILEKMDGTEELLVKLNREDLLRKQRTFDNGSIPHQIHLGELHAILRRQEDFYPFLKDNREKIEKILTFRIPYYVGPLARGNSRFAWMTRKSEETITPWNFEEVVDKGASAQSFIERMTNFDKNLPNEKVLPKHSLLYEYFTVYNELTKVKYVTEGMRKPAFLSGEQKKAIVDLLFKTNRKVTVKQLKEDYFKKIECFDSVEISGVEDRFNASLGTYHDLLKIIKDKDFLDNEENEDILEDIVLTLTLFEDREMIEERLKTYAHLFDDKVMKQLKRRRYTGWGRLSRKLINGIRDKQSGKTILDFLKSDGFANRNFMQLIHDDSLTFKEDIQKAQVSGQGDSLHEHIANLAGSPAIKKGILQTVKVVDELVKVMGRHKPENIVIEMARENQTTQKGQKNSRERMKRIEEGIKELGSQILKEHPVENTQLQNEKLYLYYLQNGRDMYVDQELDINRLSDYDVDHIVPQSFLKDDSIDNKVLTRSDKARGKSDNVPSEEVVKKMKNYWRQLLNAKLITQRKFDNLTKAERGGLSELDKAGFIKRQLVETRQITKHVAQILDSRMNTKYDENDKLIREVKVITLKSKLVSDFRKDFQFYKVREINNYHHAHDAYLNAVVGTALIKKYPKLESEFVYGDYKVYDVRKMIAKSEQEIGKATAKYFFYSNIMNFFKTEITLANGEIRKRPLIETNGETGEIVWDKGRDFATVRKVLSMPQVNIVKKTEVQTGGFSKESILPKRNSDKLIARKKDWDPKKYGGFDSPTVAYSVLVVAKVEKGKSKKLKSVKELLGITIMERSSFEKNPIDFLEAKGYKEVKKDLIIKLPKYSLFELENGRKRMLASAGELQKGNELALPSKYVNFLYLASHYEKLKGSPEDNEQKQLFVEQHKHYLDEIIEQISEFSKRVILADANLDKVLSAYNKHRDKPIREQAENIIHLFTLTNLGAPAAFKYFDTTIDRKRYTSTKEVLDATLIHQSITGLYETRIDLSQLGGDGGGGGEAAAKGGTLQLDDEYRLYSPLVKPDQNIQFWLEQFPQAWAETAGMGLAKQVPPQVIQLKASATPVSVRQYPLSKEAQEGIRPHVQRLIQQGILVPVQSPWNTPLLPVRKPGTNDYRPVQDLREVNKRVQDIHPTVPNPYNLLCALPPQRSWYTVLDLKDAFFCLRLHPTSQPLFAFEWRDPGTGRTGQLTWTRLPQGFKNSPTIFNEALHRDLANFRIQHPQVTLLQYVDDLLLAGATKQDCLEGTKALLLELSDLGYRASAKKAQICRREVTYLGYSLRDGQRWLTEARKKTVVQIPAPTTAKQVREFLGTAGFCRLWIPGFATLAAPLYPLTKPKGEFSWAPEHQKAFDAIKKALLSAPALALPDVTKPFTLYVDERKGVARGVLTQTLGPWRRPVAYLSKKLDPVASGWPVCLKAIAAVAILVKDADKLTLGQNITVIAPHALENIVRQPPDRWMTNARMTHYQSLLLTERVTFAPPAALNPATLLPEETDEPVTHDCHQLLIEETGVRKDLTDIPLTGEVLTWFTDGSSYVVEGKRMAGAAVVDGTRTIWASSLPEGTSAQKAELMALTQALRLAEGKSINIYTDSRYAFATAHVHGAIYKQRGWLTSAGREIKNKEEILSLLEALHLPKRLAIIHCPGHQKAKDPISRGNQMADRVAKQAAQGVNLLAGKRTADGSEFEKRTADGSEFESPKKKAKVE

SEQ ID NO: 186 - protein, 2085 aa, synthetic construct
MPAAKRVKLDGGDKKYSIGLDIGTNSVGWAVITDEYKVPSKKFKVLGNTDRHSIKKNLIGALLFDSGETAEATRLKRTARRRYTRRKNRICYLQEIFSNEMAKVDDSFFHRLEESFLVEEDKKHERHPIFGNIVDEVAYHEKYPTIYHLRKKLVDSTDKADLRLIYLALAHMIKFRGHFLIEGDLNPDNSDVDKLFIQLVQTYNQLFEENPINASGVDAKAILSARLSKSRRLENLIAQLPGEKKNGLFGNLIALSLGLTPNFKSNFDLAEDAKLQLSKDTYDDDLDNLLAQIGDQYADLFLAAKNLSDAILLSDILRVNTEITKAPLSASMIKRYDEHHQDLTLLKALVRQQLPEKYKEIFFDQSKNGYAGYIDGGASQEEFYKFIKPILEKMDGTEELLVKLNREDLLRKQRTFDNGSIPHQIHLGELHAILRRQEDFYPFLKDNREKIEKILTFRIPYYVGPLARGNSRFAWMTRKSEETITPWNFEEVVDKGASAQSFIERMTNFDKNLPNEKVLPKHSLLYEYFTVYNELTKVKYVTEGMRKPAFLSGEQKKAIVDLLFKTNRKVTVKQLKEDYFKKIECFDSVEISGVEDRFNASLGTYHDLLKIIKDKDFLDNEENEDILEDIVLTLTLFEDREMIEERLKTYAHLFDDKVMKQLKRRRYTGWGRLSRKLINGIRDKQSGKTILDFLKSDGFANRNFMQLIHDDSLTFKEDIQKAQVSGQGDSLHEHIANLAGSPAIKKGILQTVKVVDELVKVMGRHKPENIVIEMARENQTTQKGQKNSRERMKRIEEGIKELGSQILKEHPVENTQLQNEKLYLYYLQNGRDMYVDQELDINRLSDYDVDHIVPQSFLKDDSIDNKVLTRSDKARGKSDNVPSEEVVKKMKNYWRQLLNAKLITQRKFDNLTKAERGGLSELDKAGFIKRQLVETRQITKHVAQILDSRMNTKYDENDKLIREVKVITLKSKLVSDFRKDFQFYKVREINNYHHAHDAYLNAVVGTALIKKYPKLESEFVYGDYKVYDVRKMIAKSEQEIGKATAKYFFYSNIMNFFKTEITLANGEIRKRPLIETNGETGEIVWDKGRDFATVRKVLSMPQVNIVKKTEVQTGGFSKESILPKRNSDKLIARKKDWDPKKYGGFDSPTVAYSVLVVAKVEKGKSKKLKSVKELLGITIMERSSFEKNPIDFLEAKGYKEVKKDLIIKLPKYSLFELENGRKRMLASAGELQKGNELALPSKYVNFLYLASHYEKLKGSPEDNEQKQLFVEQHKHYLDEIIEQISEFSKRVILADANLDKVLSAYNKHRDKPIREQAENIIHLFTLTNLGAPAAFKYFDTTIDRKRYTSTKEVLDATLIHQSITGLYETRIDLSQLGGDGGGGSGGSGGTLQLDDEYRLYSPLVKPDQNIQFWLEQFPQAWAETAGMGLAKQVPPQVIQLKASATPVSVRQYPLSKEAQEGIRPHVQRLIQQGILVPVQSPWNTPLLPVRKPGTNDYRPVQDLREVNKRVQDIHPTVPNPYNLLCALPPQRSWYTVLDLKDAFFCLRLHPTSQPLFAFEWRDPGTGRTGQLTWTRLPQGFKNSPTIFNEALHRDLANFRIQHPQVTLLQYVDDLLLAGATKQDCLEGTKALLLELSDLGYRASAKKAQICRREVTYLGYSLRDGQRWLTEARKKTVVQIPAPTTAKQVREFLGTAGFCRLWIPGFATLAAPLYPLTKPKGEFSWAPEHQKAFDAIKKALLSAPALALPDVTKPFTLYVDERKGVARGVLTQTLGPWRRPVAYLSKKLDPVASGWPVCLKAIAAVAILVKDADKLTLGQNITVIAPHALENIVRQPPDRWMTNARMTHYQSLLLTERVTFAPPAALNPATLLPEETDEPVTHDCHQLLIEETGVRKDLTDIPLTGEVLTWFTDGSSYVVEGKRMAGAAVVDGTRTIWASSLPEGTSAQKAELMALTQALRLAEGKSINIYTDSRYAFATAHVHGAIYKQRGWLTSAGREIKNKEEILSLLEALHLPKRLAIIHCPGHQKAKDPISRGNQMADRVAKQAAQGVNLLAGKRTADGSEFEKRTADGSEFESPKKKAKVE

SEQ ID NO: 187 - protein, 1999 aa, synthetic construct
MPAAKRVKLDGGDKKYSIGLDIGTNSVGWAVITDEYKVPSKKFKVLGNTDRHSIKKNLIGALLFDSGETAEATRLKRTARRRYTRRKNRICYLQEIFSNEMAKVDDSFFHRLEESFLVEEDKKHERHPIFGNIVDEVAYHEKYPTIYHLRKKLVDSTDKADLRLIYLALAHMIKFRGHFLIEGDLNPDNSDVDKLFIQLVQTYNQLFEENPINASGVDAKAILSARLSKSRRLENLIAQLPGEKKNGLFGNLIALSLGLTPNFKSNFDLAEDAKLQLSKDTYDDDLDNLLAQIGDQYADLFLAAKNLSDAILLSDILRVNTEITKAPLSASMIKRYDEHHQDLTLLKALVRQQLPEKYKEIFFDQSKNGYAGYIDGGASQEEFYKFIKPILEKMDGTEELLVKLNREDLLRKQRTFDNGSIPHQIHLGELHAILRRQEDFYPFLKDNREKIEKILTFRIPYYVGPLARGNSRFAWMTRKSEETITPWNFEEVVDKGASAQSFIERMTNFDKNLPNEKVLPKHSLLYEYFTVYNELTKVKYVTEGMRKPAFLSGEQKKAIVDLLFKTNRKVTVKQLKEDYFKKIECFDSVEISGVEDRFNASLGTYHDLLKIIKDKDFLDNEENEDILEDIVLTLTLFEDREMIEERLKTYAHLFDDKVMKQLKRRRYTGWGRLSRKLINGIRDKQSGKTILDFLKSDGFANRNFMQLIHDDSLTFKEDIQKAQVSGQGDSLHEHIANLAGSPAIKKGILQTVKVVDELVKVMGRHKPENIVIEMARENQTTQKGQKNSRERMKRIEEGIKELGSQILKEHPVENTQLQNEKLYLYYLQNGRDMYVDQELDINRLSDYDVDHIVPQSFLKDDSIDNKVLTRSDKARGKSDNVPSEEVVKKMKNYWRQLLNAKLITQRKFDNLTKAERGGLSELDKAGFIKRQLVETRQITKHVAQILDSRMNTKYDENDKLIREVKVITLKSKLVSDFRKDFQFYKVREINNYHHAHDAYLNAVVGTALIKKYPKLESEFVYGDYKVYDVRKMIAKSEQEIGKATAKYFFYSNIMNFFKTEITLANGEIRKRPLIETNGETGEIVWDKGRDFATVRKVLSMPQVNIVKKTEVQTGGFSKESILPKRNSDKLIARKKDWDPKKYGGFDSPTVAYSVLVVAKVEKGKSKKLKSVKELLGITIMERSSFEKNPIDFLEAKGYKEVKKDLIIKLPKYSLFELENGRKRMLASAGELQKGNELALPSKYVNFLYLASHYEKLKGSPEDNEQKQLFVEQHKHYLDEIIEQISEFSKRVILADANLDKVLSAYNKHRDKPIREQAENIIHLFTLTNLGAPAAFKYFDTTIDRKRYTSTKEVLDATLIHQSITGLYETRIDLSQLGGDGGGGSGGGGSSGGGVLDTPPSHIGLEHLPPPPEVPQFPLNLERLQALQDLVHRSLEAGYISPWDGPGNNPVFPVRKPNGAWRFVHDLRATNALTKPIPALSPGPPDLTAIPTHPPHIICLDLKDAFFQIPVEDRFRFYLSFTLPSPGGLQPHRRFAWRVLPQGFINSPALFNRALQEPLRQVSAAFSQSLLVSYMDDILYASPTEEQRSQCYQALAARLRDLGFQVASEKTSQTPSPVPFLGQMVHEQIVTYQSLPTLQISSPISLHQLQAVLGDLQWVSRGTPTTRRPLQLLYSSLKRHHDPRAIIQLSPEQLQGIAELRQALSHNARSRYNEQEPLLAYVHLTRAGSTLVLFQKGAQFPLAYFQTPLTDNQASPWGLLLLLGCQYLQTQALSSYAKPILKYYHNLPKTSLDNWIQSSEDPRVQELLQLWPQISSQGIQPPGPWKTLITRAEVFLTPQFSPDPIPAALCLFSDGATGRGAYCLWKDHLLDFQAVPAPESAQKGELAGLLAGLAAAPPEPVNIWVDSKYLYSLLRTWVLGAWLQPDPVPSYALLYKSLLRHPAIVVGHVRSHSSASHPIASLNNYVDQLAGKRTADGSEFEKRTADGSEFESPKKKAKVE

SEQ ID NO: 188 - protein, 2015 aa, synthetic construct
MPAAKRVKLDGGDKKYSIGLDIGTNSVGWAVITDEYKVPSKKFKVLGNTDRHSIKKNLIGALLFDSGETAEATRLKRTARRRYTRRKNRICYLQEIFSNEMAKVDDSFFHRLEESFLVEEDKKHERHPIFGNIVDEVAYHEKYPTIYHLRKKLVDSTDKADLRLIYLALAHMIKFRGHFLIEGDLNPDNSDVDKLFIQLVQTYNQLFEENPINASGVDAKAILSARLSKSRRLENLIAQLPGEKKNGLFGNLIALSLGLTPNFKSNFDLAEDAKLQLSKDTYDDDLDNLLAQIGDQYADLFLAAKNLSDAILLSDILRVNTEITKAPLSASMIKRYDEHHQDLTLLKALVRQQLPEKYKEIFFDQSKNGYAGYIDGGASQEEFYKFIKPILEKMDGTEELLVKLNREDLLRKQRTFDNGSIPHQIHLGELHAILRRQEDFYPFLKDNREKIEKILTFRIPYYVGPLARGNSRFAWMTRKSEETITPWNFEEVVDKGASAQSFIERMTNFDKNLPNEKVLPKHSLLYEYFTVYNELTKVKYVTEGMRKPAFLSGEQKKAIVDLLFKTNRKVTVKQLKEDYFKKIECFDSVEISGVEDRFNASLGTYHDLLKIIKDKDFLDNEENEDILEDIVLTLTLFEDREMIEERLKTYAHLFDDKVMKQLKRRRYTGWGRLSRKLINGIRDKQSGKTILDFLKSDGFANRNFMQLIHDDSLTFKEDIQKAQVSGQGDSLHEHIANLAGSPAIKKGILQTVKVVDELVKVMGRHKPENIVIEMARENQTTQKGQKNSRERMKRIEEGIKELGSQILKEHPVENTQLQNEKLYLYYLQNGRDMYVDQELDINRLSDYDVDHIVPQSFLKDDSIDNKVLTRSDKARGKSDNVPSEEVVKKMKNYWRQLLNAKLITQRKFDNLTKAERGGLSELDKAGFIKRQLVETRQITKHVAQILDSRMNTKYDENDKLIREVKVITLKSKLVSDFRKDFQFYKVREINNYHHAHDAYLNAVVGTALIKKYPKLESEFVYGDYKVYDVRKMIAKSEQEIGKATAKYFFYSNIMNFFKTEITLANGEIRKRPLIETNGETGEIVWDKGRDFATVRKVLSMPQVNIVKKTEVQTGGFSKESILPKRNSDKLIARKKDWDPKKYGGFDSPTVAYSVLVVAKVEKGKSKKLKSVKELLGITIMERSSFEKNPIDFLEAKGYKEVKKDLIIKLPKYSLFELENGRKRMLASAGELQKGNELALPSKYVNFLYLASHYEKLKGSPEDNEQKQLFVEQHKHYLDEIIEQISEFSKRVILADANLDKVLSAYNKHRDKPIREQAENIIHLFTLTNLGAPAAFKYFDTTIDRKRYTSTKEVLDATLIHQSITGLYETRIDLSQLGGDGGGGGGSGGGGSGGGGSGGGGSGGGGSGGGVLDTPPSHIGLEHLPPPPEVPQFPLNLERLQALQDLVHRSLEAGYISPWDGPGNNPVFPVRKPNGAWRFVHDLRATNALTKPIPALSPGPPDLTAIPTHPPHIICLDLKDAFFQIPVEDRFRFYLSFTLPSPGGLQPHRRFAWRVLPQGFINSPALFNRALQEPLRQVSAAFSQSLLVSYMDDILYASPTEEQRSQCYQALAARLRDLGFQVASEKTSQTPSPVPFLGQMVHEQIVTYQSLPTLQISSPISLHQLQAVLGDLQWVSRGTPTTRRPLQLLYSSLKRHHDPRAIIQLSPEQLQGIAELRQALSHNARSRYNEQEPLLAYVHLTRAGSTLVLFQKGAQFPLAYFQTPLTDNQASPWGLLLLLGCQYLQTQALSSYAKPILKYYHNLPKTSLDNWIQSSEDPRVQELLQLWPQISSQGIQPPGPWKTLITRAEVFLTPQFSPDPIPAALCLFSDGATGRGAYCLWKDHLLDFQAVPAPESAQKGELAGLLAGLAAAPPEPVNIWVDSKYLYSLLRTWVLGAWLQPDPVPSYALLYKSLLRHPAIVVGHVRSHSSASHPIASLNNYVDQLAGKRTADGSEFEKRTADGSEFESPKKKAKVE

SEQ ID NO: 189 - protein, 1996 aa, synthetic construct
MPAAKRVKLDGGDKKYSIGLDIGTNSVGWAVITDEYKVPSKKFKVLGNTDRHSIKKNLIGALLFDSGETAEATRLKRTARRRYTRRKNRICYLQEIFSNEMAKVDDSFFHRLEESFLVEEDKKHERHPIFGNIVDEVAYHEKYPTIYHLRKKLVDSTDKADLRLIYLALAHMIKFRGHFLIEGDLNPDNSDVDKLFIQLVQTYNQLFEENPINASGVDAKAILSARLSKSRRLENLIAQLPGEKKNGLFGNLIALSLGLTPNFKSNFDLAEDAKLQLSKDTYDDDLDNLLAQIGDQYADLFLAAKNLSDAILLSDILRVNTEITKAPLSASMIKRYDEHHQDLTLLKALVRQQLPEKYKEIFFDQSKNGYAGYIDGGASQEEFYKFIKPILEKMDGTEELLVKLNREDLLRKQRTFDNGSIPHQIHLGELHAILRRQEDFYPFLKDNREKIEKILTFRIPYYVGPLARGNSRFAWMTRKSEETITPWNFEEVVDKGASAQSFIERMTNFDKNLPNEKVLPKHSLLYEYFTVYNELTKVKYVTEGMRKPAFLSGEQKKAIVDLLFKTNRKVTVKQLKEDYFKKIECFDSVEISGVEDRFNASLGTYHDLLKIIKDKDFLDNEENEDILEDIVLTLTLFEDREMIEERLKTYAHLFDDKVMKQLKRRRYTGWGRLSRKLINGIRDKQSGKTILDFLKSDGFANRNFMQLIHDDSLTFKEDIQKAQVSGQGDSLHEHIANLAGSPAIKKGILQTVKVVDELVKVMGRHKPENIVIEMARENQTTQKGQKNSRERMKRIEEGIKELGSQILKEHPVENTQLQNEKLYLYYLQNGRDMYVDQELDINRLSDYDVDHIVPQSFLKDDSIDNKVLTRSDKARGKSDNVPSEEVVKKMKNYWRQLLNAKLITQRKFDNLTKAERGGLSELDKAGFIKRQLVETRQITKHVAQILDSRMNTKYDENDKLIREVKVITLKSKLVSDFRKDFQFYKVREINNYHHAHDAYLNAVVGTALIKKYPKLESEFVYGDYKVYDVRKMIAKSEQEIGKATAKYFFYSNIMNFFKTEITLANGEIRKRPLIETNGETGEIVWDKGRDFATVRKVLSMPQVNIVKKTEVQTGGFSKESILPKRNSDKLIARKKDWDPKKYGGFDSPTVAYSVLVVAKVEKGKSKKLKSVKELLGITIMERSSFEKNPIDFLEAKGYKEVKKDLIIKLPKYSLFELENGRKRMLASAGELQKGNELALPSKYVNFLYLASHYEKLKGSPEDNEQKQLFVEQHKHYLDEIIEQISEFSKRVILADANLDKVLSAYNKHRDKPIREQAENIIHLFTLTNLGAPAAFKYFDTTIDRKRYTSTKEVLDATLIHQSITGLYETRIDLSQLGGDGGGGGGSSGGGVLDTPPSHIGLEHLPPPPEVPQFPLNLERLQALQDLVHRSLEAGYISPWDGPGNNPVFPVRKPNGAWRFVHDLRATNALTKPIPALSPGPPDLTAIPTHPPHIICLDLKDAFFQIPVEDRFRFYLSFTLPSPGGLQPHRRFAWRVLPQGFINSPALFNRALQEPLRQVSAAFSQSLLVSYMDDILYASPTEEQRSQCYQALAARLRDLGFQVASEKTSQTPSPVPFLGQMVHEQIVTYQSLPTLQISSPISLHQLQAVLGDLQWVSRGTPTTRRPLQLLYSSLKRHHDPRAIIQLSPEQLQGIAELRQALSHNARSRYNEQEPLLAYVHLTRAGSTLVLFQKGAQFPLAYFQTPLTDNQASPWGLLLLLGCQYLQTQALSSYAKPILKYYHNLPKTSLDNWIQSSEDPRVQELLQLWPQISSQGIQPPGPWKTLITRAEVFLTPQFSPDPIPAALCLFSDGATGRGAYCLWKDHLLDFQAVPAPESAQKGELAGLLAGLAAAPPEPVNIWVDSKYLYSLLRTWVLGAWLQPDPVPSYALLYKSLLRHPAIVVGHVRSHSSASHPIASLNNYVDQLAGKRTADGSEFEKRTADGSEFESPKKKAKVE

SEQ ID NO: 190 - protein, 2123 aa, synthetic construct; identical to SEQ ID NO: 36

SEQ ID NO: 191 - protein, 2095 aa, synthetic construct
MPAAKRVKLDGGDKKYSIGLDIGTNSVGWAVITDEYKVPSKKFKVLGNTDRHSIKKNLIGALLFDSGETAEATRLKRTARRRYTRRKNRICYLQEIFSNEMAKVDDSFFHRLEESFLVEEDKKHERHPIFGNIVDEVAYHEKYPTIYHLRKKLVDSTDKADLRLIYLALAHMIKFRGHFLIEGDLNPDNSDVDKLFIQLVQTYNQLFEENPINASGVDAKAILSARLSKSRRLENLIAQLPGEKKNGLFGNLIALSLGLTPNFKSNFDLAEDAKLQLSKDTYDDDLDNLLAQIGDQYADLFLAAKNLSDAILLSDILRVNTEITKAPLSASMIKRYDEHHQDLTLLKALVRQQLPEKYKEIFFDQSKNGYAGYIDGGASQEEFYKFIKPILEKMDGTEELLVKLNREDLLRKQRTFDNGSIPHQIHLGELHAILRRQEDFYPFLKDNREKIEKILTFRIPYYVGPLARGNSRFAWMTRKSEETITPWNFEEVVDKGASAQSFIERMTNFDKNLPNEKVLPKHSLLYEYFTVYNELTKVKYVTEGMRKPAFLSGEQKKAIVDLLFKTNRKVTVKQLKEDYFKKIECFDSVEISGVEDRFNASLGTYHDLLKIIKDKDFLDNEENEDILEDIVLTLTLFEDREMIEERLKTYAHLFDDKVMKQLKRRRYTGWGRLSRKLINGIRDKQSGKTILDFLKSDGFANRNFMQLIHDDSLTFKEDIQKAQVSGQGDSLHEHIANLAGSPAIKKGILQTVKVVDELVKVMGRHKPENIVIEMARENQTTQKGQKNSRERMKRIEEGIKELGSQILKEHPVENTQLQNEKLYLYYLQNGRDMYVDQELDINRLSDYDVDHIVPQSFLKDDSIDNKVLTRSDKARGKSDNVPSEEVVKKMKNYWRQLLNAKLITQRKFDNLTKAERGGLSELDKAGFIKRQLVETRQITKHVAQILDSRMNTKYDENDKLIREVKVITLKSKLVSDFRKDFQFYKVREINNYHHAHDAYLNAVVGTALIKKYPKLESEFVYGDYKVYDVRKMIAKSEQEIGKATAKYFFYSNIMNFFKTEITLANGEIRKRPLIETNGETGEIVWDKGRDFATVRKVLSMPQVNIVKKTEVQTGGFSKESILPKRNSDKLIARKKDWDPKKYGGFDSPTVAYSVLVVAKVEKGKSKKLKSVKELLGITIMERSSFEKNPIDFLEAKGYKEVKKDLIIKLPKYSLFELENGRKRMLASAGELQKGNELALPSKYVNFLYLASHYEKLKGSPEDNEQKQLFVEQHKHYLDEIIEQISEFSKRVILADANLDKVLSAYNKHRDKPIREQAENIIHLFTLTNLGAPAAFKYFDTTIDRKRYTSTKEVLDATLIHQSITGLYETRIDLSQLGGDGGGGSGGSGGSGGSGGSGGSGGLDDEYRLYSPLVKPDQNIQFWLEQFPQAWAETAGMGLAKQVPPQVIQLKASATPVSVRQYPLSKEAQEGIRPHVQRLIQQGILVPVQSPWNTPLLPVRKPGTNDYRPVQDLREVNKRVQDIHPTVPNPYNLLCALPPQRSWYTVLDLKDAFFCLRLHPTSQPLFAFEWRDPGTGRTGQLTWTRLPQGFKNSPTIFNEALHRDLANFRIQHPQVTLLQYVDDLLLAGATKQDCLEGTKALLLELSDLGYRASAKKAQICRREVTYLGYSLRDGQRWLTEARKKTVVQIPAPTTAKQVREFLGKAGFCRLFIPGFATLAAPLYPLTKPKGEFSWAPEHQKAFDAIKKALLSAPALALPDVTKPFTLYVDERKGVARGVLTQTLGPWRRPVAYLSKKLDPVASGWPVCLKAIAAVAILVKDADKLTLGQNITVIAPHALENIVRQPPDRWMTNARMTHYQSLLLTERVTFAPPAALNPATLLPEETDEPVTHDCHQLLIEETGVRKDLTDIPLTGEVLTWFTDGSSYVVEGKRMAGAAVVDGTRTIWASSLPEGTSAQKAELMALTQALRLAEGKSINIYTDSRYAFATAHVHGAIYKQRGWLTSAGREIKNKEEILSLLEALHLPKRLAIIHCPGHQKAKDPISRGNQMADRVAKQAAQGVNLLPAGKRTADGSEFEKRTADGSEFESPKKKAKVE

SEQ ID NO: 192 - protein, 2088 aa, synthetic construct
MPAAKRVKLDGGDKKYSIGLDIGTNSVGWAVITDEYKVPSKKFKVLGNTDRHSIKKNLIGALLFDSGETAEATRLKRTARRRYTRRKNRICYLQEIFSNEMAKVDDSFFHRLEESFLVEEDKKHERHPIFGNIVDEVAYHEKYPTIYHLRKKLVDSTDKADLRLIYLALAHMIKFRGHFLIEGDLNPDNSDVDKLFIQLVQTYNQLFEENPINASGVDAKAILSARLSKSRRLENLIAQLPGEKKNGLFGNLIALSLGLTPNFKSNFDLAEDAKLQLSKDTYDDDLDNLLAQIGDQYADLFLAAKNLSDAILLSDILRVNTEITKAPLSASMIKRYDEHHQDLTLLKALVRQQLPEKYKEIFFDQSKNGYAGYIDGGASQEEFYKFIKPILEKMDGTEELLVKLNREDLLRKQRTFDNGSIPHQIHLGELHAILRRQEDFYPFLKDNREKIEKILTFRIPYYVGPLARGNSRFAWMTRKSEETITPWNFEEVVDKGASAQSFIERMTNFDKNLPNEKVLPKHSLLYEYFTVYNELTKVKYVTEGMRKPAFLSGEQKKAIVDLLFKTNRKVTVKQLKEDYFKKIECFDSVEISGVEDRFNASLGTYHDLLKIIKDKDFLDNEENEDILEDIVLTLTLFEDREMIEERLKTYAHLFDDKVMKQLKRRRYTGWGRLSRKLINGIRDKQSGKTILDFLKSDGFANRNFMQLIHDDSLTFKEDIQKAQVSGQGDSLHEHIANLAGSPAIKKGILQTVKVVDELVKVMGRHKPENIVIEMARENQTTQKGQKNSRERMKRIEEGIKELGSQILKEHPVENTQLQNEKLYLYYLQNGRDMYVDQELDINRLSDYDVDHIVPQSFLKDDSIDNKVLTRSDKARGKSDNVPSEEVVKKMKNYWRQLLNAKLITQRKFDNLTKAERGGLSELDKAGFIKRQLVETRQITKHVAQILDSRMNTKYDENDKLIREVKVITLKSKLVSDFRKDFQFYKVREINNYHHAHDAYLNAVVGTALIKKYPKLESEFVYGDYKVYDVRKMIAKSEQEIGKATAKYFFYSNIMNFFKTEITLANGEIRKRPLIETNGETGEIVWDKGRDFATVRKVLSMPQVNIVKKTEVQTGGFSKESILPKRNSDKLIARKKDWDPKKYGGFDSPTVAYSVLVVAKVEKGKSKKLKSVKELLGITIMERSSFEKNPIDFLEAKGYKEVKKDLIIKLPKYSLFELENGRKRMLASAGELQKGNELALPSKYVNFLYLASHYEKLKGSPEDNEQKQLFVEQHKHYLDEIIEQISEFSKRVILADANLDKVLSAYNKHRDKPIREQAENIIHLFTLTNLGAPAAFKYFDTTIDRKRYTSTKEVLDATLIHQSITGLYETRIDLSQLGGDGGPAPEAAAKGGGGGLDDEYRLYSPLVKPDQNIQFWLEQFPQAWAETAGMGLAKQVPPQVIQLKASATPVSVRQYPLSKEAQEGIRPHVQRLIQQGILVPVQSPWNTPLLPVRKPGTNDYRPVQDLREVNKRVQDIHPTVPNPYNLLCALPPQRSWYTVLDLKDAFFCLRLHPTSQPLFAFEWRDPGTGRTGQLTWTRLPQGFKNSPTIFNEALHRDLANFRIQHPQVTLLQYVDDLLLAGATKQDCLEGTKALLLELSDLGYRASAKKAQICRREVTYLGYSLRDGQRWLTEARKKTVVQIPAPTTAKQVREFLGKAGFCRLFIPGFATLAAPLYPLTKPKGEFSWAPEHQKAFDAIKKALLSAPALALPDVTKPFTLYVDERKGVARGVLTQTLGPWRRPVAYLSKKLDPVASGWPVCLKAIAAVAILVKDADKLTLGQNITVIAPHALENIVRQPPDRWMTNARMTHYQSLLLTERVTFAPPAALNPATLLPEETDEPVTHDCHQLLIEETGVRKDLTDIPLTGEVLTWFTDGSSYVVEGKRMAGAAVVDGTRTIWASSLPEGTSAQKAELMALTQALRLAEGKSINIYTDSRYAFATAHVHGAIYKQRGWLTSAGREIKNKEEILSLLEALHLPKRLAIIHCPGHQKAKDPISRGNQMADRVAKQAAQGVNLLPAGKRTADGSEFEKRTADGSEFESPKKKAKVE

SEQ ID NO: 193 - protein, 2107 aa, synthetic construct
MPAAKRVKLDGGDKKYSIGLDIGTNSVGWAVITDEYKVPSKKFKVLGNTDRHSIKKNLIGALLFDSGETAEATRLKRTARRRYTRRKNRICYLQEIFSNEMAKVDDSFFHRLEESFLVEEDKKHERHPIFGNIVDEVAYHEKYPTIYHLRKKLVDSTDKADLRLIYLALAHMIKFRGHFLIEGDLNPDNSDVDKLFIQLVQTYNQLFEENPINASGVDAKAILSARLSKSRRLENLIAQLPGEKKNGLFGNLIALSLGLTPNFKSNFDLAEDAKLQLSKDTYDDDLDNLLAQIGDQYADLFLAAKNLSDAILLSDILRVNTEITKAPLSASMIKRYDEHHQDLTLLKALVRQQLPEKYKEIFFDQSKNGYAGYIDGGASQEEFYKFIKPILEKMDGTEELLVKLNREDLLRKQRTFDNGSIPHQIHLGELHAILRRQEDFYPFLKDNREKIEKILTFRIPYYVGPLARGNSRFAWMTRKSEETITPWNFEEVVDKGASAQSFIERMTNFDKNLPNEKVLPKHSLLYEYFTVYNELTKVKYVTEGMRKPAFLSGEQKKAIVDLLFKTNRKVTVKQLKEDYFKKIECFDSVEISGVEDRFNASLGTYHDLLKIIKDKDFLDNEENEDILEDIVLTLTLFEDREMIEERLKTYAHLFDDKVMKQLKRRRYTGWGRLSRKLINGIRDKQSGKTILDFLKSDGFANRNFMQLIHDDSLTFKEDIQKAQVSGQGDSLHEHIANLAGSPAIKKGILQTVKVVDELVKVMGRHKPENIVIEMARENQTTQKGQKNSRERMKRIEEGIKELGSQILKEHPVENTQLQNEKLYLYYLQNGRDMYVDQELDINRLSDYDVDHIVPQSFLKDDSIDNKVLTRSDKARGKSDNVPSEEVVKKMKNYWRQLLNAKLITQRKFDNLTKAERGGLSELDKAGFIKRQLVETRQITKHVAQILDSRMNTKYDENDKLIREVKVITLKSKLVSDFRKDFQFYKVREINNYHHAHDAYLNAVVGTALIKKYPKLESEFVYGDYKVYDVRKMIAKSEQEIGKATAKYFFYSNIMNFFKTEITLANGEIRKRPLIETNGETGEIVWDKGRDFATVRKVLSMPQVNIVKKTEVQTGGFSKESILPKRNSDKLIARKKDWDPKKYGGFDSPTVAYSVLVVAKVEKGKSKKLKSVKELLGITIMERSSFEKNPIDFLEAKGYKEVKKDLIIKLPKYSLFELENGRKRMLASAGELQKGNELALPSKYVNFLYLASHYEKLKGSPEDNEQKQLFVEQHKHYLDEIIEQISEFSKRVILADANLDKVLSAYNKHRDKPIREQAENIIHLFTLTNLGAPAAFKYFDTTIDRKRYTSTKEVLDATLIHQSITGLYETRIDLSQLGGDGGEAAAKEAAAKEAAAKEAAAKEAAAKEAAAKGGLDDEYRLYSPLVKPDQNIQFWLEQFPQAWAETAGMGLAKQVPPQVIQLKASATPVSVRQYPLSKEAQEGIRPHVQRLIQQGILVPVQSPWNTPLLPVRKPGTNDYRPVQDLREVNKRVQDIHPTVPNPYNLLCALPPQRSWYTVLDLKDAFFCLRLHPTSQPLFAFEWRDPGTGRTGQLTWTRLPQGFKNSPTIFNEALHRDLANFRIQHPQVTLLQYVDDLLLAGATKQDCLEGTKALLLELSDLGYRASAKKAQICRREVTYLGYSLRDGQRWLTEARKKTVVQIPAPTTAKQVREFLGKAGFCRLFIPGFATLAAPLYPLTKPKGEFSWAPEHQKAFDAIKKALLSAPALALPDVTKPFTLYVDERKGVARGVLTQTLGPWRRPVAYLSKKLDPVASGWPVCLKAIAAVAILVKDADKLTLGQNITVIAPHALENIVRQPPDRWMTNARMTHYQSLLLTERVTFAPPAALNPATLLPEETDEPVTHDCHQLLIEETGVRKDLTDIPLTGEVLTWFTDGSSYVVEGKRMAGAAVVDGTRTIWASSLPEGTSAQKAELMALTQALRLAEGKSINIYTDSRYAFATAHVHGAIYKQRGWLTSAGREIKNKEEILSLLEALHLPKRLAIIHCPGHQKAKDPISRGNQMADRVAKQAAQGVNLLPAGKRTADGSEFEKRTADGSEFESPKKKAKVE

SEQ ID NO: 194 - protein, 2090 aa, synthetic construct; identical to SEQ ID NO: 54

SEQ ID NO: 195 - protein, 2088 aa, synthetic construct; identical to SEQ ID NO: 35

SEQ ID NO: 196 - protein, 2093 aa, synthetic construct; identical to SEQ ID NO: 90

SEQ ID NO: 197 - protein, 2086 aa, synthetic construct
MPAAKRVKLDGGDKKYSIGLDIGTNSVGWAVITDEYKVPSKKFKVLGNTDRHSIKKNLIGALLFDSGETAEATRLKRTARRRYTRRKNRICYLQEIFSNEMAKVDDSFFHRLEESFLVEEDKKHERHPIFGNIVDEVAYHEKYPTIYHLRKKLVDSTDKADLRLIYLALAHMIKFRGHFLIEGDLNPDNSDVDKLFIQLVQTYNQLFEENPINASGVDAKAILSARLSKSRRLENLIAQLPGEKKNGLFGNLIALSLGLTPNFKSNFDLAEDAKLQLSKDTYDDDLDNLLAQIGDQYADLFLAAKNLSDAILLSDILRVNTEITKAPLSASMIKRYDEHHQDLTLLKALVRQQLPEKYKEIFFDQSKNGYAGYIDGGASQEEFYKFIKPILEKMDGTEELLVKLNREDLLRKQRTFDNGSIPHQIHLGELHAILRRQEDFYPFLKDNREKIEKILTFRIPYYVGPLARGNSRFAWMTRKSEETITPWNFEEVVDKGASAQSFIERMTNFDKNLPNEKVLPKHSLLYEYFTVYNELTKVKYVTEGMRKPAFLSGEQKKAIVDLLFKTNRKVTVKQLKEDYFKKIECFDSVEISGVEDRFNASLGTYHDLLKIIKDKDFLDNEENEDILEDIVLTLTLFEDREMIEERLKTYAHLFDDKVMKQLKRRRYTGWGRLSRKLINGIRDKQSGKTILDFLKSDGFANRNFMQLIHDDSLTFKEDIQKAQVSGQGDSLHEHIANLAGSPAIKKGILQTVKVVDELVKVMGRHKPENIVIEMARENQTTQKGQKNSRERMKRIEEGIKELGSQILKEHPVENTQLQNEKLYLYYLQNGRDMYVDQELDINRLSDYDVDHIVPQSFLKDDSIDNKVLTRSDKARGKSDNVPSEEVVKKMKNYWRQLLNAKLITQRKFDNLTKAERGGLSELDKAGFIKRQLVETRQITKHVAQILDSRMNTKYDENDKLIREVKVITLKSKLVSDFRKDFQFYKVREINNYHHAHDAYLNAVVGTALIKKYPKLESEFVYGDYKVYDVRKMIAKSEQEIGKATAKYFFYSNIMNFFKTEITLANGEIRKRPLIETNGETGEIVWDKGRDFATVRKVLSMPQVNIVKKTEVQTGGFSKESILPKRNSDKLIARKKDWDPKKYGGFDSPTVAYSVLVVAKVEKGKSKKLKSVKELLGITIMERSSFEKNPIDFLEAKGYKEVKKDLIIKLPKYSLFELENGRKRMLASAGELQKGNELALPSKYVNFLYLASHYEKLKGSPEDNEQKQLFVEQHKHYLDEIIEQISEFSKRVILADANLDKVLSAYNKHRDKPIREQAENIIHLFTLTNLGAPAAFKYFDTTIDRKRYTSTKEVLDATLIHQSITGLYETRIDLSQLGGDGGGGGGGSPAPGGLDDEYRLYSPLVKPDQNIQFWLEQFPQAWAETAGMGLAKQVPPQVIQLKASATPVSVRQYPLSKEAQEGIRPHVQRLIQQGILVPVQSPWNTPLLPVRKPGTNDYRPVQDLREVNKRVQDIHPTVPNPYNLLCALPPQRSWYTVLDLKDAFFCLRLHPTSQPLFAFEWRDPGTGRTGQLTWTRLPQGFKNSPTIFNEALHRDLANFRIQHPQVTLLQYVDDLLLAGATKQDCLEGTKALLLELSDLGYRASAKKAQICRREVTYLGYSLRDGQRWLTEARKKTVVQIPAPTTAKQVREFLGKAGFCRLFIPGFATLAAPLYPLTKPKGEFSWAPEHQKAFDAIKKALLSAPALALPDVTKPFTLYVDERKGVARGVLTQTLGPWRRPVAYLSKKLDPVASGWPVCLKAIAAVAILVKDADKLTLGQNITVIAPHALENIVRQPPDRWMTNARMTHYQSLLLTERVTFAPPAALNPATLLPEETDEPVTHDCHQLLIEETGVRKDLTDIPLTGEVLTWFTDGSSYVVEGKRMAGAAVVDGTRTIWASSLPEGTSAQKAELMALTQALRLAEGKSINIYTDSRYAFATAHVHGAIYKQRGWLTSAGREIKNKEEILSLLEALHLPKRLAIIHCPGHQKAKDPISRGNQMADRVAKQAAQGVNLLPAGKRTADGSEFEKRTADGSEFESPKKKAKVE

SEQ ID NO: 198 - protein, 2086 aa, synthetic construct; identical to SEQ ID NO: 58

SEQ ID NO: 199 - protein, 2088 aa, synthetic construct; identical to SEQ ID NO: 40

SEQ ID NO: 200 - protein, 2088 aa, synthetic construct; identical to SEQ ID NO: 63

SEQ ID NO: 201 - protein, 2089 aa, synthetic construct; identical to SEQ ID NO: 74

SEQ ID NO: 202 - protein, 2092 aa, synthetic construct
MPAAKRVKLDGGDKKYSIGLDIGTNSVGWAVITDEYKVPSKKFKVLGNTDRHSIKKNLIGALLFDSGETAEATRLKRTARRRYTRRKNRICYLQEIFSNEMAKVDDSFFHRLEESFLVEEDKKHERHPIFGNIVDEVAYHEKYPTIYHLRKKLVDSTDKADLRLIYLALAHMIKFRGHFLIEGDLNPDNSDVDKLFIQLVQTYNQLFEENPINASGVDAKAILSARLSKSRRLENLIAQLPGEKKNGLFGNLIALSLGLTPNFKSNFDLAEDAKLQLSKDTYDDDLDNLLAQIGDQYADLFLAAKNLSDAILLSDILRVNTEITKAPLSASMIKRYDEHHQDLTLLKALVRQQLPEKYKEIFFDQSKNGYAGYIDGGASQEEFYKFIKPILEKMDGTEELLVKLNREDLLRKQRTFDNGSIPHQIHLGELHAILRRQEDFYPFLKDNREKIEKILTFRIPYYVGPLARGNSRFAWMTRKSEETITPWNFEEVVDKGASAQSFIERMTNFDKNLPNEKVLPKHSLLYEYFTVYNELTKVKYVTEGMRKPAFLSGEQKKAIVDLLFKTNRKVTVKQLKEDYFKKIECFDSVEISGVEDRFNASLGTYHDLLKIIKDKDFLDNEENEDILEDIVLTLTLFEDREMIEERLKTYAHLFDDKVMKQLKRRRYTGWGRLSRKLINGIRDKQSGKTILDFLKSDGFANRNFMQLIHDDSLTFKEDIQKAQVSGQGDSLHEHIANLAGSPAIKKGILQTVKVVDELVKVMGRHKPENIVIEMARENQTTQKGQKNSRERMKRIEEGIKELGSQILKEHPVENTQLQNEKLYLYYLQNGRDMYVDQELDINRLSDYDVDHIVPQSFLKDDSIDNKVLTRSDKARGKSDNVPSEEVVKKMKNYWRQLLNAKLITQRKFDNLTKAERGGLSELDKAGFIKRQLVETRQITKHVAQILDSRMNTKYDENDKLIREVKVITLKSKLVSDFRKDFQFYKVREINNYHHAHDAYLNAVVGTALIKKYPKLESEFVYGDYKVYDVRKMIAKSEQEIGKATAKYFFYSNIMNFFKTEITLANGEIRKRPLIETNGETGEIVWDKGRDFATVRKVLSMPQVNIVKKTEVQTGGFSKESILPKRNSDKLIARKKDWDPKKYGGFDSPTVAYSVLVVAKVEKGKSKKLKSVKELLGITIMERSSFEKNPIDFLEAKGYKEVKKDLIIKLPKYSLFELENGRKRMLASAGELQKGNELALPSKYVNFLYLASHYEKLKGSPEDNEQKQLFVEQHKHYLDEIIEQISEFSKRVILADANLDKVLSAYNKHRDKPIREQAENIIHLFTLTNLGAPAAFKYFDTTIDRKRYTSTKEVLDATLIHQSITGLYETRIDLSQLGGDGGGSSGSSGSSGSSGSSGGLDDEYRLYSPLVKPDQNIQFWLEQFPQAWAETAGMGLAKQVPPQVIQLKASATPVSVRQYPLSKEAQEGIRPHVQRLIQQGILVPVQSPWNTPLLPVRKPGTNDYRPVQDLREVNKRVQDIHPTVPNPYNLLCALPPQRSWYTVLDLKDAFFCLRLHPTSQPLFAFEWRDPGTGRTGQLTWTRLPQGFKNSPTIFNEALHRDLANFRIQHPQVTLLQYVDDLLLAGATKQDCLEGTKALLLELSDLGYRASAKKAQICRREVTYLGYSLRDGQRWLTEARKKTVVQIPAPTTAKQVREFLGKAGFCRLFIPGFATLAAPLYPLTKPKGEFSWAPEHQKAFDAIKKALLSAPALALPDVTKPFTLYVDERKGVARGVLTQTLGPWRRPVAYLSKKLDPVASGWPVCLKAIAAVAILVKDADKLTLGQNITVIAPHALENIVRQPPDRWMTNARMTHYQSLLLTERVTFAPPAALNPATLLPEETDEPVTHDCHQLLIEETGVRKDLTDIPLTGEVLTWFTDGSSYVVEGKRMAGAAVVDGTRTIWASSLPEGTSAQKAELMALTQALRLAEGKSINIYTDSRYAFATAHVHGAIYKQRGWLTSAGREIKNKEEILSLLEALHLPKRLAIIHCPGHQKAKDPISRGNQMADRVAKQAAQGVNLLPAGKRTADGSEFEKRTADGSEFESPKKKAKVE

SEQ ID NO: 203 - protein, 2083 aa, synthetic construct; identical to SEQ ID NO: 76

SEQ ID NO: 204 - protein, 2088 aa, synthetic construct; identical to SEQ ID NO: 71

SEQ ID NO: 205 - protein, 2086 aa, synthetic construct; identical to SEQ ID NO: 73

SEQ ID NO: 206 - protein, 2085 aa, synthetic construct; identical to SEQ ID NO: 57

SEQ ID NO: 207 - protein, 2086 aa, synthetic construct; identical to SEQ ID NO: 43

SEQ ID NO: 208 - protein, 2086 aa, synthetic construct
MPAAKRVKLDGGDKKYSIGLDIGTNSVGWAVITDEYKVPSKKFKVLGNTDRHSIKKNLIGALLFDSGETAEATRLKRTARRRYTRRKNRICYLQEIFSNEMAKVDDSFFHRLEESFLVEEDKKHERHPIFGNIVDEVAYHEKYPTIYHLRKKLVDSTDKADLRLIYLALAHMIKFRGHFLIEGDLNPDNSDVDKLFIQLVQTYNQLFEENPINASGVDAKAILSARLSKSRRLENLIAQLPGEKKNGLFGNLIALSLGLTPNFKSNFDLAEDAKLQLSKDTYDDDLDNLLAQIGDQYADLFLAAKNLSDAILLSDILRVNTEITKAPLSASMIKRYDEHHQDLTLLKALVRQQLPEKYKEIFFDQSKNGYAGYIDGGASQEEFYKFIKPILEKMDGTEELLVKLNREDLLRKQRTFDNGSIPHQIHLGELHAILRRQEDFYPFLKDNREKIEKILTFRIPYYVGPLARGNSRFAWMTRKSEETITPWNFEEVVDKGASAQSFIERMTNFDKNLPNEKVLPKHSLLYEYFTVYNELTKVKYVTEGMRKPAFLSGEQKKAIVDLLFKTNRKVTVKQLKEDYFKKIECFDSVEISGVEDRFNASLGTYHDLLKIIKDKDFLDNEENEDILEDIVLTLTLFEDREMIEERLKTYAHLFDDKVMKQLKRRRYTGWGRLSRKLINGIRDKQSGKTILDFLKSDGFANRNFMQLIHDDSLTFKEDIQKAQVSGQGDSLHEHIANLAGSPAIKKGILQTVKVVDELVKVMGRHKPENIVIEMARENQTTQKGQKNSRERMKRIEEGIKELGSQILKEHPVENTQLQNEKLYLYYLQNGRDMYVDQELDINRLSDYDVDHIVPQSFLKDDSIDNKVLTRSDKARGKSDNVPSEEVVKKMKNYWRQLLNAKLITQRKFDNLTKAERGGLSELDKAGFIKRQLVETRQITKHVAQILDSRMNTKYDENDKLIREVKVITLKSKLVSDFRKDFQFYKVREINNYHHAHDAYLNAVVGTALIKKYPKLESEFVYGDYKVYDVRKMIAKSEQEIGKATAKYFFYSNIMNFFKTEITLANGEIRKRPLIETNGETGEIVWDKGRDFATVRKVLSMPQVNIVKKTEVQTGGFSKESILPKRNSDKLIARKKDWDPKKYGGFDSPTVAYSVLVVAKVEKGKSKKLKSVKELLGITIMERSSFEKNPIDFLEAKGYKEVKKDLIIKLPKYSLFELENGRKRMLASAGELQKGNELALPSKYVNFLYLASHYEKLKGSPEDNEQKQLFVEQHKHYLDEIIEQISEFSKRVILADANLDKVLSAYNKHRDKPIREQAENIIHLFTLTNLGAPAAFKYFDTTIDRKRYTSTKEVLDATLIHQSITGLYETRIDLSQLGGDGGGSSGSSGSSGGLDDEYRLYSPLVKPDQNIQFWLEQFPQAWAETAGMGLAKQVPPQVIQLKASATPVSVRQYPLSKEAQEGIRPHVQRLIQQGILVPVQSPWNTPLLPVRKPGTNDYRPVQDLREVNKRVQDIHPTVPNPYNLLCALPPQRSWYTVLDLKDAFFCLRLHPTSQPLFAFEWRDPGTGRTGQLTWTRLPQGFKNSPTIFNEALHRDLANFRIQHPQVTLLQYVDDLLLAGATKQDCLEGTKALLLELSDLGYRASAKKAQICRREVTYLGYSLRDGQRWLTEARKKTVVQIPAPTTAKQVREFLGKAGFCRLFIPGFATLAAPLYPLTKPKGEFSWAPEHQKAFDAIKKALLSAPALALPDVTKPFTLYVDERKGVARGVLTQTLGPWRRPVAYLSKKLDPVASGWPVCLKAIAAVAILVKDADKLTLGQNITVIAPHALENIVRQPPDRWMTNARMTHYQSLLLTERVTFAPPAALNPATLLPEETDEPVTHDCHQLLIEETGVRKDLTDIPLTGEVLTWFTDGSSYVVEGKRMAGAAVVDGTRTIWASSLPEGTSAQKAELMALTQALRLAEGKSINIYTDSRYAFATAHVHGAIYKQRGWLTSAGREIKNKEEILSLLEALHLPKRLAIIHCPGHQKAKDPISRGNQMADRVAKQAAQGVNLLPAGKRTADGSEFEKRTADGSEFESPKKKAKVE

SEQ ID NO: 209 - protein, 2088 aa, synthetic construct
MPAAKRVKLDGGDKKYSIGLDIGTNSVGWAVITDEYKVPSKKFKVLGNTDRHSIKKNLIGALLFDSGETAEATRLKRTARRRYTRRKNRICYLQEIFSNEMAKVDDSFFHRLEESFLVEEDKKHERHPIFGNIVDEVAYHEKYPTIYHLRKKLVDSTDKADLRLIYLALAHMIKFRGHFLIEGDLNPDNSDVDKLFIQLVQTYNQLFEENPINASGVDAKAILSARLSKSRRLENLIAQLPGEKKNGLFGNLIALSLGLTPNFKSNFDLAEDAKLQLSKDTYDDDLDNLLAQIGDQYADLFLAAKNLSDAILLSDILRVNTEITKAPLSASMIKRYDEHHQDLTLLKALVRQQLPEKYKEIFFDQSKNGYAGYIDGGASQEEFYKFIKPILEKMDGTEELLVKLNREDLLRKQRTFDNGSIPHQIHLGELHAILRRQEDFYPFLKDNREKIEKILTFRIPYYVGPLARGNSRFAWMTRKSEETITPWNFEEVVDKGASAQSFIERMTNFDKNLPNEKVLPKHSLLYEYFTVYNELTKVKYVTEGMRKPAFLSGEQKKAIVDLLFKTNRKVTVKQLKEDYFKKIECFDSVEISGVEDRFNASLGTYHDLLKIIKDKDFLDNEENEDILEDIVLTLTLFEDREMIEERLKTYAHLFDDKVMKQLKRRRYTGWGRLSRKLINGIRDKQSGKTILDFLKSDGFANRNFMQLIHDDSLTFKEDIQKAQVSGQGDSLHEHIANLAGSPAIKKGILQTVKVVDELVKVMGRHKPENIVIEMARENQTTQKGQKNSRERMKRIEEGIKELGSQILKEHPVENTQLQNEKLYLYYLQNGRDMYVDQELDINRLSDYDVDHIVPQSFLKDDSIDNKVLTRSDKARGKSDNVPSEEVVKKMKNYWRQLLNAKLITQRKFDNLTKAERGGLSELDKAGFIKRQLVETRQITKHVAQILDSRMNTKYDENDKLIREVKVITLKSKLVSDFRKDFQFYKVREINNYHHAHDAYLNAVVGTALIKKYPKLESEFVYGDYKVYDVRKMIAKSEQEIGKATAKYFFYSNIMNFFKTEITLANGEIRKRPLIETNGETGEIVWDKGRDFATVRKVLSMPQVNIVKKTEVQTGGFSKESILPKRNSDKLIARKKDWDPKKYGGFDSPTVAYSVLVVAKVEKGKSKKLKSVKELLGITIMERSSFEKNPIDFLEAKGYKEVKKDLIIKLPKYSLFELENGRKRMLASAGELQKGNELALPSKYVNFLYLASHYEKLKGSPEDNEQKQLFVEQHKHYLDEIIEQISEFSKRVILADANLDKVLSAYNKHRDKPIREQAENIIHLFTLTNLGAPAAFKYFDTTIDRKRYTSTKEVLDATLIHQSITGLYETRIDLSQLGGDGGGSSEAAAKPAPGGLDDEYRLYSPLVKPDQNIQFWLEQFPQAWAETAGMGLAKQVPPQVIQLKASATPVSVRQYPLSKEAQEGIRPHVQRLIQQGILVPVQSPWNTPLLPVRKPGTNDYRPVQDLREVNKRVQDIHPTVPNPYNLLCALPPQRSWYTVLDLKDAFFCLRLHPTSQPLFAFEWRDPGTGRTGQLTWTRLPQGFKNSPTIFNEALHRDLANFRIQHPQVTLLQYVDDLLLAGATKQDCLEGTKALLLELSDLGYRASAKKAQICRREVTYLGYSLRDGQRWLTEARKKTVVQIPAPTTAKQVREFLGKAGFCRLFIPGFATLAAPLYPLTKPKGEFSWAPEHQKAFDAIKKALLSAPALALPDVTKPFTLYVDERKGVARGVLTQTLGPWRRPVAYLSKKLDPVASGWPVCLKAIAAVAILVKDADKLTLGQNITVIAPHALENIVRQPPDRWMTNARMTHYQSLLLTERVTFAPPAALNPATLLPEETDEPVTHDCHQLLIEETGVRKDLTDIPLTGEVLTWFTDGSSYVVEGKRMAGAAVVDGTRTIWASSLPEGTSAQKAELMALTQALRLAEGKSINIYTDSRYAFATAHVHGAIYKQRGWLTSAGREIKNKEEILSLLEALHLPKRLAIIHCPGHQKAKDPISRGNQMADRVAKQAAQGVNLLPAGKRTADGSEFEKRTADGSEFESPKKKAKVE

SEQ ID NO: 210 - protein, 2086 aa, synthetic construct; identical to SEQ ID NO: 89

SEQ ID NO: 211 - protein, 2088 aa, synthetic construct; identical to SEQ ID NO: 42

SEQ ID NO: 212 - protein, 2083 aa, synthetic construct
MPAAKRVKLDGGDKKYSIGLDIGTNSVGWAVITDEYKVPSKKFKVLGNTDRHSIKKNLIGALLFDSGETAEATRLKRTARRRYTRRKNRICYLQEIFSNEMAKVDDSFFHRLEESFLVEEDKKHERHPIFGNIVDEVAYHEKYPTIYHLRKKLVDSTDKADLRLIYLALAHMIKFRGHFLIEGDLNPDNSDVDKLFIQLVQTYNQLFEENPINASGVDAKAILSARLSKSRRLENLIAQLPGEKKNGLFGNLIALSLGLTPNFKSNFDLAEDAKLQLSKDTYDDDLDNLLAQIGDQYADLFLAAKNLSDAILLSDILRVNTEITKAPLSASMIKRYDEHHQDLTLLKALVRQQLPEKYKEIFFDQSKNGYAGYIDGGASQEEFYKFIKPILEKMDGTEELLVKLNREDLLRKQRTFDNGSIPHQIHLGELHAILRRQEDFYPFLKDNREKIEKILTFRIPYYVGPLARGNSRFAWMTRKSEETITPWNFEEVVDKGASAQSFIERMTNFDKNLPNEKVLPKHSLLYEYFTVYNELTKVKYVTEGMRKPAFLSGEQKKAIVDLLFKTNRKVTVKQLKEDYFKKIECFDSVEISGVEDRFNASLGTYHDLLKIIKDKDFLDNEENEDILEDIVLTLTLFEDREMIEERLKTYAHLFDDKVMKQLKRRRYTGWGRLSRKLINGIRDKQSGKTILDFLKSDGFANRNFMQLIHDDSLTFKEDIQKAQVSGQGDSLHEHIANLAGSPAIKKGILQTVKVVDELVKVMGRHKPENIVIEMARENQTTQKGQKNSRERMKRIEEGIKELGSQILKEHPVENTQLQNEKLYLYYLQNGRDMYVDQELDINRLSDYDVDHIVPQSFLKDDSIDNKVLTRSDKARGKSDNVPSEEVVKKMKNYWRQLLNAKLITQRKFDNLTKAERGGLSELDKAGFIKRQLVETRQITKHVAQILDSRMNTKYDENDKLIREVKVITLKSKLVSDFRKDFQFYKVREINNYHHAHDAYLNAVVGTALIKKYPKLESEFVYGDYKVYDVRKMIAKSEQEIGKATAKYFFYSNIMNFFKTEITLANGEIRKRPLIETNGETGEIVWDKGRDFATVRKVLSMPQVNIVKKTEVQTGGFSKESILPKRNSDKLIARKKDWDPKKYGGFDSPTVAYSVLVVAKVEKGKSKKLKSVKELLGITIMERSSFEKNPIDFLEAKGYKEVKKDLIIKLPKYSLFELENGRKRMLASAGELQKGNELALPSKYVNFLYLASHYEKLKGSPEDNEQKQLFVEQHKHYLDEIIEQISEFSKRVILADANLDKVLSAYNKHRDKPIREQAENIIHLFTLTNLGAPAAFKYFDTTIDRKRYTSTKEVLDATLIHQSITGLYETRIDLSQLGGDGGGGSGSSGGLDDEYRLYSPLVKPDQNIQFWLEQFPQAWAETAGMGLAKQVPPQVIQLKASATPVSVRQYPLSKEAQEGIRPHVQRLIQQGILVPVQSPWNTPLLPVRKPGTNDYRPVQDLREVNKRVQDIHPTVPNPYNLLCALPPQRSWYTVLDLKDAFFCLRLHPTSQPLFAFEWRDPGTGRTGQLTWTRLPQGFKNSPTIFNEALHRDLANFRIQHPQVTLLQYVDDLLLAGATKQDCLEGTKALLLELSDLGYRASAKKAQICRREVTYLGYSLRDGQRWLTEARKKTVVQIPAPTTAKQVREFLGKAGFCRLFIPGFATLAAPLYPLTKPKGEFSWAPEHQKAFDAIKKALLSAPALALPDVTKPFTLYVDERKGVARGVLTQTLGPWRRPVAYLSKKLDPVASGWPVCLKAIAAVAILVKDADKLTLGQNITVIAPHALENIVRQPPDRWMTNARMTHYQSLLLTERVTFAPPAALNPATLLPEETDEPVTHDCHQLLIEETGVRKDLTDIPLTGEVLTWFTDGSSYVVEGKRMAGAAVVDGTRTIWASSLPEGTSAQKAELMALTQALRLAEGKSINIYTDSRYAFATAHVHGAIYKQRGWLTSAGREIKNKEEILSLLEALHLPKRLAIIHCPGHQKAKDPISRGNQMADRVAKQAAQGVNLLPAGKRTADGSEFEKRTADGSEFESPKKKAKVE

SEQ ID NO: 213 - protein, 2086 aa, synthetic construct
MPAAKRVKLDGGDKKYSIGLDIGTNSVGWAVITDEYKVPSKKFKVLGNTDRHSIKKNLIGALLFDSGETAEATRLKRTARRRYTRRKNRICYLQEIFSNEMAKVDDSFFHRLEESFLVEEDKKHERHPIFGNIVDEVAYHEKYPTIYHLRKKLVDSTDKADLRLIYLALAHMIKFRGHFLIEGDLNPDNSDVDKLFIQLVQTYNQLFEENPINASGVDAKAILSARLSKSRRLENLIAQLPGEKKNGLFGNLIALSLGLTPNFKSNFDLAEDAKLQLSKDTYDDDLDNLLAQIGDQYADLFLAAKNLSDAILLSDILRVNTEITKAPLSASMIKRYDEHHQDLTLLKALVRQQLPEKYKEIFFDQSKNGYAGYIDGGASQEEFYKFIKPILEKMDGTEELLVKLNREDLLRKQRTFDNGSIPHQIHLGELHAILRRQEDFYPFLKDNREKIEKILTFRIPYYVGPLARGNSRFAWMTRKSEETITPWNFEEVVDKGASAQSFIERMTNFDKNLPNEKVLPKHSLLYEYFTVYNELTKVKYVTEGMRKPAFLSGEQKKAIVDLLFKTNRKVTVKQLKEDYFKKIECFDSVEISGVEDRFNASLGTYHDLLKIIKDKDFLDNEENEDILEDIVLTLTLFEDREMIEERLKTYAHLFDDKVMKQLKRRRYTGWGRLSRKLINGIRDKQSGKTILDFLKSDGFANRNFMQLIHDDSLTFKEDIQKAQVSGQGDSLHEHIANLAGSPAIKKGILQTVKVVDELVKVMGRHKPENIVIEMARENQTTQKGQKNSRERMKRIEEGIKELGSQILKEHPVENTQLQNEKLYLYYLQNGRDMYVDQELDINRLSDYDVDHIVPQSFLKDDSIDNKVLTRSDKARGKSDNVPSEEVVKKMKNYWRQLLNAKLITQRKFDNLTKAERGGLSELDKAGFIKRQLVETRQITKHVAQILDSRMNTKYDENDKLIREVKVITLKSKLVSDFRKDFQFYKVREINNYHHAHDAYLNAVVGTALIKKYPKLESEFVYGDYKVYDVRKMIAKSEQEIGKATAKYFFYSNIMNFFKTEITLANGEIRKRPLIETNGETGEIVWDKGRDFATVRKVLSMPQVNIVKKTEVQTGGFSKESILPKRNSDKLIARKKDWDPKKYGGFDSPTVAYSVLVVAKVEKGKSKKLKSVKELLGITIMERSSFEKNPIDFLEAKGYKEVKKDLIIKLPKYSLFELENGRKRMLASAGELQKGNELALPSKYVNFLYLASHYEKLKGSPEDNEQKQLFVEQHKHYLDEIIEQISEFSKRVILADANLDKVLSAYNKHRDKPIREQAENIIHLFTLTNLGAPAAFKYFDTTIDRKRYTSTKEVLDATLIHQSITGLYETRIDLSQLGGDGGGGSGGGPAPGGLDDEYRLYSPLVKPDQNIQFWLEQFPQAWAETAGMGLAKQVPPQVIQLKASATPVSVRQYPLSKEAQEGIRPHVQRLIQQGILVPVQSPWNTPLLPVRKPGTNDYRPVQDLREVNKRVQDIHPTVPNPYNLLCALPPQRSWYTVLDLKDAFFCLRLHPTSQPLFAFEWRDPGTGRTGQLTWTRLPQGFKNSPTIFNEALHRDLANFRIQHPQVTLLQYVDDLLLAGATKQDCLEGTKALLLELSDLGYRASAKKAQICRREVTYLGYSLRDGQRWLTEARKKTVVQIPAPTTAKQVREFLGKAGFCRLFIPGFATLAAPLYPLTKPKGEFSWAPEHQKAFDAIKKALLSAPALALPDVTKPFTLYVDERKGVARGVLTQTLGPWRRPVAYLSKKLDPVASGWPVCLKAIAAVAILVKDADKLTLGQNITVIAPHALENIVRQPPDRWMTNARMTHYQSLLLTERVTFAPPAALNPATLLPEETDEPVTHDCHQLLIEETGVRKDLTDIPLTGEVLTWFTDGSSYVVEGKRMAGAAVVDGTRTIWASSLPEGTSAQKAELMALTQALRLAEGKSINIYTDSRYAFATAHVHGAIYKQRGWLTSAGREIKNKEEILSLLEALHLPKRLAIIHCPGHQKAKDPISRGNQMADRVAKQAAQGVNLLPAGKRTADGSEFEKRTADGSEFESPKKKAKVE

SEQ ID NO: 214 - protein, 2095 aa, synthetic construct
MPAAKRVKLDGGDKKYSIGLDIGTNSVGWAVITDEYKVPSKKFKVLGNTDRHSIKKNLIGALLFDSGETAEATRLKRTARRRYTRRKNRICYLQEIFSNEMAKVDDSFFHRLEESFLVEEDKKHERHPIFGNIVDEVAYHEKYPTIYHLRKKLVDSTDKADLRLIYLALAHMIKFRGHFLIEGDLNPDNSDVDKLFIQLVQTYNQLFEENPINASGVDAKAILSARLSKSRRLENLIAQLPGEKKNGLFGNLIALSLGLTPNFKSNFDLAEDAKLQLSKDTYDDDLDNLLAQIGDQYADLFLAAKNLSDAILLSDILRVNTEITKAPLSASMIKRYDEHHQDLTLLKALVRQQLPEKYKEIFFDQSKNGYAGYIDGGASQEEFYKFIKPILEKMDGTEELLVKLNREDLLRKQRTFDNGSIPHQIHLGELHAILRRQEDFYPFLKDNREKIEKILTFRIPYYVGPLARGNSRFAWMTRKSEETITPWNFEEVVDKGASAQSFIERMTNFDKNLPNEKVLPKHSLLYEYFTVYNELTKVKYVTEGMRKPAFLSGEQKKAIVDLLFKTNRKVTVKQLKEDYFKKIECFDSVEISGVEDRFNASLGTYHDLLKIIKDKDFLDNEENEDILEDIVLTLTLFEDREMIEERLKTYAHLFDDKVMKQLKRRRYTGWGRLSRKLINGIRDKQSGKTILDFLKSDGFANRNFMQLIHDDSLTFKEDIQKAQVSGQGDSLHEHIANLAGSPAIKKGILQTVKVVDELVKVMGRHKPENIVIEMARENQTTQKGQKNSRERMKRIEEGIKELGSQILKEHPVENTQLQNEKLYLYYLQNGRDMYVDQELDINRLSDYDVDHIVPQSFLKDDSIDNKVLTRSDKARGKSDNVPSEEVVKKMKNYWRQLLNAKLITQRKFDNLTKAERGGLSELDKAGFIKRQLVETRQITKHVAQILDSRMNTKYDENDKLIREVKVITLKSKLVSDFRKDFQFYKVREINNYHHAHDAYLNAVVGTALIKKYPKLESEFVYGDYKVYDVRKMIAKSEQEIGKATAKYFFYSNIMNFFKTEITLANGEIRKRPLIETNGETGEIVWDKGRDFATVRKVLSMPQVNIVKKTEVQTGGFSKESILPKRNSDKLIARKKDWDPKKYGGFDSPTVAYSVLVVAKVEKGKSKKLKSVKELLGITIMERSSFEKNPIDFLEAKGYKEVKKDLIIKLPKYSLFELENGRKRMLASAGELQKGNELALPSKYVNFLYLASHYEKLKGSPEDNEQKQLFVEQHKHYLDEIIEQISEFSKRVILADANLDKVLSAYNKHRDKPIREQAENIIHLFTLTNLGAPAAFKYFDTTIDRKRYTSTKEVLDATLIHQSITGLYETRIDLSQLGGDGGGSSGSSGSSGSSGSSGSSGGLDDEYRLYSPLVKPDQNIQFWLEQFPQAWAETAGMGLAKQVPPQVIQLKASATPVSVRQYPLSKEAQEGIRPHVQRLIQQGILVPVQSPWNTPLLPVRKPGTNDYRPVQDLREVNKRVQDIHPTVPNPYNLLCALPPQRSWYTVLDLKDAFFCLRLHPTSQPLFAFEWRDPGTGRTGQLTWTRLPQGFKNSPTIFNEALHRDLANFRIQHPQVTLLQYVDDLLLAGATKQDCLEGTKALLLELSDLGYRASAKKAQICRREVTYLGYSLRDGQRWLTEARKKTVVQIPAPTTAKQVREFLGKAGFCRLFIPGFATLAAPLYPLTKPKGEFSWAPEHQKAFDAIKKALLSAPALALPDVTKPFTLYVDERKGVARGVLTQTLGPWRRPVAYLSKKLDPVASGWPVCLKAIAAVAILVKDADKLTLGQNITVIAPHALENIVRQPPDRWMTNARMTHYQSLLLTERVTFAPPAALNPATLLPEETDEPVTHDCHQLLIEETGVRKDLTDIPLTGEVLTWFTDGSSYVVEGKRMAGAAVVDGTRTIWASSLPEGTSAQKAELMALTQALRLAEGKSINIYTDSRYAFATAHVHGAIYKQRGWLTSAGREIKNKEEILSLLEALHLPKRLAIIHCPGHQKAKDPISRGNQMADRVAKQAAQGVNLLPAGKRTADGSEFEKRTADGSEFESPKKKAKVE

SEQ ID NO: 215 - protein, 2097 aa, synthetic construct; identical to SEQ ID NO: 46

SEQ ID NO: 216 - protein, 2092 aa, synthetic construct; identical to SEQ ID NO: 51

SEQ ID NO: 217 - protein, 2088 aa, synthetic construct
MPAAKRVKLDGGDKKYSIGLDIGTNSVGWAVITDEYKVPSKKFKVLGNTDRHSIKKNLIGALLFDSGETAEATRLKRTARRRYTRRKNRICYLQEIFSNEMAKVDDSFFHRLEESFLVEEDKKHERHPIFGNIVDEVAYHEKYPTIYHLRKKLVDSTDKADLRLIYLALAHMIKFRGHFLIEGDLNPDNSDVDKLFIQLVQTYNQLFEENPINASGVDAKAILSARLSKSRRLENLIAQLPGEKKNGLFGNLIALSLGLTPNFKSNFDLAEDAKLQLSKDTYDDDLDNLLAQIGDQYADLFLAAKNLSDAILLSDILRVNTEITKAPLSASMIKRYDEHHQDLTLLKALVRQQLPEKYKEIFFDQSKNGYAGYIDGGASQEEFYKFIKPILEKMDGTEELLVKLNREDLLRKQRTFDNGSIPHQIHLGELHAILRRQEDFYPFLKDNREKIEKILTFRIPYYVGPLARGNSRFAWMTRKSEETITPWNFEEVVDKGASAQSFIERMTNFDKNLPNEKVLPKHSLLYEYFTVYNELTKVKYVTEGMRKPAFLSGEQKKAIVDLLFKTNRKVTVKQLKEDYFKKIECFDSVEISGVEDRFNASLGTYHDLLKIIKDKDFLDNEENEDILEDIVLTLTLFEDREMIEERLKTYAHLFDDKVMKQLKRRRYTGWGRLSRKLINGIRDKQSGKTILDFLKSDGFANRNFMQLIHDDSLTFKEDIQKAQVSGQGDSLHEHIANLAGSPAIKKGILQTVKVVDELVKVMGRHKPENIVIEMARENQTTQKGQKNSRERMKRIEEGIKELGSQILKEHPVENTQLQNEKLYLYYLQNGRDMYVDQELDINRLSDYDVDHIVPQSFLKDDSIDNKVLTRSDKARGKSDNVPSEEVVKKMKNYWRQLLNAKLITQRKFDNLTKAERGGLSELDKAGFIKRQLVETRQITKHVAQILDSRMNTKYDENDKLIREVKVITLKSKLVSDFRKDFQFYKVREINNYHHAHDAYLNAVVGTALIKKYPKLESEFVYGDYKVYDVRKMIAKSEQEIGKATAKYFFYSNIMNFFKTEITLANGEIRKRPLIETNGETGEIVWDKGRDFATVRKVLSMPQVNIVKKTEVQTGGFSKESILPKRNSDKLIARKKDWDPKKYGGFDSPTVAYSVLVVAKVEKGKSKKLKSVKELLGITIMERSSFEKNPIDFLEAKGYKEVKKDLIIKLPKYSLFELENGRKRMLASAGELQKGNELALPSKYVNFLYLASHYEKLKGSPEDNEQKQLFVEQHKHYLDEIIEQISEFSKRVILADANLDKVLSAYNKHRDKPIREQAENIIHLFTLTNLGAPAAFKYFDTTIDRKRYTSTKEVLDATLIHQSITGLYETRIDLSQLGGDGGPAPGGSEAAAKGGLDDEYRLYSPLVKPDQNIQFWLEQFPQAWAETAGMGLAKQVPPQVIQLKASATPVSVRQYPLSKEAQEGIRPHVQRLIQQGILVPVQSPWNTPLLPVRKPGTNDYRPVQDLREVNKRVQDIHPTVPNPYNLLCALPPQRSWYTVLDLKDAFFCLRLHPTSQPLFAFEWRDPGTGRTGQLTWTRLPQGFKNSPTIFNEALHRDLANFRIQHPQVTLLQYVDDLLLAGATKQDCLEGTKALLLELSDLGYRASAKKAQICRREVTYLGYSLRDGQRWLTEARKKTVVQIPAPTTAKQVREFLGKAGFCRLFIPGFATLAAPLYPLTKPKGEFSWAPEHQKAFDAIKKALLSAPALALPDVTKPFTLYVDERKGVARGVLTQTLGPWRRPVAYLSKKLDPVASGWPVCLKAIAAVAILVKDADKLTLGQNITVIAPHALENIVRQPPDRWMTNARMTHYQSLLLTERVTFAPPAALNPATLLPEETDEPVTHDCHQLLIEETGVRKDLTDIPLTGEVLTWFTDGSSYVVEGKRMAGAAVVDGTRTIWASSLPEGTSAQKAELMALTQALRLAEGKSINIYTDSRYAFATAHVHGAIYKQRGWLTSAGREIKNKEEILSLLEALHLPKRLAIIHCPGHQKAKDPISRGNQMADRVAKQAAQGVNLLPAGKRTADGSEFEKRTADGSEFESPKKKAKVE

SEQ ID NO: 218 - protein, 2082 aa, synthetic construct; identical to SEQ ID NO: 70

SEQ ID NO: 219 - protein, 2085 aa, synthetic construct; identical to SEQ ID NO: 48

SEQ ID NO: 220 - protein, 2086 aa, synthetic construct
MPAAKRVKLDGGDKKYSIGLDIGTNSVGWAVITDEYKVPSKKFKVLGNTDRHSIKKNLIGALLFDSGETAEATRLKRTARRRYTRRKNRICYLQEIFSNEMAKVDDSFFHRLEESFLVEEDKKHERHPIFGNIVDEVAYHEKYPTIYHLRKKLVDSTDKADLRLIYLALAHMIKFRGHFLIEGDLNPDNSDVDKLFIQLVQTYNQLFEENPINASGVDAKAILSARLSKSRRLENLIAQLPGEKKNGLFGNLIALSLGLTPNFKSNFDLAEDAKLQLSKDTYDDDLDNLLAQIGDQYADLFLAAKNLSDAILLSDILRVNTEITKAPLSASMIKRYDEHHQDLTLLKALVRQQLPEKYKEIFFDQSKNGYAGYIDGGASQEEFYKFIKPILEKMDGTEELLVKLNREDLLRKQRTFDNGSIPHQIHLGELHAILRRQEDFYPFLKDNREKIEKILTFRIPYYVGPLARGNSRFAWMTRKSEETITPWNFEEVVDKGASAQSFIERMTNFDKNLPNEKVLPKHSLLYEYFTVYNELTKVKYVTEGMRKPAFLSGEQKKAIVDLLFKTNRKVTVKQLKEDYFKKIECFDSVEISGVEDRFNASLGTYHDLLKIIKDKDFLDNEENEDILEDIVLTLTLFEDREMIEERLKTYAHLFDDKVMKQLKRRRYTGWGRLSRKLINGIRDKQSGKTILDFLKSDGFANRNFMQLIHDDSLTFKEDIQKAQVSGQGDSLHEHIANLAGSPAIKKGILQTVKVVDELVKVMGRHKPENIVIEMARENQTTQKGQKNSRERMKRIEEGIKELGSQILKEHPVENTQLQNEKLYLYYLQNGRDMYVDQELDINRLSDYDVDHIVPQSFLKDDSIDNKVLTRSDKARGKSDNVPSEEVVKKMKNYWRQLLNAKLITQRKFDNLTKAERGGLSELDKAGFIKRQLVETRQITKHVAQILDSRMNTKYDENDKLIREVKVITLKSKLVSDFRKDFQFYKVREINNYHHAHDAYLNAVVGTALIKKYPKLESEFVYGDYKVYDVRKMIAKSEQEIGKATAKYFFYSNIMNFFKTEITLANGEIRKRPLIETNGETGEIVWDKGRDFATVRKVLSMPQVNIVKKTEVQTGGFSKESILPKRNSDKLIARKKDWDPKKYGGFDSPTVAYSVLVVAKVEKGKSKKLKSVKELLGITIMERSSFEKNPIDFLEAKGYKEVKKDLIIKLPKYSLFELENGRKRMLASAGELQKGNELALPSKYVNFLYLASHYEKLKGSPEDNEQKQLFVEQHKHYLDEIIEQISEFSKRVILADANLDKVLSAYNKHRDKPIREQAENIIHLFTLTNLGAPAAFKYFDTTIDRKRYTSTKEVLDATLIHQSITGLYETRIDLSQLGGDGGGGGPAPGSSGGLDDEYRLYSPLVKPDQNIQFWLEQFPQAWAETAGMGLAKQVPPQVIQLKASATPVSVRQYPLSKEAQEGIRPHVQRLIQQGILVPVQSPWNTPLLPVRKPGTNDYRPVQDLREVNKRVQDIHPTVPNPYNLLCALPPQRSWYTVLDLKDAFFCLRLHPTSQPLFAFEWRDPGTGRTGQLTWTRLPQGFKNSPTIFNEALHRDLANFRIQHPQVTLLQYVDDLLLAGATKQDCLEGTKALLLELSDLGYRASAKKAQICRREVTYLGYSLRDGQRWLTEARKKTVVQIPAPTTAKQVREFLGKAGFCRLFIPGFATLAAPLYPLTKPKGEFSWAPEHQKAFDAIKKALLSAPALALPDVTKPFTLYVDERKGVARGVLTQTLGPWRRPVAYLSKKLDPVASGWPVCLKAIAAVAILVKDADKLTLGQNITVIAPHALENIVRQPPDRWMTNARMTHYQSLLLTERVTFAPPAALNPATLLPEETDEPVTHDCHQLLIEETGVRKDLTDIPLTGEVLTWFTDGSSYVVEGKRMAGAAVVDGTRTIWASSLPEGTSAQKAELMALTQALRLAEGKSINIYTDSRYAFATAHVHGAIYKQRGWLTSAGREIKNKEEILSLLEALHLPKRLAIIHCPGHQKAKDPISRGNQMADRVAKQAAQGVNLLPAGKRTADGSEFEKRTADGSEFESPKKKAKVE

SEQ ID NO: 221 - protein, 2085 aa, synthetic construct
MPAAKRVKLDGGDKKYSIGLDIGTNSVGWAVITDEYKVPSKKFKVLGNTDRHSIKKNLIGALLFDSGETAEATRLKRTARRRYTRRKNRICYLQEIFSNEMAKVDDSFFHRLEESFLVEEDKKHERHPIFGNIVDEVAYHEKYPTIYHLRKKLVDSTDKADLRLIYLALAHMIKFRGHFLIEGDLNPDNSDVDKLFIQLVQTYNQLFEENPINASGVDAKAILSARLSKSRRLENLIAQLPGEKKNGLFGNLIALSLGLTPNFKSNFDLAEDAKLQLSKDTYDDDLDNLLAQIGDQYADLFLAAKNLSDAILLSDILRVNTEITKAPLSASMIKRYDEHHQDLTLLKALVRQQLPEKYKEIFFDQSKNGYAGYIDGGASQEEFYKFIKPILEKMDGTEELLVKLNREDLLRKQRTFDNGSIPHQIHLGELHAILRRQEDFYPFLKDNREKIEKILTFRIPYYVGPLARGNSRFAWMTRKSEETITPWNFEEVVDKGASAQSFIERMTNFDKNLPNEKVLPKHSLLYEYFTVYNELTKVKYVTEGMRKPAFLSGEQKKAIVDLLFKTNRKVTVKQLKEDYFKKIECFDSVEISGVEDRFNASLGTYHDLLKIIKDKDFLDNEENEDILEDIVLTLTLFEDREMIEERLKTYAHLFDDKVMKQLKRRRYTGWGRLSRKLINGIRDKQSGKTILDFLKSDGFANRNFMQLIHDDSLTFKEDIQKAQVSGQGDSLHEHIANLAGSPAIKKGILQTVKVVDELVKVMGRHKPENIVIEMARENQTTQKGQKNSRERMKRIEEGIKELGSQILKEHPVENTQLQNEKLYLYYLQNGRDMYVDQELDINRLSDYDVDHIVPQSFLKDDSIDNKVLTRSDKARGKSDNVPSEEVVKKMKNYWRQLLNAKLITQRKFDNLTKAERGGLSELDKAGFIKRQLVETRQITKHVAQILDSRMNTKYDENDKLIREVKVITLKSKLVSDFRKDFQFYKVREINNYHHAHDAYLNAVVGTALIKKYPKLESEFVYGDYKVYDVRKMIAKSEQEIGKATAKYFFYSNIMNFFKTEITLANGEIRKRPLIETNGETGEIVWDKGRDFATVRKVLSMPQVNIVKKTEVQTGGFSKESILPKRNSDKLIARKKDWDPKKYGGFDSPTVAYSVLVVAKVEKGKSKKLKSVKELLGITIMERSSFEKNPIDFLEAKGYKEVKKDLIIKLPKYSLFELENGRKRMLASAGELQKGNELALPSKYVNFLYLASHYEKLKGSPEDNEQKQLFVEQHKHYLDEIIEQISEFSKRVILADANLDKVLSAYNKHRDKPIREQAENIIHLFTLTNLGAPAAFKYFDTTIDRKRYTSTKEVLDATLIHQSITGLYETRIDLSQLGGDGGEAAAKGGSGGLDDEYRLYSPLVKPDQNIQFWLEQFPQAWAETAGMGLAKQVPPQVIQLKASATPVSVRQYPLSKEAQEGIRPHVQRLIQQGILVPVQSPWNTPLLPVRKPGTNDYRPVQDLREVNKRVQDIHPTVPNPYNLLCALPPQRSWYTVLDLKDAFFCLRLHPTSQPLFAFEWRDPGTGRTGQLTWTRLPQGFKNSPTIFNEALHRDLANFRIQHPQVTLLQYVDDLLLAGATKQDCLEGTKALLLELSDLGYRASAKKAQICRREVTYLGYSLRDGQRWLTEARKKTVVQIPAPTTAKQVREFLGKAGFCRLFIPGFATLAAPLYPLTKPKGEFSWAPEHQKAFDAIKKALLSAPALALPDVTKPFTLYVDERKGVARGVLTQTLGPWRRPVAYLSKKLDPVASGWPVCLKAIAAVAILVKDADKLTLGQNITVIAPHALENIVRQPPDRWMTNARMTHYQSLLLTERVTFAPPAALNPATLLPEETDEPVTHDCHQLLIEETGVRKDLTDIPLTGEVLTWFTDGSSYVVEGKRMAGAAVVDGTRTIWASSLPEGTSAQKAELMALTQALRLAEGKSINIYTDSRYAFATAHVHGAIYKQRGWLTSAGREIKNKEEILSLLEALHLPKRLAIIHCPGHQKAKDPISRGNQMADRVAKQAAQGVNLLPAGKRTADGSEFEKRTADGSEFESPKKKAKVE

SEQ ID NO: 222 - protein, 2083 aa, synthetic construct
MPAAKRVKLDGGDKKYSIGLDIGTNSVGWAVITDEYKVPSKKFKVLGNTDRHSIKKNLIGALLFDSGETAEATRLKRTARRRYTRRKNRICYLQEIFSNEMAKVDDSFFHRLEESFLVEEDKKHERHPIFGNIVDEVAYHEKYPTIYHLRKKLVDSTDKADLRLIYLALAHMIKFRGHFLIEGDLNPDNSDVDKLFIQLVQTYNQLFEENPINASGVDAKAILSARLSKSRRLENLIAQLPGEKKNGLFGNLIALSLGLTPNFKSNFDLAEDAKLQLSKDTYDDDLDNLLAQIGDQYADLFLAAKNLSDAILLSDILRVNTEITKAPLSASMIKRYDEHHQDLTLLKALVRQQLPEKYKEIFFDQSKNGYAGYIDGGASQEEFYKFIKPILEKMDGTEELLVKLNREDLLRKQRTFDNGSIPHQIHLGELHAILRRQEDFYPFLKDNREKIEKILTFRIPYYVGPLARGNSRFAWMTRKSEETITPWNFEEVVDKGASAQSFIERMTNFDKNLPNEKVLPKHSLLYEYFTVYNELTKVKYVTEGMRKPAFLSGEQKKAIVDLLFKTNRKVTVKQLKEDYFKKIECFDSVEISGVEDRFNASLGTYHDLLKIIKDKDFLDNEENEDILEDIVLTLTLFEDREMIEERLKTYAHLFDDKVMKQLKRRRYTGWGRLSRKLINGIRDKQSGKTILDFLKSDGFANRNFMQLIHDDSLTFKEDIQKAQVSGQGDSLHEHIANLAGSPAIKKGILQTVKVVDELVKVMGRHKPENIVIEMARENQTTQKGQKNSRERMKRIEEGIKELGSQILKEHPVENTQLQNEKLYLYYLQNGRDMYVDQELDINRLSDYDVDHIVPQSFLKDDSIDNKVLTRSDKARGKSDNVPSEEVVKKMKNYWRQLLNAKLITQRKFDNLTKAERGGLSELDKAGFIKRQLVETRQITKHVAQILDSRMNTKYDENDKLIREVKVITLKSKLVSDFRKDFQFYKVREINNYHHAHDAYLNAVVGTALIKKYPKLESEFVYGDYKVYDVRKMIAKSEQEIGKATAKYFFYSNIMNFFKTEITLANGEIRKRPLIETNGETGEIVWDKGRDFATVRKVLSMPQVNIVKKTEVQTGGFSKESILPKRNSDKLIARKKDWDPKKYGGFDSPTVAYSVLVVAKVEKGKSKKLKSVKELLGITIMERSSFEKNPIDFLEAKGYKEVKKDLIIKLPKYSLFELENGRKRMLASAGELQKGNELALPSKYVNFLYLASHYEKLKGSPEDNEQKQLFVEQHKHYLDEIIEQISEFSKRVILADANLDKVLSAYNKHRDKPIREQAENIIHLFTLTNLGAPAAFKYFDTTIDRKRYTSTKEVLDATLIHQSITGLYETRIDLSQLGGDGGGGSGGGGGLDDEYRLYSPLVKPDQNIQFWLEQFPQAWAETAGMGLAKQVPPQVIQLKASATPVSVRQYPLSKEAQEGIRPHVQRLIQQGILVPVQSPWNTPLLPVRKPGTNDYRPVQDLREVNKRVQDIHPTVPNPYNLLCALPPQRSWYTVLDLKDAFFCLRLHPTSQPLFAFEWRDPGTGRTGQLTWTRLPQGFKNSPTIFNEALHRDLANFRIQHPQVTLLQYVDDLLLAGATKQDCLEGTKALLLELSDLGYRASAKKAQICRREVTYLGYSLRDGQRWLTEARKKTVVQIPAPTTAKQVREFLGKAGFCRLFIPGFATLAAPLYPLTKPKGEFSWAPEHQKAFDAIKKALLSAPALALPDVTKPFTLYVDERKGVARGVLTQTLGPWRRPVAYLSKKLDPVASGWPVCLKAIAAVAILVKDADKLTLGQNITVIAPHALENIVRQPPDRWMTNARMTHYQSLLLTERVTFAPPAALNPATLLPEETDEPVTHDCHQLLIEETGVRKDLTDIPLTGEVLTWFTDGSSYVVEGKRMAGAAVVDGTRTIWASSLPEGTSAQKAELMALTQALRLAEGKSINIYTDSRYAFATAHVHGAIYKQRGWLTSAGREIKNKEEILSLLEALHLPKRLAIIHCPGHQKAKDPISRGNQMADRVAKQAAQGVNLLPAGKRTADGSEFEKRTADGSEFESPKKKAKVE

SEQ ID NO: 223 - protein, 2083 aa, synthetic construct; identical to SEQ ID NO: 47

SEQ ID NO: 224 - protein, 2088 aa, synthetic construct
MPAAKRVKLDGGDKKYSIGLDIGTNSVGWAVITDEYKVPSKKFKVLGNTDRHSIKKNLIGALLFDSGETAEATRLKRTARRRYTRRKNRICYLQEIFSNEMAKVDDSFFHRLEESFLVEEDKKHERHPIFGNIVDEVAYHEKYPTIYHLRKKLVDSTDKADLRLIYLALAHMIKFRGHFLIEGDLNPDNSDVDKLFIQLVQTYNQLFEENPINASGVDAKAILSARLSKSRRLENLIAQLPGEKKNGLFGNLIALSLGLTPNFKSNFDLAEDAKLQLSKDTYDDDLDNLLAQIGDQYADLFLAAKNLSDAILLSDILRVNTEITKAPLSASMIKRYDEHHQDLTLLKALVRQQLPEKYKEIFFDQSKNGYAGYIDGGASQEEFYKFIKPILEKMDGTEELLVKLNREDLLRKQRTFDNGSIPHQIHLGELHAILRRQEDFYPFLKDNREKIEKILTFRIPYYVGPLARGNSRFAWMTRKSEETITPWNFEEVVDKGASAQSFIERMTNFDKNLPNEKVLPKHSLLYEYFTVYNELTKVKYVTEGMRKPAFLSGEQKKAIVDLLFKTNRKVTVKQLKEDYFKKIECFDSVEISGVEDRFNASLGTYHDLLKIIKDKDFLDNEENEDILEDIVLTLTLFEDREMIEERLKTYAHLFDDKVMKQLKRRRYTGWGRLSRKLINGIRDKQSGKTILDFLKSDGFANRNFMQLIHDDSLTFKEDIQKAQVSGQGDSLHEHIANLAGSPAIKKGILQTVKVVDELVKVMGRHKPENIVIEMARENQTTQKGQKNSRERMKRIEEGIKELGSQILKEHPVENTQLQNEKLYLYYLQNGRDMYVDQELDINRLSDYDVDHIVPQSFLKDDSIDNKVLTRSDKARGKSDNVPSEEVVKKMKNYWRQLLNAKLITQRKFDNLTKAERGGLSELDKAGFIKRQLVETRQITKHVAQILDSRMNTKYDENDKLIREVKVITLKSKLVSDFRKDFQFYKVREINNYHHAHDAYLNAVVGTALIKKYPKLESEFVYGDYKVYDVRKMIAKSEQEIGKATAKYFFYSNIMNFFKTEITLANGEIRKRPLIETNGETGEIVWDKGRDFATVRKVLSMPQVNIVKKTEVQTGGFSKESILPKRNSDKLIARKKDWDPKKYGGFDSPTVAYSVLVVAKVEKGKSKKLKSVKELLGITIMERSSFEKNPIDFLEAKGYKEVKKDLIIKLPKYSLFELENGRKRMLASAGELQKGNELALPSKYVNFLYLASHYEKLKGSPEDNEQKQLFVEQHKHYLDEIIEQISEFSKRVILADANLDKVLSAYNKHRDKPIREQAENIIHLFTLTNLGAPAAFKYFDTTIDRKRYTSTKEVLDATLIHQSITGLYETRIDLSQLGGDGGEAAAKPAPGSSGGLDDEYRLYSPLVKPDQNIQFWLEQFPQAWAETAGMGLAKQVPPQVIQLKASATPVSVRQYPLSKEAQEGIRPHVQRLIQQGILVPVQSPWNTPLLPVRKPGTNDYRPVQDLREVNKRVQDIHPTVPNPYNLLCALPPQRSWYTVLDLKDAFFCLRLHPTSQPLFAFEWRDPGTGRTGQLTWTRLPQGFKNSPTIFNEALHRDLANFRIQHPQVTLLQYVDDLLLAGATKQDCLEGTKALLLELSDLGYRASAKKAQICRREVTYLGYSLRDGQRWLTEARKKTVVQIPAPTTAKQVREFLGKAGFCRLFIPGFATLAAPLYPLTKPKGEFSWAPEHQKAFDAIKKALLSAPALALPDVTKPFTLYVDERKGVARGVLTQTLGPWRRPVAYLSKKLDPVASGWPVCLKAIAAVAILVKDADKLTLGQNITVIAPHALENIVRQPPDRWMTNARMTHYQSLLLTERVTFAPPAALNPATLLPEETDEPVTHDCHQLLIEETGVRKDLTDIPLTGEVLTWFTDGSSYVVEGKRMAGAAVVDGTRTIWASSLPEGTSAQKAELMALTQALRLAEGKSINIYTDSRYAFATAHVHGAIYKQRGWLTSAGREIKNKEEILSLLEALHLPKRLAIIHCPGHQKAKDPISRGNQMADRVAKQAAQGVNLLPAGKRTADGSEFEKRTADGSEFESPKKKAKVE

SEQ ID NO: 225 - protein, 2088 aa, synthetic construct
MPAAKRVKLDGGDKKYSIGLDIGTNSVGWAVITDEYKVPSKKFKVLGNTDRHSIKKNLIGALLFDSGETAEATRLKRTARRRYTRRKNRICYLQEIFSNEMAKVDDSFFHRLEESFLVEEDKKHERHPIFGNIVDEVAYHEKYPTIYHLRKKLVDSTDKADLRLIYLALAHMIKFRGHFLIEGDLNPDNSDVDKLFIQLVQTYNQLFEENPINASGVDAKAILSARLSKSRRLENLIAQLPGEKKNGLFGNLIALSLGLTPNFKSNFDLAEDAKLQLSKDTYDDDLDNLLAQIGDQYADLFLAAKNLSDAILLSDILRVNTEITKAPLSASMIKRYDEHHQDLTLLKALVRQQLPEKYKEIFFDQSKNGYAGYIDGGASQEEFYKFIKPILEKMDGTEELLVKLNREDLLRKQRTFDNGSIPHQIHLGELHAILRRQEDFYPFLKDNREKIEKILTFRIPYYVGPLARGNSRFAWMTRKSEETITPWNFEEVVDKGASAQSFIERMTNFDKNLPNEKVLPKHSLLYEYFTVYNELTKVKYVTEGMRKPAFLSGEQKKAIVDLLFKTNRKVTVKQLKEDYFKKIECFDSVEISGVEDRFNASLGTYHDLLKIIKDKDFLDNEENEDILEDIVLTLTLFEDREMIEERLKTYAHLFDDKVMKQLKRRRYTGWGRLSRKLINGIRDKQSGKTILDFLKSDGFANRNFMQLIHDDSLTFKEDIQKAQVSGQGDSLHEHIANLAGSPAIKKGILQTVKVVDELVKVMGRHKPENIVIEMARENQTTQKGQKNSRERMKRIEEGIKELGSQILKEHPVENTQLQNEKLYLYYLQNGRDMYVDQELDINRLSDYDVDHIVPQSFLKDDSIDNKVLTRSDKARGKSDNVPSEEVVKKMKNYWRQLLNAKLITQRKFDNLTKAERGGLSELDKAGFIKRQLVETRQITKHVAQILDSRMNTKYDENDKLIREVKVITLKSKLVSDFRKDFQFYKVREINNYHHAHDAYLNAVVGTALIKKYPKLESEFVYGDYKVYDVRKMIAKSEQEIGKATAKYFFYSNIMNFFKTEITLANGEIRKRPLIETNGETGEIVWDKGRDFATVRKVLSMPQVNIVKKTEVQTGGFSKESILPKRNSDKLIARKKDWDPKKYGGFDSPTVAYSVLVVAKVEKGKSKKLKSVKELLGITIMERSSFEKNPIDFLEAKGYKEVKKDLIIKLPKYSLFELENGRKRMLASAGELQKGNELALPSKYVNFLYLASHYEKLKGSPEDNEQKQLFVEQHKHYLDEIIEQISEFSKRVILADANLDKVLSAYNKHRDKPIREQAENIIHLFTLTNLGAPAAFKYFDTTIDRKRYTSTKEVLDATLIHQSITGLYETRIDLSQLGGDGGPAPGSSEAAAKGGLDDEYRLYSPLVKPDQNIQFWLEQFPQAWAETAGMGLAKQVPPQVIQLKASATPVSVRQYPLSKEAQEGIRPHVQRLIQQGILVPVQSPWNTPLLPVRKPGTNDYRPVQDLREVNKRVQDIHPTVPNPYNLLCALPPQRSWYTVLDLKDAFFCLRLHPTSQPLFAFEWRDPGTGRTGQLTWTRLPQGFKNSPTIFNEALHRDLANFRIQHPQVTLLQYVDDLLLAGATKQDCLEGTKALLLELSDLGYRASAKKAQICRREVTYLGYSLRDGQRWLTEARKKTVVQIPAPTTAKQVREFLGKAGFCRLFIPGFATLAAPLYPLTKPKGEFSWAPEHQKAFDAIKKALLSAPALALPDVTKPFTLYVDERKGVARGVLTQTLGPWRRPVAYLSKKLDPVASGWPVCLKAIAAVAILVKDADKLTLGQNITVIAPHALENIVRQPPDRWMTNARMTHYQSLLLTERVTFAPPAALNPATLLPEETDEPVTHDCHQLLIEETGVRKDLTDIPLTGEVLTWFTDGSSYVVEGKRMAGAAVVDGTRTIWASSLPEGTSAQKAELMALTQALRLAEGKSINIYTDSRYAFATAHVHGAIYKQRGWLTSAGREIKNKEEILSLLEALHLPKRLAIIHCPGHQKAKDPISRGNQMADRVAKQAAQGVNLLPAGKRTADGSEFEKRTADGSEFESPKKKAKVE

SEQ ID NO: 226 - protein, 2086 aa, synthetic construct
MPAAKRVKLDGGDKKYSIGLDIGTNSVGWAVITDEYKVPSKKFKVLGNTDRHSIKKNLIGALLFDSGETAEATRLKRTARRRYTRRKNRICYLQEIFSNEMAKVDDSFFHRLEESFLVEEDKKHERHPIFGNIVDEVAYHEKYPTIYHLRKKLVDSTDKADLRLIYLALAHMIKFRGHFLIEGDLNPDNSDVDKLFIQLVQTYNQLFEENPINASGVDAKAILSARLSKSRRLENLIAQLPGEKKNGLFGNLIALSLGLTPNFKSNFDLAEDAKLQLSKDTYDDDLDNLLAQIGDQYADLFLAAKNLSDAILLSDILRVNTEITKAPLSASMIKRYDEHHQDLTLLKALVRQQLPEKYKEIFFDQSKNGYAGYIDGGASQEEFYKFIKPILEKMDGTEELLVKLNREDLLRKQRTFDNGSIPHQIHLGELHAILRRQEDFYPFLKDNREKIEKILTFRIPYYVGPLARGNSRFAWMTRKSEETITPWNFEEVVDKGASAQSFIERMTNFDKNLPNEKVLPKHSLLYEYFTVYNELTKVKYVTEGMRKPAFLSGEQKKAIVDLLFKTNRKVTVKQLKEDYFKKIECFDSVEISGVEDRFNASLGTYHDLLKIIKDKDFLDNEENEDILEDIVLTLTLFEDREMIEERLKTYAHLFDDKVMKQLKRRRYTGWGRLSRKLINGIRDKQSGKTILDFLKSDGFANRNFMQLIHDDSLTFKEDIQKAQVSGQGDSLHEHIANLAGSPAIKKGILQTVKVVDELVKVMGRHKPENIVIEMARENQTTQKGQKNSRERMKRIEEGIKELGSQILKEHPVENTQLQNEKLYLYYLQNGRDMYVDQELDINRLSDYDVDHIVPQSFLKDDSIDNKVLTRSDKARGKSDNVPSEEVVKKMKNYWRQLLNAKLITQRKFDNLTKAERGGLSELDKAGFIKRQLVETRQITKHVAQILDSRMNTKYDENDKLIREVKVITLKSKLVSDFRKDFQFYKVREINNYHHAHDAYLNAVVGTALIKKYPKLESEFVYGDYKVYDVRKMIAKSEQEIGKATAKYFFYSNIMNFFKTEITLANGEIRKRPLIETNGETGEIVWDKGRDFATVRKVLSMPQVNIVKKTEVQTGGFSKESILPKRNSDKLIARKKDWDPKKYGGFDSPTVAYSVLVVAKVEKGKSKKLKSVKELLGITIMERSSFEKNPIDFLEAKGYKEVKKDLIIKLPKYSLFELENGRKRMLASAGELQKGNELALPSKYVNFLYLASHYEKLKGSPEDNEQKQLFVEQHKHYLDEIIEQISEFSKRVILADANLDKVLSAYNKHRDKPIREQAENIIHLFTLTNLGAPAAFKYFDTTIDRKRYTSTKEVLDATLIHQSITGLYETRIDLSQLGGDGGGGSGGSGGSGGLDDEYRLYSPLVKPDQNIQFWLEQFPQAWAETAGMGLAKQVPPQVIQLKASATPVSVRQYPLSKEAQEGIRPHVQRLIQQGILVPVQSPWNTPLLPVRKPGTNDYRPVQDLREVNKRVQDIHPTVPNPYNLLCALPPQRSWYTVLDLKDAFFCLRLHPTSQPLFAFEWRDPGTGRTGQLTWTRLPQGFKNSPTIFNEALHRDLANFRIQHPQVTLLQYVDDLLLAGATKQDCLEGTKALLLELSDLGYRASAKKAQICRREVTYLGYSLRDGQRWLTEARKKTVVQIPAPTTAKQVREFLGKAGFCRLFIPGFATLAAPLYPLTKPKGEFSWAPEHQKAFDAIKKALLSAPALALPDVTKPFTLYVDERKGVARGVLTQTLGPWRRPVAYLSKKLDPVASGWPVCLKAIAAVAILVKDADKLTLGQNITVIAPHALENIVRQPPDRWMTNARMTHYQSLLLTERVTFAPPAALNPATLLPEETDEPVTHDCHQLLIEETGVRKDLTDIPLTGEVLTWFTDGSSYVVEGKRMAGAAVVDGTRTIWASSLPEGTSAQKAELMALTQALRLAEGKSINIYTDSRYAFATAHVHGAIYKQRGWLTSAGREIKNKEEILSLLEALHLPKRLAIIHCPGHQKAKDPISRGNQMADRVAKQAAQGVNLLPAGKRTADGSEFEKRTADGSEFESPKKKAKVE

SEQ ID NO: 227 - protein, 2083 aa, synthetic construct; identical to SEQ ID NO: 78

SEQ ID NO: 228 - protein, 2089 aa, synthetic construct; identical to SEQ ID NO: 41

SEQ ID NO: 229 - protein, 2088 aa, synthetic construct; identical to SEQ ID NO: 65

SEQ ID NO: 230 - protein, 2088 aa, synthetic construct; identical to SEQ ID NO: 80

SEQ ID NO: 231 - protein, 2088 aa, synthetic construct
MPAAKRVKLDGGDKKYSIGLDIGTNSVGWAVITDEYKVPSKKFKVLGNTDRHSIKKNLIGALLFDSGETAEATRLKRTARRRYTRRKNRICYLQEIFSNEMAKVDDSFFHRLEESFLVEEDKKHERHPIFGNIVDEVAYHEKYPTIYHLRKKLVDSTDKADLRLIYLALAHMIKFRGHFLIEGDLNPDNSDVDKLFIQLVQTYNQLFEENPINASGVDAKAILSARLSKSRRLENLIAQLPGEKKNGLFGNLIALSLGLTPNFKSNFDLAEDAKLQLSKDTYDDDLDNLLAQIGDQYADLFLAAKNLSDAILLSDILRVNTEITKAPLSASMIKRYDEHHQDLTLLKALVRQQLPEKYKEIFFDQSKNGYAGYIDGGASQEEFYKFIKPILEKMDGTEELLVKLNREDLLRKQRTFDNGSIPHQIHLGELHAILRRQEDFYPFLKDNREKIEKILTFRIPYYVGPLARGNSRFAWMTRKSEETITPWNFEEVVDKGASAQSFIERMTNFDKNLPNEKVLPKHSLLYEYFTVYNELTKVKYVTEGMRKPAFLSGEQKKAIVDLLFKTNRKVTVKQLKEDYFKKIECFDSVEISGVEDRFNASLGTYHDLLKIIKDKDFLDNEENEDILEDIVLTLTLFEDREMIEERLKTYAHLFDDKVMKQLKRRRYTGWGRLSRKLINGIRDKQSGKTILDFLKSDGFANRNFMQLIHDDSLTFKEDIQKAQVSGQGDSLHEHIANLAGSPAIKKGILQTVKVVDELVKVMGRHKPENIVIEMARENQTTQKGQKNSRERMKRIEEGIKELGSQILKEHPVENTQLQNEKLYLYYLQNGRDMYVDQELDINRLSDYDVDHIVPQSFLKDDSIDNKVLTRSDKARGKSDNVPSEEVVKKMKNYWRQLLNAKLITQRKFDNLTKAERGGLSELDKAGFIKRQLVETRQITKHVAQILDSRMNTKYDENDKLIREVKVITLKSKLVSDFRKDFQFYKVREINNYHHAHDAYLNAVVGTALIKKYPKLESEFVYGDYKVYDVRKMIAKSEQEIGKATAKYFFYSNIMNFFKTEITLANGEIRKRPLIETNGETGEIVWDKGRDFATVRKVLSMPQVNIVKKTEVQTGGFSKESILPKRNSDKLIARKKDWDPKKYGGFDSPTVAYSVLVVAKVEKGKSKKLKSVKELLGITIMERSSFEKNPIDFLEAKGYKEVKKDLIIKLPKYSLFELENGRKRMLASAGELQKGNELALPSKYVNFLYLASHYEKLKGSPEDNEQKQLFVEQHKHYLDEIIEQISEFSKRVILADANLDKVLSAYNKHRDKPIREQAENIIHLFTLTNLGAPAAFKYFDTTIDRKRYTSTKEVLDATLIHQSITGLYETRIDLSQLGGDGGEAAAKGGGGGSGGLDDEYRLYSPLVKPDQNIQFWLEQFPQAWAETAGMGLAKQVPPQVIQLKASATPVSVRQYPLSKEAQEGIRPHVQRLIQQGILVPVQSPWNTPLLPVRKPGTNDYRPVQDLREVNKRVQDIHPTVPNPYNLLCALPPQRSWYTVLDLKDAFFCLRLHPTSQPLFAFEWRDPGTGRTGQLTWTRLPQGFKNSPTIFNEALHRDLANFRIQHPQVTLLQYVDDLLLAGATKQDCLEGTKALLLELSDLGYRASAKKAQICRREVTYLGYSLRDGQRWLTEARKKTVVQIPAPTTAKQVREFLGKAGFCRLFIPGFATLAAPLYPLTKPKGEFSWAPEHQKAFDAIKKALLSAPALALPDVTKPFTLYVDERKGVARGVLTQTLGPWRRPVAYLSKKLDPVASGWPVCLKAIAAVAILVKDADKLTLGQNITVIAPHALENIVRQPPDRWMTNARMTHYQSLLLTERVTFAPPAALNPATLLPEETDEPVTHDCHQLLIEETGVRKDLTDIPLTGEVLTWFTDGSSYVVEGKRMAGAAVVDGTRTIWASSLPEGTSAQKAELMALTQALRLAEGKSINIYTDSRYAFATAHVHGAIYKQRGWLTSAGREIKNKEEILSLLEALHLPKRLAIIHCPGHQKAKDPISRGNQMADRVAKQAAQGVNLLPAGKRTADGSEFEKRTADGSEFESPKKKAKVE

SEQ ID NO: 232 - protein, 2102 aa, synthetic construct; identical to SEQ ID NO: 39

SEQ ID NO: 233 - protein, 2085 aa, synthetic construct
MPAAKRVKLDGGDKKYSIGLDIGTNSVGWAVITDEYKVPSKKFKVLGNTDRHSIKKNLIGALLFDSGETAEATRLKRTARRRYTRRKNRICYLQEIFSNEMAKVDDSFFHRLEESFLVEEDKKHERHPIFGNIVDEVAYHEKYPTIYHLRKKLVDSTDKADLRLIYLALAHMIKFRGHFLIEGDLNPDNSDVDKLFIQLVQTYNQLFEENPINASGVDAKAILSARLSKSRRLENLIAQLPGEKKNGLFGNLIALSLGLTPNFKSNFDLAEDAKLQLSKDTYDDDLDNLLAQIGDQYADLFLAAKNLSDAILLSDILRVNTEITKAPLSASMIKRYDEHHQDLTLLKALVRQQLPEKYKEIFFDQSKNGYAGYIDGGASQEEFYKFIKPILEKMDGTEELLVKLNREDLLRKQRTFDNGSIPHQIHLGELHAILRRQEDFYPFLKDNREKIEKILTFRIPYYVGPLARGNSRFAWMTRKSEETITPWNFEEVVDKGASAQSFIERMTNFDKNLPNEKVLPKHSLLYEYFTVYNELTKVKYVTEGMRKPAFLSGEQKKAIVDLLFKTNRKVTVKQLKEDYFKKIECFDSVEISGVEDRFNASLGTYHDLLKIIKDKDFLDNEENEDILEDIVLTLTLFEDREMIEERLKTYAHLFDDKVMKQLKRRRYTGWGRLSRKLINGIRDKQSGKTILDFLKSDGFANRNFMQLIHDDSLTFKEDIQKAQVSGQGDSLHEHIANLAGSPAIKKGILQTVKVVDELVKVMGRHKPENIVIEMARENQTTQKGQKNSRERMKRIEEGIKELGSQILKEHPVENTQLQNEKLYLYYLQNGRDMYVDQELDINRLSDYDVDHIVPQSFLKDDSIDNKVLTRSDKARGKSDNVPSEEVVKKMKNYWRQLLNAKLITQRKFDNLTKAERGGLSELDKAGFIKRQLVETRQITKHVAQILDSRMNTKYDENDKLIREVKVITLKSKLVSDFRKDFQFYKVREINNYHHAHDAYLNAVVGTALIKKYPKLESEFVYGDYKVYDVRKMIAKSEQEIGKATAKYFFYSNIMNFFKTEITLANGEIRKRPLIETNGETGEIVWDKGRDFATVRKVLSMPQVNIVKKTEVQTGGFSKESILPKRNSDKLIARKKDWDPKKYGGFDSPTVAYSVLVVAKVEKGKSKKLKSVKELLGITIMERSSFEKNPIDFLEAKGYKEVKKDLIIKLPKYSLFELENGRKRMLASAGELQKGNELALPSKYVNFLYLASHYEKLKGSPEDNEQKQLFVEQHKHYLDEIIEQISEFSKRVILADANLDKVLSAYNKHRDKPIREQAENIIHLFTLTNLGAPAAFKYFDTTIDRKRYTSTKEVLDATLIHQSITGLYETRIDLSQLGGDGGEAAAKPAPGGLDDEYRLYSPLVKPDQNIQFWLEQFPQAWAETAGMGLAKQVPPQVIQLKASATPVSVRQYPLSKEAQEGIRPHVQRLIQQGILVPVQSPWNTPLLPVRKPGTNDYRPVQDLREVNKRVQDIHPTVPNPYNLLCALPPQRSWYTVLDLKDAFFCLRLHPTSQPLFAFEWRDPGTGRTGQLTWTRLPQGFKNSPTIFNEALHRDLANFRIQHPQVTLLQYVDDLLLAGATKQDCLEGTKALLLELSDLGYRASAKKAQICRREVTYLGYSLRDGQRWLTEARKKTVVQIPAPTTAKQVREFLGKAGFCRLFIPGFATLAAPLYPLTKPKGEFSWAPEHQKAFDAIKKALLSAPALALPDVTKPFTLYVDERKGVARGVLTQTLGPWRRPVAYLSKKLDPVASGWPVCLKAIAAVAILVKDADKLTLGQNITVIAPHALENIVRQPPDRWMTNARMTHYQSLLLTERVTFAPPAALNPATLLPEETDEPVTHDCHQLLIEETGVRKDLTDIPLTGEVLTWFTDGSSYVVEGKRMAGAAVVDGTRTIWASSLPEGTSAQKAELMALTQALRLAEGKSINIYTDSRYAFATAHVHGAIYKQRGWLTSAGREIKNKEEILSLLEALHLPKRLAIIHCPGHQKAKDPISRGNQMADRVAKQAAQGVNLLPAGKRTADGSEFEKRTADGSEFESPKKKAKVE

SEQ ID NO: 234 - protein, 2092 aa, synthetic construct; identical to SEQ ID NO: 56

SEQ ID NO: 235 - protein, 2083 aa, synthetic construct
MPAAKRVKLDGGDKKYSIGLDIGTNSVGWAVITDEYKVPSKKFKVLGNTDRHSIKKNLIGALLFDSGETAEATRLKRTARRRYTRRKNRICYLQEIFSNEMAKVDDSFFHRLEESFLVEEDKKHERHPIFGNIVDEVAYHEKYPTIYHLRKKLVDSTDKADLRLIYLALAHMIKFRGHFLIEGDLNPDNSDVDKLFIQLVQTYNQLFEENPINASGVDAKAILSARLSKSRRLENLIAQLPGEKKNGLFGNLIALSLGLTPNFKSNFDLAEDAKLQLSKDTYDDDLDNLLAQIGDQYADLFLAAKNLSDAILLSDILRVNTEITKAPLSASMIKRYDEHHQDLTLLKALVRQQLPEKYKEIFFDQSKNGYAGYIDGGASQEEFYKFIKPILEKMDGTEELLVKLNREDLLRKQRTFDNGSIPHQIHLGELHAILRRQEDFYPFLKDNREKIEKILTFRIPYYVGPLARGNSRFAWMTRKSEETITPWNFEEVVDKGASAQSFIERMTNFDKNLPNEKVLPKHSLLYEYFTVYNELTKVKYVTEGMRKPAFLSGEQKKAIVDLLFKTNRKVTVKQLKEDYFKKIECFDSVEISGVEDRFNASLGTYHDLLKIIKDKDFLDNEENEDILEDIVLTLTLFEDREMIEERLKTYAHLFDDKVMKQLKRRRYTGWGRLSRKLINGIRDKQSGKTILDFLKSDGFANRNFMQLIHDDSLTFKEDIQKAQVSGQGDSLHEHIANLAGSPAIKKGILQTVKVVDELVKVMGRHKPENIVIEMARENQTTQKGQKNSRERMKRIEEGIKELGSQILKEHPVENTQLQNEKLYLYYLQNGRDMYVDQELDINRLSDYDVDHIVPQSFLKDDSIDNKVLTRSDKARGKSDNVPSEEVVKKMKNYWRQLLNAKLITQRKFDNLTKAERGGLSELDKAGFIKRQLVETRQITKHVAQILDSRMNTKYDENDKLIREVKVITLKSKLVSDFRKDFQFYKVREINNYHHAHDAYLNAVVGTALIKKYPKLESEFVYGDYKVYDVRKMIAKSEQEIGKATAKYFFYSNIMNFFKTEITLANGEIRKRPLIETNGETGEIVWDKGRDFATVRKVLSMPQVNIVKKTEVQTGGFSKESILPKRNSDKLIARKKDWDPKKYGGFDSPTVAYSVLVVAKVEKGKSKKLKSVKELLGITIMERSSFEKNPIDFLEAKGYKEVKKDLIIKLPKYSLFELENGRKRMLASAGELQKGNELALPSKYVNFLYLASHYEKLKGSPEDNEQKQLFVEQHKHYLDEIIEQISEFSKRVILADANLDKVLSAYNKHRDKPIREQAENIIHLFTLTNLGAPAAFKYFDTTIDRKRYTSTKEVLDATLIHQSITGLYETRIDLSQLGGDGGGSSGSSGGLDDEYRLYSPLVKPDQNIQFWLEQFPQAWAETAGMGLAKQVPPQVIQLKASATPVSVRQYPLSKEAQEGIRPHVQRLIQQGILVPVQSPWNTPLLPVRKPGTNDYRPVQDLREVNKRVQDIHPTVPNPYNLLCALPPQRSWYTVLDLKDAFFCLRLHPTSQPLFAFEWRDPGTGRTGQLTWTRLPQGFKNSPTIFNEALHRDLANFRIQHPQVTLLQYVDDLLLAGATKQDCLEGTKALLLELSDLGYRASAKKAQICRREVTYLGYSLRDGQRWLTEARKKTVVQIPAPTTAKQVREFLGKAGFCRLFIPGFATLAAPLYPLTKPKGEFSWAPEHQKAFDAIKKALLSAPALALPDVTKPFTLYVDERKGVARGVLTQTLGPWRRPVAYLSKKLDPVASGWPVCLKAIAAVAILVKDADKLTLGQNITVIAPHALENIVRQPPDRWMTNARMTHYQSLLLTERVTFAPPAALNPATLLPEETDEPVTHDCHQLLIEETGVRKDLTDIPLTGEVLTWFTDGSSYVVEGKRMAGAAVVDGTRTIWASSLPEGTSAQKAELMALTQALRLAEGKSINIYTDSRYAFATAHVHGAIYKQRGWLTSAGREIKNKEEILSLLEALHLPKRLAIIHCPGHQKAKDPISRGNQMADRVAKQAAQGVNLLPAGKRTADGSEFEKRTADGSEFESPKKKAKVE

SEQ ID NO: 236 - protein, 2089 aa, synthetic construct; identical to SEQ ID NO: 67

SEQ ID NO: 237 - protein, 2085 aa, synthetic construct
MPAAKRVKLDGGDKKYSIGLDIGTNSVGWAVITDEYKVPSKKFKVLGNTDRHSIKKNLIGALLFDSGETAEATRLKRTARRRYTRRKNRICYLQEIFSNEMAKVDDSFFHRLEESFLVEEDKKHERHPIFGNIVDEVAYHEKYPTIYHLRKKLVDSTDKADLRLIYLALAHMIKFRGHFLIEGDLNPDNSDVDKLFIQLVQTYNQLFEENPINASGVDAKAILSARLSKSRRLENLIAQLPGEKKNGLFGNLIALSLGLTPNFKSNFDLAEDAKLQLSKDTYDDDLDNLLAQIGDQYADLFLAAKNLSDAILLSDILRVNTEITKAPLSASMIKRYDEHHQDLTLLKALVRQQLPEKYKEIFFDQSKNGYAGYIDGGASQEEFYKFIKPILEKMDGTEELLVKLNREDLLRKQRTFDNGSIPHQIHLGELHAILRRQEDFYPFLKDNREKIEKILTFRIPYYVGPLARGNSRFAWMTRKSEETITPWNFEEVVDKGASAQSFIERMTNFDKNLPNEKVLPKHSLLYEYFTVYNELTKVKYVTEGMRKPAFLSGEQKKAIVDLLFKTNRKVTVKQLKEDYFKKIECFDSVEISGVEDRFNASLGTYHDLLKIIKDKDFLDNEENEDILEDIVLTLTLFEDREMIEERLKTYAHLFDDKVMKQLKRRRYTGWGRLSRKLINGIRDKQSGKTILDFLKSDGFANRNFMQLIHDDSLTFKEDIQKAQVSGQGDSLHEHIANLAGSPAIKKGILQTVKVVDELVKVMGRHKPENIVIEMARENQTTQKGQKNSRERMKRIEEGIKELGSQILKEHPVENTQLQNEKLYLYYLQNGRDMYVDQELDINRLSDYDVDHIVPQSFLKDDSIDNKVLTRSDKARGKSDNVPSEEVVKKMKNYWRQLLNAKLITQRKFDNLTKAERGGLSELDKAGFIKRQLVETRQITKHVAQILDSRMNTKYDENDKLIREVKVITLKSKLVSDFRKDFQFYKVREINNYHHAHDAYLNAVVGTALIKKYPKLESEFVYGDYKVYDVRKMIAKSEQEIGKATAKYFFYSNIMNFFKTEITLANGEIRKRPLIETNGETGEIVWDKGRDFATVRKVLSMPQVNIVKKTEVQTGGFSKESILPKRNSDKLIARKKDWDPKKYGGFDSPTVAYSVLVVAKVEKGKSKKLKSVKELLGITIMERSSFEKNPIDFLEAKGYKEVKKDLIIKLPKYSLFELENGRKRMLASAGELQKGNELALPSKYVNFLYLASHYEKLKGSPEDNEQKQLFVEQHKHYLDEIIEQISEFSKRVILADANLDKVLSAYNKHRDKPIREQAENIIHLFTLTNLGAPAAFKYFDTTIDRKRYTSTKEVLDATLIHQSITGLYETRIDLSQLGGDGGGSSEAAAKGGLDDEYRLYSPLVKPDQNIQFWLEQFPQAWAETAGMGLAKQVPPQVIQLKASATPVSVRQYPLSKEAQEGIRPHVQRLIQQGILVPVQSPWNTPLLPVRKPGTNDYRPVQDLREVNKRVQDIHPTVPNPYNLLCALPPQRSWYTVLDLKDAFFCLRLHPTSQPLFAFEWRDPGTGRTGQLTWTRLPQGFKNSPTIFNEALHRDLANFRIQHPQVTLLQYVDDLLLAGATKQDCLEGTKALLLELSDLGYRASAKKAQICRREVTYLGYSLRDGQRWLTEARKKTVVQIPAPTTAKQVREFLGKAGFCRLFIPGFATLAAPLYPLTKPKGEFSWAPEHQKAFDAIKKALLSAPALALPDVTKPFTLYVDERKGVARGVLTQTLGPWRRPVAYLSKKLDPVASGWPVCLKAIAAVAILVKDADKLTLGQNITVIAPHALENIVRQPPDRWMTNARMTHYQSLLLTERVTFAPPAALNPATLLPEETDEPVTHDCHQLLIEETGVRKDLTDIPLTGEVLTWFTDGSSYVVEGKRMAGAAVVDGTRTIWASSLPEGTSAQKAELMALTQALRLAEGKSINIYTDSRYAFATAHVHGAIYKQRGWLTSAGREIKNKEEILSLLEALHLPKRLAIIHCPGHQKAKDPISRGNQMADRVAKQAAQGVNLLPAGKRTADGSEFEKRTADGSEFESPKKKAKVE

SEQ ID NO: 238 - protein, 2092 aa, synthetic construct; identical to SEQ ID NO: 52

SEQ ID NO: 239 - protein, 2088 aa, synthetic construct; identical to SEQ ID NO: 49

SEQ ID NO: 240 - protein, 2088 aa, synthetic construct
MPAAKRVKLDGGDKKYSIGLDIGTNSVGWAVITDEYKVPSKKFKVLGNTDRHSIKKNLIGALLFDSGETAEATRLKRTARRRYTRRKNRICYLQEIFSNEMAKVDDSFFHRLEESFLVEEDKKHERHPIFGNIVDEVAYHEKYPTIYHLRKKLVDSTDKADLRLIYLALAHMIKFRGHFLIEGDLNPDNSDVDKLFIQLVQTYNQLFEENPINASGVDAKAILSARLSKSRRLENLIAQLPGEKKNGLFGNLIALSLGLTPNFKSNFDLAEDAKLQLSKDTYDDDLDNLLAQIGDQYADLFLAAKNLSDAILLSDILRVNTEITKAPLSASMIKRYDEHHQDLTLLKALVRQQLPEKYKEIFFDQSKNGYAGYIDGGASQEEFYKFIKPILEKMDGTEELLVKLNREDLLRKQRTFDNGSIPHQIHLGELHAILRRQEDFYPFLKDNREKIEKILTFRIPYYVGPLARGNSRFAWMTRKSEETITPWNFEEVVDKGASAQSFIERMTNFDKNLPNEKVLPKHSLLYEYFTVYNELTKVKYVTEGMRKPAFLSGEQKKAIVDLLFKTNRKVTVKQLKEDYFKKIECFDSVEISGVEDRFNASLGTYHDLLKIIKDKDFLDNEENEDILEDIVLTLTLFEDREMIEERLKTYAHLFDDKVMKQLKRRRYTGWGRLSRKLINGIRDKQSGKTILDFLKSDGFANRNFMQLIHDDSLTFKEDIQKAQVSGQGDSLHEHIANLAGSPAIKKGILQTVKVVDELVKVMGRHKPENIVIEMARENQTTQKGQKNSRERMKRIEEGIKELGSQILKEHPVENTQLQNEKLYLYYLQNGRDMYVDQELDINRLSDYDVDHIVPQSFLKDDSIDNKVLTRSDKARGKSDNVPSEEVVKKMKNYWRQLLNAKLITQRKFDNLTKAERGGLSELDKAGFIKRQLVETRQITKHVAQILDSRMNTKYDENDKLIREVKVITLKSKLVSDFRKDFQFYKVREINNYHHAHDAYLNAVVGTALIKKYPKLESEFVYGDYKVYDVRKMIAKSEQEIGKATAKYFFYSNIMNFFKTEITLANGEIRKRPLIETNGETGEIVWDKGRDFATVRKVLSMPQVNIVKKTEVQTGGFSKESILPKRNSDKLIARKKDWDPKKYGGFDSPTVAYSVLVVAKVEKGKSKKLKSVKELLGITIMERSSFEKNPIDFLEAKGYKEVKKDLIIKLPKYSLFELENGRKRMLASAGELQKGNELALPSKYVNFLYLASHYEKLKGSPEDNEQKQLFVEQHKHYLDEIIEQISEFSKRVILADANLDKVLSAYNKHRDKPIREQAENIIHLFTLTNLGAPAAFKYFDTTIDRKRYTSTKEVLDATLIHQSITGLYETRIDLSQLGGDGGGGGEAAAKGSSGGLDDEYRLYSPLVKPDQNIQFWLEQFPQAWAETAGMGLAKQVPPQVIQLKASATPVSVRQYPLSKEAQEGIRPHVQRLIQQGILVPVQSPWNTPLLPVRKPGTNDYRPVQDLREVNKRVQDIHPTVPNPYNLLCALPPQRSWYTVLDLKDAFFCLRLHPTSQPLFAFEWRDPGTGRTGQLTWTRLPQGFKNSPTIFNEALHRDLANFRIQHPQVTLLQYVDDLLLAGATKQDCLEGTKALLLELSDLGYRASAKKAQICRREVTYLGYSLRDGQRWLTEARKKTVVQIPAPTTAKQVREFLGKAGFCRLFIPGFATLAAPLYPLTKPKGEFSWAPEHQKAFDAIKKALLSAPALALPDVTKPFTLYVDERKGVARGVLTQTLGPWRRPVAYLSKKLDPVASGWPVCLKAIAAVAILVKDADKLTLGQNITVIAPHALENIVRQPPDRWMTNARMTHYQSLLLTERVTFAPPAALNPATLLPEETDEPVTHDCHQLLIEETGVRKDLTDIPLTGEVLTWFTDGSSYVVEGKRMAGAAVVDGTRTIWASSLPEGTSAQKAELMALTQALRLAEGKSINIYTDSRYAFATAHVHGAIYKQRGWLTSAGREIKNKEEILSLLEALHLPKRLAIIHCPGHQKAKDPISRGNQMADRVAKQAAQGVNLLPAGKRTADGSEFEKRTADGSEFESPKKKAKVE

SEQ ID NO: 241 - protein, 2086 aa, synthetic construct
MPAAKRVKLDGGDKKYSIGLDIGTNSVGWAVITDEYKVPSKKFKVLGNTDRHSIKKNLIGALLFDSGETAEATRLKRTARRRYTRRKNRICYLQEIFSNEMAKVDDSFFHRLEESFLVEEDKKHERHPIFGNIVDEVAYHEKYPTIYHLRKKLVDSTDKADLRLIYLALAHMIKFRGHFLIEGDLNPDNSDVDKLFIQLVQTYNQLFEENPINASGVDAKAILSARLSKSRRLENLIAQLPGEKKNGLFGNLIALSLGLTPNFKSNFDLAEDAKLQLSKDTYDDDLDNLLAQIGDQYADLFLAAKNLSDAILLSDILRVNTEITKAPLSASMIKRYDEHHQDLTLLKALVRQQLPEKYKEIFFDQSKNGYAGYIDGGASQEEFYKFIKPILEKMDGTEELLVKLNREDLLRKQRTFDNGSIPHQIHLGELHAILRRQEDFYPFLKDNREKIEKILTFRIPYYVGPLARGNSRFAWMTRKSEETITPWNFEEVVDKGASAQSFIERMTNFDKNLPNEKVLPKHSLLYEYFTVYNELTKVKYVTEGMRKPAFLSGEQKKAIVDLLFKTNRKVTVKQLKEDYFKKIECFDSVEISGVEDRFNASLGTYHDLLKIIKDKDFLDNEENEDILEDIVLTLTLFEDREMIEERLKTYAHLFDDKVMKQLKRRRYTGWGRLSRKLINGIRDKQSGKTILDFLKSDGFANRNFMQLIHDDSLTFKEDIQKAQVSGQGDSLHEHIANLAGSPAIKKGILQTVKVVDELVKVMGRHKPENIVIEMARENQTTQKGQKNSRERMKRIEEGIKELGSQILKEHPVENTQLQNEKLYLYYLQNGRDMYVDQELDINRLSDYDVDHIVPQSFLKDDSIDNKVLTRSDKARGKSDNVPSEEVVKKMKNYWRQLLNAKLITQRKFDNLTKAERGGLSELDKAGFIKRQLVETRQITKHVAQILDSRMNTKYDENDKLIREVKVITLKSKLVSDFRKDFQFYKVREINNYHHAHDAYLNAVVGTALIKKYPKLESEFVYGDYKVYDVRKMIAKSEQEIGKATAKYFFYSNIMNFFKTEITLANGEIRKRPLIETNGETGEIVWDKGRDFATVRKVLSMPQVNIVKKTEVQTGGFSKESILPKRNSDKLIARKKDWDPKKYGGFDSPTVAYSVLVVAKVEKGKSKKLKSVKELLGITIMERSSFEKNPIDFLEAKGYKEVKKDLIIKLPKYSLFELENGRKRMLASAGELQKGNELALPSKYVNFLYLASHYEKLKGSPEDNEQKQLFVEQHKHYLDEIIEQISEFSKRVILADANLDKVLSAYNKHRDKPIREQAENIIHLFTLTNLGAPAAFKYFDTTIDRKRYTSTKEVLDATLIHQSITGLYETRIDLSQLGGDGGGGSGSSGGGGGLDDEYRLYSPLVKPDQNIQFWLEQFPQAWAETAGMGLAKQVPPQVIQLKASATPVSVRQYPLSKEAQEGIRPHVQRLIQQGILVPVQSPWNTPLLPVRKPGTNDYRPVQDLREVNKRVQDIHPTVPNPYNLLCALPPQRSWYTVLDLKDAFFCLRLHPTSQPLFAFEWRDPGTGRTGQLTWTRLPQGFKNSPTIFNEALHRDLANFRIQHPQVTLLQYVDDLLLAGATKQDCLEGTKALLLELSDLGYRASAKKAQICRREVTYLGYSLRDGQRWLTEARKKTVVQIPAPTTAKQVREFLGKAGFCRLFIPGFATLAAPLYPLTKPKGEFSWAPEHQKAFDAIKKALLSAPALALPDVTKPFTLYVDERKGVARGVLTQTLGPWRRPVAYLSKKLDPVASGWPVCLKAIAAVAILVKDADKLTLGQNITVIAPHALENIVRQPPDRWMTNARMTHYQSLLLTERVTFAPPAALNPATLLPEETDEPVTHDCHQLLIEETGVRKDLTDIPLTGEVLTWFTDGSSYVVEGKRMAGAAVVDGTRTIWASSLPEGTSAQKAELMALTQALRLAEGKSINIYTDSRYAFATAHVHGAIYKQRGWLTSAGREIKNKEEILSLLEALHLPKRLAIIHCPGHQKAKDPISRGNQMADRVAKQAAQGVNLLPAGKRTADGSEFEKRTADGSEFESPKKKAKVE

SEQ ID NO: 242 - protein, 2088 aa, synthetic construct
MPAAKRVKLDGGDKKYSIGLDIGTNSVGWAVITDEYKVPSKKFKVLGNTDRHSIKKNLIGALLFDSGETAEATRLKRTARRRYTRRKNRICYLQEIFSNEMAKVDDSFFHRLEESFLVEEDKKHERHPIFGNIVDEVAYHEKYPTIYHLRKKLVDSTDKADLRLIYLALAHMIKFRGHFLIEGDLNPDNSDVDKLFIQLVQTYNQLFEENPINASGVDAKAILSARLSKSRRLENLIAQLPGEKKNGLFGNLIALSLGLTPNFKSNFDLAEDAKLQLSKDTYDDDLDNLLAQIGDQYADLFLAAKNLSDAILLSDILRVNTEITKAPLSASMIKRYDEHHQDLTLLKALVRQQLPEKYKEIFFDQSKNGYAGYIDGGASQEEFYKFIKPILEKMDGTEELLVKLNREDLLRKQRTFDNGSIPHQIHLGELHAILRRQEDFYPFLKDNREKIEKILTFRIPYYVGPLARGNSRFAWMTRKSEETITPWNFEEVVDKGASAQSFIERMTNFDKNLPNEKVLPKHSLLYEYFTVYNELTKVKYVTEGMRKPAFLSGEQKKAIVDLLFKTNRKVTVKQLKEDYFKKIECFDSVEISGVEDRFNASLGTYHDLLKIIKDKDFLDNEENEDILEDIVLTLTLFEDREMIEERLKTYAHLFDDKVMKQLKRRRYTGWGRLSRKLINGIRDKQSGKTILDFLKSDGFANRNFMQLIHDDSLTFKEDIQKAQVSGQGDSLHEHIANLAGSPAIKKGILQTVKVVDELVKVMGRHKPENIVIEMARENQTTQKGQKNSRERMKRIEEGIKELGSQILKEHPVENTQLQNEKLYLYYLQNGRDMYVDQELDINRLSDYDVDHIVPQSFLKDDSIDNKVLTRSDKARGKSDNVPSEEVVKKMKNYWRQLLNAKLITQRKFDNLTKAERGGLSELDKAGFIKRQLVETRQITKHVAQILDSRMNTKYDENDKLIREVKVITLKSKLVSDFRKDFQFYKVREINNYHHAHDAYLNAVVGTALIKKYPKLESEFVYGDYKVYDVRKMIAKSEQEIGKATAKYFFYSNIMNFFKTEITLANGEIRKRPLIETNGETGEIVWDKGRDFATVRKVLSMPQVNIVKKTEVQTGGFSKESILPKRNSDKLIARKKDWDPKKYGGFDSPTVAYSVLVVAKVEKGKSKKLKSVKELLGITIMERSSFEKNPIDFLEAKGYKEVKKDLIIKLPKYSLFELENGRKRMLASAGELQKGNELALPSKYVNFLYLASHYEKLKGSPEDNEQKQLFVEQHKHYLDEIIEQISEFSKRVILADANLDKVLSAYNKHRDKPIREQAENIIHLFTLTNLGAPAAFKYFDTTIDRKRYTSTKEVLDATLIHQSITGLYETRIDLSQLGGDGGEAAAKGSSPAPGGLDDEYRLYSPLVKPDQNIQFWLEQFPQAWAETAGMGLAKQVPPQVIQLKASATPVSVRQYPLSKEAQEGIRPHVQRLIQQGILVPVQSPWNTPLLPVRKPGTNDYRPVQDLREVNKRVQDIHPTVPNPYNLLCALPPQRSWYTVLDLKDAFFCLRLHPTSQPLFAFEWRDPGTGRTGQLTWTRLPQGFKNSPTIFNEALHRDLANFRIQHPQVTLLQYVDDLLLAGATKQDCLEGTKALLLELSDLGYRASAKKAQICRREVTYLGYSLRDGQRWLTEARKKTVVQIPAPTTAKQVREFLGKAGFCRLFIPGFATLAAPLYPLTKPKGEFSWAPEHQKAFDAIKKALLSAPALALPDVTKPFTLYVDERKGVARGVLTQTLGPWRRPVAYLSKKLDPVASGWPVCLKAIAAVAILVKDADKLTLGQNITVIAPHALENIVRQPPDRWMTNARMTHYQSLLLTERVTFAPPAALNPATLLPEETDEPVTHDCHQLLIEETGVRKDLTDIPLTGEVLTWFTDGSSYVVEGKRMAGAAVVDGTRTIWASSLPEGTSAQKAELMALTQALRLAEGKSINIYTDSRYAFATAHVHGAIYKQRGWLTSAGREIKNKEEILSLLEALHLPKRLAIIHCPGHQKAKDPISRGNQMADRVAKQAAQGVNLLPAGKRTADGSEFEKRTADGSEFESPKKKAKVE

SEQ ID NO: 243 - protein, 2088 aa, synthetic construct
MPAAKRVKLDGGDKKYSIGLDIGTNSVGWAVITDEYKVPSKKFKVLGNTDRHSIKKNLIGALLFDSGETAEATRLKRTARRRYTRRKNRICYLQEIFSNEMAKVDDSFFHRLEESFLVEEDKKHERHPIFGNIVDEVAYHEKYPTIYHLRKKLVDSTDKADLRLIYLALAHMIKFRGHFLIEGDLNPDNSDVDKLFIQLVQTYNQLFEENPINASGVDAKAILSARLSKSRRLENLIAQLPGEKKNGLFGNLIALSLGLTPNFKSNFDLAEDAKLQLSKDTYDDDLDNLLAQIGDQYADLFLAAKNLSDAILLSDILRVNTEITKAPLSASMIKRYDEHHQDLTLLKALVRQQLPEKYKEIFFDQSKNGYAGYIDGGASQEEFYKFIKPILEKMDGTEELLVKLNREDLLRKQRTFDNGSIPHQIHLGELHAILRRQEDFYPFLKDNREKIEKILTFRIPYYVGPLARGNSRFAWMTRKSEETITPWNFEEVVDKGASAQSFIERMTNFDKNLPNEKVLPKHSLLYEYFTVYNELTKVKYVTEGMRKPAFLSGEQKKAIVDLLFKTNRKVTVKQLKEDYFKKIECFDSVEISGVEDRFNASLGTYHDLLKIIKDKDFLDNEENEDILEDIVLTLTLFEDREMIEERLKTYAHLFDDKVMKQLKRRRYTGWGRLSRKLINGIRDKQSGKTILDFLKSDGFANRNFMQLIHDDSLTFKEDIQKAQVSGQGDSLHEHIANLAGSPAIKKGILQTVKVVDELVKVMGRHKPENIVIEMARENQTTQKGQKNSRERMKRIEEGIKELGSQILKEHPVENTQLQNEKLYLYYLQNGRDMYVDQELDINRLSDYDVDHIVPQSFLKDDSIDNKVLTRSDKARGKSDNVPSEEVVKKMKNYWRQLLNAKLITQRKFDNLTKAERGGLSELDKAGFIKRQLVETRQITKHVAQILDSRMNTKYDENDKLIREVKVITLKSKLVSDFRKDFQFYKVREINNYHHAHDAYLNAVVGTALIKKYPKLESEFVYGDYKVYDVRKMIAKSEQEIGKATAKYFFYSNIMNFFKTEITLANGEIRKRPLIETNGETGEIVWDKGRDFATVRKVLSMPQVNIVKKTEVQTGGFSKESILPKRNSDKLIARKKDWDPKKYGGFDSPTVAYSVLVVAKVEKGKSKKLKSVKELLGITIMERSSFEKNPIDFLEAKGYKEVKKDLIIKLPKYSLFELENGRKRMLASAGELQKGNELALPSKYVNFLYLASHYEKLKGSPEDNEQKQLFVEQHKHYLDEIIEQISEFSKRVILADANLDKVLSAYNKHRDKPIREQAENIIHLFTLTNLGAPAAFKYFDTTIDRKRYTSTKEVLDATLIHQSITGLYETRIDLSQLGGDGGGGSPAPEAAAKGGLDDEYRLYSPLVKPDQNIQFWLEQFPQAWAETAGMGLAKQVPPQVIQLKASATPVSVRQYPLSKEAQEGIRPHVQRLIQQGILVPVQSPWNTPLLPVRKPGTNDYRPVQDLREVNKRVQDIHPTVPNPYNLLCALPPQRSWYTVLDLKDAFFCLRLHPTSQPLFAFEWRDPGTGRTGQLTWTRLPQGFKNSPTIFNEALHRDLANFRIQHPQVTLLQYVDDLLLAGATKQDCLEGTKALLLELSDLGYRASAKKAQICRREVTYLGYSLRDGQRWLTEARKKTVVQIPAPTTAKQVREFLGKAGFCRLFIPGFATLAAPLYPLTKPKGEFSWAPEHQKAFDAIKKALLSAPALALPDVTKPFTLYVDERKGVARGVLTQTLGPWRRPVAYLSKKLDPVASGWPVCLKAIAAVAILVKDADKLTLGQNITVIAPHALENIVRQPPDRWMTNARMTHYQSLLLTERVTFAPPAALNPATLLPEETDEPVTHDCHQLLIEETGVRKDLTDIPLTGEVLTWFTDGSSYVVEGKRMAGAAVVDGTRTIWASSLPEGTSAQKAELMALTQALRLAEGKSINIYTDSRYAFATAHVHGAIYKQRGWLTSAGREIKNKEEILSLLEALHLPKRLAIIHCPGHQKAKDPISRGNQMADRVAKQAAQGVNLLPAGKRTADGSEFEKRTADGSEFESPKKKAKVE

SEQ ID NO: 244 - protein, 2084 aa, synthetic construct; identical to SEQ ID NO: 77

SEQ ID NO: 245 - protein, 2081 aa, synthetic construct; identical to SEQ ID NO: 66

SEQ ID NO: 246 - protein, 2080 aa, synthetic construct
MPAAKRVKLDGGDKKYSIGLDIGTNSVGWAVITDEYKVPSKKFKVLGNTDRHSIKKNLIGALLFDSGETAEATRLKRTARRRYTRRKNRICYLQEIFSNEMAKVDDSFFHRLEESFLVEEDKKHERHPIFGNIVDEVAYHEKYPTIYHLRKKLVDSTDKADLRLIYLALAHMIKFRGHFLIEGDLNPDNSDVDKLFIQLVQTYNQLFEENPINASGVDAKAILSARLSKSRRLENLIAQLPGEKKNGLFGNLIALSLGLTPNFKSNFDLAEDAKLQLSKDTYDDDLDNLLAQIGDQYADLFLAAKNLSDAILLSDILRVNTEITKAPLSASMIKRYDEHHQDLTLLKALVRQQLPEKYKEIFFDQSKNGYAGYIDGGASQEEFYKFIKPILEKMDGTEELLVKLNREDLLRKQRTFDNGSIPHQIHLGELHAILRRQEDFYPFLKDNREKIEKILTFRIPYYVGPLARGNSRFAWMTRKSEETITPWNFEEVVDKGASAQSFIERMTNFDKNLPNEKVLPKHSLLYEYFTVYNELTKVKYVTEGMRKPAFLSGEQKKAIVDLLFKTNRKVTVKQLKEDYFKKIECFDSVEISGVEDRFNASLGTYHDLLKIIKDKDFLDNEENEDILEDIVLTLTLFEDREMIEERLKTYAHLFDDKVMKQLKRRRYTGWGRLSRKLINGIRDKQSGKTILDFLKSDGFANRNFMQLIHDDSLTFKEDIQKAQVSGQGDSLHEHIANLAGSPAIKKGILQTVKVVDELVKVMGRHKPENIVIEMARENQTTQKGQKNSRERMKRIEEGIKELGSQILKEHPVENTQLQNEKLYLYYLQNGRDMYVDQELDINRLSDYDVDHIVPQSFLKDDSIDNKVLTRSDKARGKSDNVPSEEVVKKMKNYWRQLLNAKLITQRKFDNLTKAERGGLSELDKAGFIKRQLVETRQITKHVAQILDSRMNTKYDENDKLIREVKVITLKSKLVSDFRKDFQFYKVREINNYHHAHDAYLNAVVGTALIKKYPKLESEFVYGDYKVYDVRKMIAKSEQEIGKATAKYFFYSNIMNFFKTEITLANGEIRKRPLIETNGETGEIVWDKGRDFATVRKVLSMPQVNIVKKTEVQTGGFSKESILPKRNSDKLIARKKDWDPKKYGGFDSPTVAYSVLVVAKVEKGKSKKLKSVKELLGITIMERSSFEKNPIDFLEAKGYKEVKKDLIIKLPKYSLFELENGRKRMLASAGELQKGNELALPSKYVNFLYLASHYEKLKGSPEDNEQKQLFVEQHKHYLDEIIEQISEFSKRVILADANLDKVLSAYNKHRDKPIREQAENIIHLFTLTNLGAPAAFKYFDTTIDRKRYTSTKEVLDATLIHQSITGLYETRIDLSQLGGDGGGGGGGLDDEYRLYSPLVKPDQNIQFWLEQFPQAWAETAGMGLAKQVPPQVIQLKASATPVSVRQYPLSKEAQEGIRPHVQRLIQQGILVPVQSPWNTPLLPVRKPGTNDYRPVQDLREVNKRVQDIHPTVPNPYNLLCALPPQRSWYTVLDLKDAFFCLRLHPTSQPLFAFEWRDPGTGRTGQLTWTRLPQGFKNSPTIFNEALHRDLANFRIQHPQVTLLQYVDDLLLAGATKQDCLEGTKALLLELSDLGYRASAKKAQICRREVTYLGYSLRDGQRWLTEARKKTVVQIPAPTTAKQVREFLGKAGFCRLFIPGFATLAAPLYPLTKPKGEFSWAPEHQKAFDAIKKALLSAPALALPDVTKPFTLYVDERKGVARGVLTQTLGPWRRPVAYLSKKLDPVASGWPVCLKAIAAVAILVKDADKLTLGQNITVIAPHALENIVRQPPDRWMTNARMTHYQSLLLTERVTFAPPAALNPATLLPEETDEPVTHDCHQLLIEETGVRKDLTDIPLTGEVLTWFTDGSSYVVEGKRMAGAAVVDGTRTIWASSLPEGTSAQKAELMALTQALRLAEGKSINIYTDSRYAFATAHVHGAIYKQRGWLTSAGREIKNKEEILSLLEALHLPKRLAIIHCPGHQKAKDPISRGNQMADRVAKQAAQGVNLLPAGKRTADGSEFEKRTADGSEFESPKKKAKVE

SEQ ID NO: 247 - protein, 2088 aa, synthetic construct
MPAAKRVKLDGGDKKYSIGLDIGTNSVGWAVITDEYKVPSKKFKVLGNTDRHSIKKNLIGALLFDSGETAEATRLKRTARRRYTRRKNRICYLQEIFSNEMAKVDDSFFHRLEESFLVEEDKKHERHPIFGNIVDEVAYHEKYPTIYHLRKKLVDSTDKADLRLIYLALAHMIKFRGHFLIEGDLNPDNSDVDKLFIQLVQTYNQLFEENPINASGVDAKAILSARLSKSRRLENLIAQLPGEKKNGLFGNLIALSLGLTPNFKSNFDLAEDAKLQLSKDTYDDDLDNLLAQIGDQYADLFLAAKNLSDAILLSDILRVNTEITKAPLSASMIKRYDEHHQDLTLLKALVRQQLPEKYKEIFFDQSKNGYAGYIDGGASQEEFYKFIKPILEKMDGTEELLVKLNREDLLRKQRTFDNGSIPHQIHLGELHAILRRQEDFYPFLKDNREKIEKILTFRIPYYVGPLARGNSRFAWMTRKSEETITPWNFEEVVDKGASAQSFIERMTNFDKNLPNEKVLPKHSLLYEYFTVYNELTKVKYVTEGMRKPAFLSGEQKKAIVDLLFKTNRKVTVKQLKEDYFKKIECFDSVEISGVEDRFNASLGTYHDLLKIIKDKDFLDNEENEDILEDIVLTLTLFEDREMIEERLKTYAHLFDDKVMKQLKRRRYTGWGRLSRKLINGIRDKQSGKTILDFLKSDGFANRNFMQLIHDDSLTFKEDIQKAQVSGQGDSLHEHIANLAGSPAIKKGILQTVKVVDELVKVMGRHKPENIVIEMARENQTTQKGQKNSRERMKRIEEGIKELGSQILKEHPVENTQLQNEKLYLYYLQNGRDMYVDQELDINRLSDYDVDHIVPQSFLKDDSIDNKVLTRSDKARGKSDNVPSEEVVKKMKNYWRQLLNAKLITQRKFDNLTKAERGGLSELDKAGFIKRQLVETRQITKHVAQILDSRMNTKYDENDKLIREVKVITLKSKLVSDFRKDFQFYKVREINNYHHAHDAYLNAVVGTALIKKYPKLESEFVYGDYKVYDVRKMIAKSEQEIGKATAKYFFYSNIMNFFKTEITLANGEIRKRPLIETNGETGEIVWDKGRDFATVRKVLSMPQVNIVKKTEVQTGGFSKESILPKRNSDKLIARKKDWDPKKYGGFDSPTVAYSVLVVAKVEKGKSKKLKSVKELLGITIMERSSFEKNPIDFLEAKGYKEVKKDLIIKLPKYSLFELENGRKRMLASAGELQKGNELALPSKYVNFLYLASHYEKLKGSPEDNEQKQLFVEQHKHYLDEIIEQISEFSKRVILADANLDKVLSAYNKHRDKPIREQAENIIHLFTLTNLGAPAAFKYFDTTIDRKRYTSTKEVLDATLIHQSITGLYETRIDLSQLGGDGGEAAAKPAPGGSGGLDDEYRLYSPLVKPDQNIQFWLEQFPQAWAETAGMGLAKQVPPQVIQLKASATPVSVRQYPLSKEAQEGIRPHVQRLIQQGILVPVQSPWNTPLLPVRKPGTNDYRPVQDLREVNKRVQDIHPTVPNPYNLLCALPPQRSWYTVLDLKDAFFCLRLHPTSQPLFAFEWRDPGTGRTGQLTWTRLPQGFKNSPTIFNEALHRDLANFRIQHPQVTLLQYVDDLLLAGATKQDCLEGTKALLLELSDLGYRASAKKAQICRREVTYLGYSLRDGQRWLTEARKKTVVQIPAPTTAKQVREFLGKAGFCRLFIPGFATLAAPLYPLTKPKGEFSWAPEHQKAFDAIKKALLSAPALALPDVTKPFTLYVDERKGVARGVLTQTLGPWRRPVAYLSKKLDPVASGWPVCLKAIAAVAILVKDADKLTLGQNITVIAPHALENIVRQPPDRWMTNARMTHYQSLLLTERVTFAPPAALNPATLLPEETDEPVTHDCHQLLIEETGVRKDLTDIPLTGEVLTWFTDGSSYVVEGKRMAGAAVVDGTRTIWASSLPEGTSAQKAELMALTQALRLAEGKSINIYTDSRYAFATAHVHGAIYKQRGWLTSAGREIKNKEEILSLLEALHLPKRLAIIHCPGHQKAKDPISRGNQMADRVAKQAAQGVNLLPAGKRTADGSEFEKRTADGSEFESPKKKAKVE

SEQ ID NO: 248 - protein, 2088 aa, synthetic construct; identical to SEQ ID NO: 94

SEQ ID NO: 249 - protein, 2086 aa, synthetic construct; identical to SEQ ID NO: 60

SEQ ID NO: 250 - protein, 2088 aa, synthetic construct
MPAAKRVKLDGGDKKYSIGLDIGTNSVGWAVITDEYKVPSKKFKVLGNTDRHSIKKNLIGALLFDSGETAEATRLKRTARRRYTRRKNRICYLQEIFSNEMAKVDDSFFHRLEESFLVEEDKKHERHPIFGNIVDEVAYHEKYPTIYHLRKKLVDSTDKADLRLIYLALAHMIKFRGHFLIEGDLNPDNSDVDKLFIQLVQTYNQLFEENPINASGVDAKAILSARLSKSRRLENLIAQLPGEKKNGLFGNLIALSLGLTPNFKSNFDLAEDAKLQLSKDTYDDDLDNLLAQIGDQYADLFLAAKNLSDAILLSDILRVNTEITKAPLSASMIKRYDEHHQDLTLLKALVRQQLPEKYKEIFFDQSKNGYAGYIDGGASQEEFYKFIKPILEKMDGTEELLVKLNREDLLRKQRTFDNGSIPHQIHLGELHAILRRQEDFYPFLKDNREKIEKILTFRIPYYVGPLARGNSRFAWMTRKSEETITPWNFEEVVDKGASAQSFIERMTNFDKNLPNEKVLPKHSLLYEYFTVYNELTKVKYVTEGMRKPAFLSGEQKKAIVDLLFKTNRKVTVKQLKEDYFKKIECFDSVEISGVEDRFNASLGTYHDLLKIIKDKDFLDNEENEDILEDIVLTLTLFEDREMIEERLKTYAHLFDDKVMKQLKRRRYTGWGRLSRKLINGIRDKQSGKTILDFLKSDGFANRNFMQLIHDDSLTFKEDIQKAQVSGQGDSLHEHIANLAGSPAIKKGILQTVKVVDELVKVMGRHKPENIVIEMARENQTTQKGQKNSRERMKRIEEGIKELGSQILKEHPVENTQLQNEKLYLYYLQNGRDMYVDQELDINRLSDYDVDHIVPQSFLKDDSIDNKVLTRSDKARGKSDNVPSEEVVKKMKNYWRQLLNAKLITQRKFDNLTKAERGGLSELDKAGFIKRQLVETRQITKHVAQILDSRMNTKYDENDKLIREVKVITLKSKLVSDFRKDFQFYKVREINNYHHAHDAYLNAVVGTALIKKYPKLESEFVYGDYKVYDVRKMIAKSEQEIGKATAKYFFYSNIMNFFKTEITLANGEIRKRPLIETNGETGEIVWDKGRDFATVRKVLSMPQVNIVKKTEVQTGGFSKESILPKRNSDKLIARKKDWDPKKYGGFDSPTVAYSVLVVAKVEKGKSKKLKSVKELLGITIMERSSFEKNPIDFLEAKGYKEVKKDLIIKLPKYSLFELENGRKRMLASAGELQKGNELALPSKYVNFLYLASHYEKLKGSPEDNEQKQLFVEQHKHYLDEIIEQISEFSKRVILADANLDKVLSAYNKHRDKPIREQAENIIHLFTLTNLGAPAAFKYFDTTIDRKRYTSTKEVLDATLIHQSITGLYETRIDLSQLGGDGGGGSEAAAKGGGGGLDDEYRLYSPLVKPDQNIQFWLEQFPQAWAETAGMGLAKQVPPQVIQLKASATPVSVRQYPLSKEAQEGIRPHVQRLIQQGILVPVQSPWNTPLLPVRKPGTNDYRPVQDLREVNKRVQDIHPTVPNPYNLLCALPPQRSWYTVLDLKDAFFCLRLHPTSQPLFAFEWRDPGTGRTGQLTWTRLPQGFKNSPTIFNEALHRDLANFRIQHPQVTLLQYVDDLLLAGATKQDCLEGTKALLLELSDLGYRASAKKAQICRREVTYLGYSLRDGQRWLTEARKKTVVQIPAPTTAKQVREFLGKAGFCRLFIPGFATLAAPLYPLTKPKGEFSWAPEHQKAFDAIKKALLSAPALALPDVTKPFTLYVDERKGVARGVLTQTLGPWRRPVAYLSKKLDPVASGWPVCLKAIAAVAILVKDADKLTLGQNITVIAPHALENIVRQPPDRWMTNARMTHYQSLLLTERVTFAPPAALNPATLLPEETDEPVTHDCHQLLIEETGVRKDLTDIPLTGEVLTWFTDGSSYVVEGKRMAGAAVVDGTRTIWASSLPEGTSAQKAELMALTQALRLAEGKSINIYTDSRYAFATAHVHGAIYKQRGWLTSAGREIKNKEEILSLLEALHLPKRLAIIHCPGHQKAKDPISRGNQMADRVAKQAAQGVNLLPAGKRTADGSEFEKRTADGSEFESPKKKAKVE

SEQ ID NO: 251 - protein, 2086 aa, synthetic construct; identical to SEQ ID NO: 82

SEQ ID NO: 252 - protein, 2083 aa, synthetic construct
MPAAKRVKLDGGDKKYSIGLDIGTNSVGWAVITDEYKVPSKKFKVLGNTDRHSIKKNLIGALLFDSGETAEATRLKRTARRRYTRRKNRICYLQEIFSNEMAKVDDSFFHRLEESFLVEEDKKHERHPIFGNIVDEVAYHEKYPTIYHLRKKLVDSTDKADLRLIYLALAHMIKFRGHFLIEGDLNPDNSDVDKLFIQLVQTYNQLFEENPINASGVDAKAILSARLSKSRRLENLIAQLPGEKKNGLFGNLIALSLGLTPNFKSNFDLAEDAKLQLSKDTYDDDLDNLLAQIGDQYADLFLAAKNLSDAILLSDILRVNTEITKAPLSASMIKRYDEHHQDLTLLKALVRQQLPEKYKEIFFDQSKNGYAGYIDGGASQEEFYKFIKPILEKMDGTEELLVKLNREDLLRKQRTFDNGSIPHQIHLGELHAILRRQEDFYPFLKDNREKIEKILTFRIPYYVGPLARGNSRFAWMTRKSEETITPWNFEEVVDKGASAQSFIERMTNFDKNLPNEKVLPKHSLLYEYFTVYNELTKVKYVTEGMRKPAFLSGEQKKAIVDLLFKTNRKVTVKQLKEDYFKKIECFDSVEISGVEDRFNASLGTYHDLLKIIKDKDFLDNEENEDILEDIVLTLTLFEDREMIEERLKTYAHLFDDKVMKQLKRRRYTGWGRLSRKLINGIRDKQSGKTILDFLKSDGFANRNFMQLIHDDSLTFKEDIQKAQVSGQGDSLHEHIANLAGSPAIKKGILQTVKVVDELVKVMGRHKPENIVIEMARENQTTQKGQKNSRERMKRIEEGIKELGSQILKEHPVENTQLQNEKLYLYYLQNGRDMYVDQELDINRLSDYDVDHIVPQSFLKDDSIDNKVLTRSDKARGKSDNVPSEEVVKKMKNYWRQLLNAKLITQRKFDNLTKAERGGLSELDKAGFIKRQLVETRQITKHVAQILDSRMNTKYDENDKLIREVKVITLKSKLVSDFRKDFQFYKVREINNYHHAHDAYLNAVVGTALIKKYPKLESEFVYGDYKVYDVRKMIAKSEQEIGKATAKYFFYSNIMNFFKTEITLANGEIRKRPLIETNGETGEIVWDKGRDFATVRKVLSMPQVNIVKKTEVQTGGFSKESILPKRNSDKLIARKKDWDPKKYGGFDSPTVAYSVLVVAKVEKGKSKKLKSVKELLGITIMERSSFEKNPIDFLEAKGYKEVKKDLIIKLPKYSLFELENGRKRMLASAGELQKGNELALPSKYVNFLYLASHYEKLKGSPEDNEQKQLFVEQHKHYLDEIIEQISEFSKRVILADANLDKVLSAYNKHRDKPIREQAENIIHLFTLTNLGAPAAFKYFDTTIDRKRYTSTKEVLDATLIHQSITGLYETRIDLSQLGGDGGPAPGGSGGLDDEYRLYSPLVKPDQNIQFWLEQFPQAWAETAGMGLAKQVPPQVIQLKASATPVSVRQYPLSKEAQEGIRPHVQRLIQQGILVPVQSPWNTPLLPVRKPGTNDYRPVQDLREVNKRVQDIHPTVPNPYNLLCALPPQRSWYTVLDLKDAFFCLRLHPTSQPLFAFEWRDPGTGRTGQLTWTRLPQGFKNSPTIFNEALHRDLANFRIQHPQVTLLQYVDDLLLAGATKQDCLEGTKALLLELSDLGYRASAKKAQICRREVTYLGYSLRDGQRWLTEARKKTVVQIPAPTTAKQVREFLGKAGFCRLFIPGFATLAAPLYPLTKPKGEFSWAPEHQKAFDAIKKALLSAPALALPDVTKPFTLYVDERKGVARGVLTQTLGPWRRPVAYLSKKLDPVASGWPVCLKAIAAVAILVKDADKLTLGQNITVIAPHALENIVRQPPDRWMTNARMTHYQSLLLTERVTFAPPAALNPATLLPEETDEPVTHDCHQLLIEETGVRKDLTDIPLTGEVLTWFTDGSSYVVEGKRMAGAAVVDGTRTIWASSLPEGTSAQKAELMALTQALRLAEGKSINIYTDSRYAFATAHVHGAIYKQRGWLTSAGREIKNKEEILSLLEALHLPKRLAIIHCPGHQKAKDPISRGNQMADRVAKQAAQGVNLLPAGKRTADGSEFEKRTADGSEFESPKKKAKVE

SEQ ID NO: 253 - protein, 2083 aa, synthetic construct; identical to SEQ ID NO: 59

SEQ ID NO: 254 - protein, 2088 aa, synthetic construct
MPAAKRVKLDGGDKKYSIGLDIGTNSVGWAVITDEYKVPSKKFKVLGNTDRHSIKKNLIGALLFDSGETAEATRLKRTARRRYTRRKNRICYLQEIFSNEMAKVDDSFFHRLEESFLVEEDKKHERHPIFGNIVDEVAYHEKYPTIYHLRKKLVDSTDKADLRLIYLALAHMIKFRGHFLIEGDLNPDNSDVDKLFIQLVQTYNQLFEENPINASGVDAKAILSARLSKSRRLENLIAQLPGEKKNGLFGNLIALSLGLTPNFKSNFDLAEDAKLQLSKDTYDDDLDNLLAQIGDQYADLFLAAKNLSDAILLSDILRVNTEITKAPLSASMIKRYDEHHQDLTLLKALVRQQLPEKYKEIFFDQSKNGYAGYIDGGASQEEFYKFIKPILEKMDGTEELLVKLNREDLLRKQRTFDNGSIPHQIHLGELHAILRRQEDFYPFLKDNREKIEKILTFRIPYYVGPLARGNSRFAWMTRKSEETITPWNFEEVVDKGASAQSFIERMTNFDKNLPNEKVLPKHSLLYEYFTVYNELTKVKYVTEGMRKPAFLSGEQKKAIVDLLFKTNRKVTVKQLKEDYFKKIECFDSVEISGVEDRFNASLGTYHDLLKIIKDKDFLDNEENEDILEDIVLTLTLFEDREMIEERLKTYAHLFDDKVMKQLKRRRYTGWGRLSRKLINGIRDKQSGKTILDFLKSDGFANRNFMQLIHDDSLTFKEDIQKAQVSGQGDSLHEHIANLAGSPAIKKGILQTVKVVDELVKVMGRHKPENIVIEMARENQTTQKGQKNSRERMKRIEEGIKELGSQILKEHPVENTQLQNEKLYLYYLQNGRDMYVDQELDINRLSDYDVDHIVPQSFLKDDSIDNKVLTRSDKARGKSDNVPSEEVVKKMKNYWRQLLNAKLITQRKFDNLTKAERGGLSELDKAGFIKRQLVETRQITKHVAQILDSRMNTKYDENDKLIREVKVITLKSKLVSDFRKDFQFYKVREINNYHHAHDAYLNAVVGTALIKKYPKLESEFVYGDYKVYDVRKMIAKSEQEIGKATAKYFFYSNIMNFFKTEITLANGEIRKRPLIETNGETGEIVWDKGRDFATVRKVLSMPQVNIVKKTEVQTGGFSKESILPKRNSDKLIARKKDWDPKKYGGFDSPTVAYSVLVVAKVEKGKSKKLKSVKELLGITIMERSSFEKNPIDFLEAKGYKEVKKDLIIKLPKYSLFELENGRKRMLASAGELQKGNELALPSKYVNFLYLASHYEKLKGSPEDNEQKQLFVEQHKHYLDEIIEQISEFSKRVILADANLDKVLSAYNKHRDKPIREQAENIIHLFTLTNLGAPAAFKYFDTTIDRKRYTSTKEVLDATLIHQSITGLYETRIDLSQLGGDGGGSSGGSEAAAKGGLDDEYRLYSPLVKPDQNIQFWLEQFPQAWAETAGMGLAKQVPPQVIQLKASATPVSVRQYPLSKEAQEGIRPHVQRLIQQGILVPVQSPWNTPLLPVRKPGTNDYRPVQDLREVNKRVQDIHPTVPNPYNLLCALPPQRSWYTVLDLKDAFFCLRLHPTSQPLFAFEWRDPGTGRTGQLTWTRLPQGFKNSPTIFNEALHRDLANFRIQHPQVTLLQYVDDLLLAGATKQDCLEGTKALLLELSDLGYRASAKKAQICRREVTYLGYSLRDGQRWLTEARKKTVVQIPAPTTAKQVREFLGKAGFCRLFIPGFATLAAPLYPLTKPKGEFSWAPEHQKAFDAIKKALLSAPALALPDVTKPFTLYVDERKGVARGVLTQTLGPWRRPVAYLSKKLDPVASGWPVCLKAIAAVAILVKDADKLTLGQNITVIAPHALENIVRQPPDRWMTNARMTHYQSLLLTERVTFAPPAALNPATLLPEETDEPVTHDCHQLLIEETGVRKDLTDIPLTGEVLTWFTDGSSYVVEGKRMAGAAVVDGTRTIWASSLPEGTSAQKAELMALTQALRLAEGKSINIYTDSRYAFATAHVHGAIYKQRGWLTSAGREIKNKEEILSLLEALHLPKRLAIIHCPGHQKAKDPISRGNQMADRVAKQAAQGVNLLPAGKRTADGSEFEKRTADGSEFESPKKKAKVE

SEQ ID NO: 255 - protein, 2088 aa, synthetic construct; identical to SEQ ID NO: 86

SEQ ID NO: 256 - protein, 2107 aa, synthetic construct
MPAAKRVKLDGGDKKYSIGLDIGTNSVGWAVITDEYKVPSKKFKVLGNTDRHSIKKNLIGALLFDSGETAEATRLKRTARRRYTRRKNRICYLQEIFSNEMAKVDDSFFHRLEESFLVEEDKKHERHPIFGNIVDEVAYHEKYPTIYHLRKKLVDSTDKADLRLIYLALAHMIKFRGHFLIEGDLNPDNSDVDKLFIQLVQTYNQLFEENPINASGVDAKAILSARLSKSRRLENLIAQLPGEKKNGLFGNLIALSLGLTPNFKSNFDLAEDAKLQLSKDTYDDDLDNLLAQIGDQYADLFLAAKNLSDAILLSDILRVNTEITKAPLSASMIKRYDEHHQDLTLLKALVRQQLPEKYKEIFFDQSKNGYAGYIDGGASQEEFYKFIKPILEKMDGTEELLVKLNREDLLRKQRTFDNGSIPHQIHLGELHAILRRQEDFYPFLKDNREKIEKILTFRIPYYVGPLARGNSRFAWMTRKSEETITPWNFEEVVDKGASAQSFIERMTNFDKNLPNEKVLPKHSLLYEYFTVYNELTKVKYVTEGMRKPAFLSGEQKKAIVDLLFKTNRKVTVKQLKEDYFKKIECFDSVEISGVEDRFNASLGTYHDLLKIIKDKDFLDNEENEDILEDIVLTLTLFEDREMIEERLKTYAHLFDDKVMKQLKRRRYTGWGRLSRKLINGIRDKQSGKTILDFLKSDGFANRNFMQLIHDDSLTFKEDIQKAQVSGQGDSLHEHIANLAGSPAIKKGILQTVKVVDELVKVMGRHKPENIVIEMARENQTTQKGQKNSRERMKRIEEGIKELGSQILKEHPVENTQLQNEKLYLYYLQNGRDMYVDQELDINRLSDYDVDHIVPQSFLKDDSIDNKVLTRSDKARGKSDNVPSEEVVKKMKNYWRQLLNAKLITQRKFDNLTKAERGGLSELDKAGFIKRQLVETRQITKHVAQILDSRMNTKYDENDKLIREVKVITLKSKLVSDFRKDFQFYKVREINNYHHAHDAYLNAVVGTALIKKYPKLESEFVYGDYKVYDVRKMIAKSEQEIGKATAKYFFYSNIMNFFKTEITLANGEIRKRPLIETNGETGEIVWDKGRDFATVRKVLSMPQVNIVKKTEVQTGGFSKESILPKRNSDKLIARKKDWDPKKYGGFDSPTVAYSVLVVAKVEKGKSKKLKSVKELLGITIMERSSFEKNPIDFLEAKGYKEVKKDLIIKLPKYSLFELENGRKRMLASAGELQKGNELALPSKYVNFLYLASHYEKLKGSPEDNEQKQLFVEQHKHYLDEIIEQISEFSKRVILADANLDKVLSAYNKHRDKPIREQAENIIHLFTLTNLGAPAAFKYFDTTIDRKRYTSTKEVLDATLIHQSITGLYETRIDLSQLGGDGGGGGGSGGGGSGGGGSGGGGSGGGGSGGGGSGGLDDEYRLYSPLVKPDQNIQFWLEQFPQAWAETAGMGLAKQVPPQVIQLKASATPVSVRQYPLSKEAQEGIRPHVQRLIQQGILVPVQSPWNTPLLPVRKPGTNDYRPVQDLREVNKRVQDIHPTVPNPYNLLCALPPQRSWYTVLDLKDAFFCLRLHPTSQPLFAFEWRDPGTGRTGQLTWTRLPQGFKNSPTIFNEALHRDLANFRIQHPQVTLLQYVDDLLLAGATKQDCLEGTKALLLELSDLGYRASAKKAQICRREVTYLGYSLRDGQRWLTEARKKTVVQIPAPTTAKQVREFLGKAGFCRLFIPGFATLAAPLYPLTKPKGEFSWAPEHQKAFDAIKKALLSAPALALPDVTKPFTLYVDERKGVARGVLTQTLGPWRRPVAYLSKKLDPVASGWPVCLKAIAAVAILVKDADKLTLGQNITVIAPHALENIVRQPPDRWMTNARMTHYQSLLLTERVTFAPPAALNPATLLPEETDEPVTHDCHQLLIEETGVRKDLTDIPLTGEVLTWFTDGSSYVVEGKRMAGAAVVDGTRTIWASSLPEGTSAQKAELMALTQALRLAEGKSINIYTDSRYAFATAHVHGAIYKQRGWLTSAGREIKNKEEILSLLEALHLPKRLAIIHCPGHQKAKDPISRGNQMADRVAKQAAQGVNLLPAGKRTADGSEFEKRTADGSEFESPKKKAKVE

SEQ ID NO: 257 - protein, 2086 aa, synthetic construct; identical to SEQ ID NO: 64

SEQ ID NO: 258 - protein, 2088 aa, synthetic construct
MPAAKRVKLDGGDKKYSIGLDIGTNSVGWAVITDEYKVPSKKFKVLGNTDRHSIKKNLIGALLFDSGETAEATRLKRTARRRYTRRKNRICYLQEIFSNEMAKVDDSFFHRLEESFLVEEDKKHERHPIFGNIVDEVAYHEKYPTIYHLRKKLVDSTDKADLRLIYLALAHMIKFRGHFLIEGDLNPDNSDVDKLFIQLVQTYNQLFEENPINASGVDAKAILSARLSKSRRLENLIAQLPGEKKNGLFGNLIALSLGLTPNFKSNFDLAEDAKLQLSKDTYDDDLDNLLAQIGDQYADLFLAAKNLSDAILLSDILRVNTEITKAPLSASMIKRYDEHHQDLTLLKALVRQQLPEKYKEIFFDQSKNGYAGYIDGGASQEEFYKFIKPILEKMDGTEELLVKLNREDLLRKQRTFDNGSIPHQIHLGELHAILRRQEDFYPFLKDNREKIEKILTFRIPYYVGPLARGNSRFAWMTRKSEETITPWNFEEVVDKGASAQSFIERMTNFDKNLPNEKVLPKHSLLYEYFTVYNELTKVKYVTEGMRKPAFLSGEQKKAIVDLLFKTNRKVTVKQLKEDYFKKIECFDSVEISGVEDRFNASLGTYHDLLKIIKDKDFLDNEENEDILEDIVLTLTLFEDREMIEERLKTYAHLFDDKVMKQLKRRRYTGWGRLSRKLINGIRDKQSGKTILDFLKSDGFANRNFMQLIHDDSLTFKEDIQKAQVSGQGDSLHEHIANLAGSPAIKKGILQTVKVVDELVKVMGRHKPENIVIEMARENQTTQKGQKNSRERMKRIEEGIKELGSQILKEHPVENTQLQNEKLYLYYLQNGRDMYVDQELDINRLSDYDVDHIVPQSFLKDDSIDNKVLTRSDKARGKSDNVPSEEVVKKMKNYWRQLLNAKLITQRKFDNLTKAERGGLSELDKAGFIKRQLVETRQITKHVAQILDSRMNTKYDENDKLIREVKVITLKSKLVSDFRKDFQFYKVREINNYHHAHDAYLNAVVGTALIKKYPKLESEFVYGDYKVYDVRKMIAKSEQEIGKATAKYFFYSNIMNFFKTEITLANGEIRKRPLIETNGETGEIVWDKGRDFATVRKVLSMPQVNIVKKTEVQTGGFSKESILPKRNSDKLIARKKDWDPKKYGGFDSPTVAYSVLVVAKVEKGKSKKLKSVKELLGITIMERSSFEKNPIDFLEAKGYKEVKKDLIIKLPKYSLFELENGRKRMLASAGELQKGNELALPSKYVNFLYLASHYEKLKGSPEDNEQKQLFVEQHKHYLDEIIEQISEFSKRVILADANLDKVLSAYNKHRDKPIREQAENIIHLFTLTNLGAPAAFKYFDTTIDRKRYTSTKEVLDATLIHQSITGLYETRIDLSQLGGDGGGSSEAAAKGGSGGLDDEYRLYSPLVKPDQNIQFWLEQFPQAWAETAGMGLAKQVPPQVIQLKASATPVSVRQYPLSKEAQEGIRPHVQRLIQQGILVPVQSPWNTPLLPVRKPGTNDYRPVQDLREVNKRVQDIHPTVPNPYNLLCALPPQRSWYTVLDLKDAFFCLRLHPTSQPLFAFEWRDPGTGRTGQLTWTRLPQGFKNSPTIFNEALHRDLANFRIQHPQVTLLQYVDDLLLAGATKQDCLEGTKALLLELSDLGYRASAKKAQICRREVTYLGYSLRDGQRWLTEARKKTVVQIPAPTTAKQVREFLGKAGFCRLFIPGFATLAAPLYPLTKPKGEFSWAPEHQKAFDAIKKALLSAPALALPDVTKPFTLYVDERKGVARGVLTQTLGPWRRPVAYLSKKLDPVASGWPVCLKAIAAVAILVKDADKLTLGQNITVIAPHALENIVRQPPDRWMTNARMTHYQSLLLTERVTFAPPAALNPATLLPEETDEPVTHDCHQLLIEETGVRKDLTDIPLTGEVLTWFTDGSSYVVEGKRMAGAAVVDGTRTIWASSLPEGTSAQKAELMALTQALRLAEGKSINIYTDSRYAFATAHVHGAIYKQRGWLTSAGREIKNKEEILSLLEALHLPKRLAIIHCPGHQKAKDPISRGNQMADRVAKQAAQGVNLLPAGKRTADGSEFEKRTADGSEFESPKKKAKVE

SEQ ID NO: 259 - protein, 2083 aa, synthetic construct
MPAAKRVKLDGGDKKYSIGLDIGTNSVGWAVITDEYKVPSKKFKVLGNTDRHSIKKNLIGALLFDSGETAEATRLKRTARRRYTRRKNRICYLQEIFSNEMAKVDDSFFHRLEESFLVEEDKKHERHPIFGNIVDEVAYHEKYPTIYHLRKKLVDSTDKADLRLIYLALAHMIKFRGHFLIEGDLNPDNSDVDKLFIQLVQTYNQLFEENPINASGVDAKAILSARLSKSRRLENLIAQLPGEKKNGLFGNLIALSLGLTPNFKSNFDLAEDAKLQLSKDTYDDDLDNLLAQIGDQYADLFLAAKNLSDAILLSDILRVNTEITKAPLSASMIKRYDEHHQDLTLLKALVRQQLPEKYKEIFFDQSKNGYAGYIDGGASQEEFYKFIKPILEKMDGTEELLVKLNREDLLRKQRTFDNGSIPHQIHLGELHAILRRQEDFYPFLKDNREKIEKILTFRIPYYVGPLARGNSRFAWMTRKSEETITPWNFEEVVDKGASAQSFIERMTNFDKNLPNEKVLPKHSLLYEYFTVYNELTKVKYVTEGMRKPAFLSGEQKKAIVDLLFKTNRKVTVKQLKEDYFKKIECFDSVEISGVEDRFNASLGTYHDLLKIIKDKDFLDNEENEDILEDIVLTLTLFEDREMIEERLKTYAHLFDDKVMKQLKRRRYTGWGRLSRKLINGIRDKQSGKTILDFLKSDGFANRNFMQLIHDDSLTFKEDIQKAQVSGQGDSLHEHIANLAGSPAIKKGILQTVKVVDELVKVMGRHKPENIVIEMARENQTTQKGQKNSRERMKRIEEGIKELGSQILKEHPVENTQLQNEKLYLYYLQNGRDMYVDQELDINRLSDYDVDHIVPQSFLKDDSIDNKVLTRSDKARGKSDNVPSEEVVKKMKNYWRQLLNAKLITQRKFDNLTKAERGGLSELDKAGFIKRQLVETRQITKHVAQILDSRMNTKYDENDKLIREVKVITLKSKLVSDFRKDFQFYKVREINNYHHAHDAYLNAVVGTALIKKYPKLESEFVYGDYKVYDVRKMIAKSEQEIGKATAKYFFYSNIMNFFKTEITLANGEIRKRPLIETNGETGEIVWDKGRDFATVRKVLSMPQVNIVKKTEVQTGGFSKESILPKRNSDKLIARKKDWDPKKYGGFDSPTVAYSVLVVAKVEKGKSKKLKSVKELLGITIMERSSFEKNPIDFLEAKGYKEVKKDLIIKLPKYSLFELENGRKRMLASAGELQKGNELALPSKYVNFLYLASHYEKLKGSPEDNEQKQLFVEQHKHYLDEIIEQISEFSKRVILADANLDKVLSAYNKHRDKPIREQAENIIHLFTLTNLGAPAAFKYFDTTIDRKRYTSTKEVLDATLIHQSITGLYETRIDLSQLGGDGGGGSGGSGGLDDEYRLYSPLVKPDQNIQFWLEQFPQAWAETAGMGLAKQVPPQVIQLKASATPVSVRQYPLSKEAQEGIRPHVQRLIQQGILVPVQSPWNTPLLPVRKPGTNDYRPVQDLREVNKRVQDIHPTVPNPYNLLCALPPQRSWYTVLDLKDAFFCLRLHPTSQPLFAFEWRDPGTGRTGQLTWTRLPQGFKNSPTIFNEALHRDLANFRIQHPQVTLLQYVDDLLLAGATKQDCLEGTKALLLELSDLGYRASAKKAQICRREVTYLGYSLRDGQRWLTEARKKTVVQIPAPTTAKQVREFLGKAGFCRLFIPGFATLAAPLYPLTKPKGEFSWAPEHQKAFDAIKKALLSAPALALPDVTKPFTLYVDERKGVARGVLTQTLGPWRRPVAYLSKKLDPVASGWPVCLKAIAAVAILVKDADKLTLGQNITVIAPHALENIVRQPPDRWMTNARMTHYQSLLLTERVTFAPPAALNPATLLPEETDEPVTHDCHQLLIEETGVRKDLTDIPLTGEVLTWFTDGSSYVVEGKRMAGAAVVDGTRTIWASSLPEGTSAQKAELMALTQALRLAEGKSINIYTDSRYAFATAHVHGAIYKQRGWLTSAGREIKNKEEILSLLEALHLPKRLAIIHCPGHQKAKDPISRGNQMADRVAKQAAQGVNLLPAGKRTADGSEFEKRTADGSEFESPKKKAKVE

SEQ ID NO: 260 - protein, 2088 aa, synthetic construct; identical to SEQ ID NO: 93

SEQ ID NO: 261 - protein, 2083 aa, synthetic construct; identical to SEQ ID NO: 81

SEQ ID NO: 262 - protein, 2080 aa, synthetic construct
MPAAKRVKLDGGDKKYSIGLDIGTNSVGWAVITDEYKVPSKKFKVLGNTDRHSIKKNLIGALLFDSGETAEATRLKRTARRRYTRRKNRICYLQEIFSNEMAKVDDSFFHRLEESFLVEEDKKHERHPIFGNIVDEVAYHEKYPTIYHLRKKLVDSTDKADLRLIYLALAHMIKFRGHFLIEGDLNPDNSDVDKLFIQLVQTYNQLFEENPINASGVDAKAILSARLSKSRRLENLIAQLPGEKKNGLFGNLIALSLGLTPNFKSNFDLAEDAKLQLSKDTYDDDLDNLLAQIGDQYADLFLAAKNLSDAILLSDILRVNTEITKAPLSASMIKRYDEHHQDLTLLKALVRQQLPEKYKEIFFDQSKNGYAGYIDGGASQEEFYKFIKPILEKMDGTEELLVKLNREDLLRKQRTFDNGSIPHQIHLGELHAILRRQEDFYPFLKDNREKIEKILTFRIPYYVGPLARGNSRFAWMTRKSEETITPWNFEEVVDKGASAQSFIERMTNFDKNLPNEKVLPKHSLLYEYFTVYNELTKVKYVTEGMRKPAFLSGEQKKAIVDLLFKTNRKVTVKQLKEDYFKKIECFDSVEISGVEDRFNASLGTYHDLLKIIKDKDFLDNEENEDILEDIVLTLTLFEDREMIEERLKTYAHLFDDKVMKQLKRRRYTGWGRLSRKLINGIRDKQSGKTILDFLKSDGFANRNFMQLIHDDSLTFKEDIQKAQVSGQGDSLHEHIANLAGSPAIKKGILQTVKVVDELVKVMGRHKPENIVIEMARENQTTQKGQKNSRERMKRIEEGIKELGSQILKEHPVENTQLQNEKLYLYYLQNGRDMYVDQELDINRLSDYDVDHIVPQSFLKDDSIDNKVLTRSDKARGKSDNVPSEEVVKKMKNYWRQLLNAKLITQRKFDNLTKAERGGLSELDKAGFIKRQLVETRQITKHVAQILDSRMNTKYDENDKLIREVKVITLKSKLVSDFRKDFQFYKVREINNYHHAHDAYLNAVVGTALIKKYPKLESEFVYGDYKVYDVRKMIAKSEQEIGKATAKYFFYSNIMNFFKTEITLANGEIRKRPLIETNGETGEIVWDKGRDFATVRKVLSMPQVNIVKKTEVQTGGFSKESILPKRNSDKLIARKKDWDPKKYGGFDSPTVAYSVLVVAKVEKGKSKKLKSVKELLGITIMERSSFEKNPIDFLEAKGYKEVKKDLIIKLPKYSLFELENGRKRMLASAGELQKGNELALPSKYVNFLYLASHYEKLKGSPEDNEQKQLFVEQHKHYLDEIIEQISEFSKRVILADANLDKVLSAYNKHRDKPIREQAENIIHLFTLTNLGAPAAFKYFDTTIDRKRYTSTKEVLDATLIHQSITGLYETRIDLSQLGGDGGGGSGGLDDEYRLYSPLVKPDQNIQFWLEQFPQAWAETAGMGLAKQVPPQVIQLKASATPVSVRQYPLSKEAQEGIRPHVQRLIQQGILVPVQSPWNTPLLPVRKPGTNDYRPVQDLREVNKRVQDIHPTVPNPYNLLCALPPQRSWYTVLDLKDAFFCLRLHPTSQPLFAFEWRDPGTGRTGQLTWTRLPQGFKNSPTIFNEALHRDLANFRIQHPQVTLLQYVDDLLLAGATKQDCLEGTKALLLELSDLGYRASAKKAQICRREVTYLGYSLRDGQRWLTEARKKTVVQIPAPTTAKQVREFLGKAGFCRLFIPGFATLAAPLYPLTKPKGEFSWAPEHQKAFDAIKKALLSAPALALPDVTKPFTLYVDERKGVARGVLTQTLGPWRRPVAYLSKKLDPVASGWPVCLKAIAAVAILVKDADKLTLGQNITVIAPHALENIVRQPPDRWMTNARMTHYQSLLLTERVTFAPPAALNPATLLPEETDEPVTHDCHQLLIEETGVRKDLTDIPLTGEVLTWFTDGSSYVVEGKRMAGAAVVDGTRTIWASSLPEGTSAQKAELMALTQALRLAEGKSINIYTDSRYAFATAHVHGAIYKQRGWLTSAGREIKNKEEILSLLEALHLPKRLAIIHCPGHQKAKDPISRGNQMADRVAKQAAQGVNLLPAGKRTADGSEFEKRTADGSEFESPKKKAKVE

SEQ ID NO: 263 - protein, 2088 aa, synthetic construct; identical to SEQ ID NO: 92

SEQ ID NO: 264 - protein, 2088 aa, synthetic construct; identical to SEQ ID NO: 53

SEQ ID NO: 265 - protein, 2083 aa, synthetic construct; identical to SEQ ID NO: 79

SEQ ID NO: 266 - protein, 2082 aa, synthetic construct
MPAAKRVKLDGGDKKYSIGLDIGTNSVGWAVITDEYKVPSKKFKVLGNTDRHSIKKNLIGALLFDSGETAEATRLKRTARRRYTRRKNRICYLQEIFSNEMAKVDDSFFHRLEESFLVEEDKKHERHPIFGNIVDEVAYHEKYPTIYHLRKKLVDSTDKADLRLIYLALAHMIKFRGHFLIEGDLNPDNSDVDKLFIQLVQTYNQLFEENPINASGVDAKAILSARLSKSRRLENLIAQLPGEKKNGLFGNLIALSLGLTPNFKSNFDLAEDAKLQLSKDTYDDDLDNLLAQIGDQYADLFLAAKNLSDAILLSDILRVNTEITKAPLSASMIKRYDEHHQDLTLLKALVRQQLPEKYKEIFFDQSKNGYAGYIDGGASQEEFYKFIKPILEKMDGTEELLVKLNREDLLRKQRTFDNGSIPHQIHLGELHAILRRQEDFYPFLKDNREKIEKILTFRIPYYVGPLARGNSRFAWMTRKSEETITPWNFEEVVDKGASAQSFIERMTNFDKNLPNEKVLPKHSLLYEYFTVYNELTKVKYVTEGMRKPAFLSGEQKKAIVDLLFKTNRKVTVKQLKEDYFKKIECFDSVEISGVEDRFNASLGTYHDLLKIIKDKDFLDNEENEDILEDIVLTLTLFEDREMIEERLKTYAHLFDDKVMKQLKRRRYTGWGRLSRKLINGIRDKQSGKTILDFLKSDGFANRNFMQLIHDDSLTFKEDIQKAQVSGQGDSLHEHIANLAGSPAIKKGILQTVKVVDELVKVMGRHKPENIVIEMARENQTTQKGQKNSRERMKRIEEGIKELGSQILKEHPVENTQLQNEKLYLYYLQNGRDMYVDQELDINRLSDYDVDHIVPQSFLKDDSIDNKVLTRSDKARGKSDNVPSEEVVKKMKNYWRQLLNAKLITQRKFDNLTKAERGGLSELDKAGFIKRQLVETRQITKHVAQILDSRMNTKYDENDKLIREVKVITLKSKLVSDFRKDFQFYKVREINNYHHAHDAYLNAVVGTALIKKYPKLESEFVYGDYKVYDVRKMIAKSEQEIGKATAKYFFYSNIMNFFKTEITLANGEIRKRPLIETNGETGEIVWDKGRDFATVRKVLSMPQVNIVKKTEVQTGGFSKESILPKRNSDKLIARKKDWDPKKYGGFDSPTVAYSVLVVAKVEKGKSKKLKSVKELLGITIMERSSFEKNPIDFLEAKGYKEVKKDLIIKLPKYSLFELENGRKRMLASAGELQKGNELALPSKYVNFLYLASHYEKLKGSPEDNEQKQLFVEQHKHYLDEIIEQISEFSKRVILADANLDKVLSAYNKHRDKPIREQAENIIHLFTLTNLGAPAAFKYFDTTIDRKRYTSTKEVLDATLIHQSITGLYETRIDLSQLGGDGGPAPAPGGLDDEYRLYSPLVKPDQNIQFWLEQFPQAWAETAGMGLAKQVPPQVIQLKASATPVSVRQYPLSKEAQEGIRPHVQRLIQQGILVPVQSPWNTPLLPVRKPGTNDYRPVQDLREVNKRVQDIHPTVPNPYNLLCALPPQRSWYTVLDLKDAFFCLRLHPTSQPLFAFEWRDPGTGRTGQLTWTRLPQGFKNSPTIFNEALHRDLANFRIQHPQVTLLQYVDDLLLAGATKQDCLEGTKALLLELSDLGYRASAKKAQICRREVTYLGYSLRDGQRWLTEARKKTVVQIPAPTTAKQVREFLGKAGFCRLFIPGFATLAAPLYPLTKPKGEFSWAPEHQKAFDAIKKALLSAPALALPDVTKPFTLYVDERKGVARGVLTQTLGPWRRPVAYLSKKLDPVASGWPVCLKAIAAVAILVKDADKLTLGQNITVIAPHALENIVRQPPDRWMTNARMTHYQSLLLTERVTFAPPAALNPATLLPEETDEPVTHDCHQLLIEETGVRKDLTDIPLTGEVLTWFTDGSSYVVEGKRMAGAAVVDGTRTIWASSLPEGTSAQKAELMALTQALRLAEGKSINIYTDSRYAFATAHVHGAIYKQRGWLTSAGREIKNKEEILSLLEALHLPKRLAIIHCPGHQKAKDPISRGNQMADRVAKQAAQGVNLLPAGKRTADGSEFEKRTADGSEFESPKKKAKVE

SEQ ID NO: 267 - protein, 2086 aa, synthetic construct
MPAAKRVKLDGGDKKYSIGLDIGTNSVGWAVITDEYKVPSKKFKVLGNTDRHSIKKNLIGALLFDSGETAEATRLKRTARRRYTRRKNRICYLQEIFSNEMAKVDDSFFHRLEESFLVEEDKKHERHPIFGNIVDEVAYHEKYPTIYHLRKKLVDSTDKADLRLIYLALAHMIKFRGHFLIEGDLNPDNSDVDKLFIQLVQTYNQLFEENPINASGVDAKAILSARLSKSRRLENLIAQLPGEKKNGLFGNLIALSLGLTPNFKSNFDLAEDAKLQLSKDTYDDDLDNLLAQIGDQYADLFLAAKNLSDAILLSDILRVNTEITKAPLSASMIKRYDEHHQDLTLLKALVRQQLPEKYKEIFFDQSKNGYAGYIDGGASQEEFYKFIKPILEKMDGTEELLVKLNREDLLRKQRTFDNGSIPHQIHLGELHAILRRQEDFYPFLKDNREKIEKILTFRIPYYVGPLARGNSRFAWMTRKSEETITPWNFEEVVDKGASAQSFIERMTNFDKNLPNEKVLPKHSLLYEYFTVYNELTKVKYVTEGMRKPAFLSGEQKKAIVDLLFKTNRKVTVKQLKEDYFKKIECFDSVEISGVEDRFNASLGTYHDLLKIIKDKDFLDNEENEDILEDIVLTLTLFEDREMIEERLKTYAHLFDDKVMKQLKRRRYTGWGRLSRKLINGIRDKQSGKTILDFLKSDGFANRNFMQLIHDDSLTFKEDIQKAQVSGQGDSLHEHIANLAGSPAIKKGILQTVKVVDELVKVMGRHKPENIVIEMARENQTTQKGQKNSRERMKRIEEGIKELGSQILKEHPVENTQLQNEKLYLYYLQNGRDMYVDQELDINRLSDYDVDHIVPQSFLKDDSIDNKVLTRSDKARGKSDNVPSEEVVKKMKNYWRQLLNAKLITQRKFDNLTKAERGGLSELDKAGFIKRQLVETRQITKHVAQILDSRMNTKYDENDKLIREVKVITLKSKLVSDFRKDFQFYKVREINNYHHAHDAYLNAVVGTALIKKYPKLESEFVYGDYKVYDVRKMIAKSEQEIGKATAKYFFYSNIMNFFKTEITLANGEIRKRPLIETNGETGEIVWDKGRDFATVRKVLSMPQVNIVKKTEVQTGGFSKESILPKRNSDKLIARKKDWDPKKYGGFDSPTVAYSVLVVAKVEKGKSKKLKSVKELLGITIMERSSFEKNPIDFLEAKGYKEVKKDLIIKLPKYSLFELENGRKRMLASAGELQKGNELALPSKYVNFLYLASHYEKLKGSPEDNEQKQLFVEQHKHYLDEIIEQISEFSKRVILADANLDKVLSAYNKHRDKPIREQAENIIHLFTLTNLGAPAAFKYFDTTIDRKRYTSTKEVLDATLIHQSITGLYETRIDLSQLGGDGGGGSPAPGSSGGLDDEYRLYSPLVKPDQNIQFWLEQFPQAWAETAGMGLAKQVPPQVIQLKASATPVSVRQYPLSKEAQEGIRPHVQRLIQQGILVPVQSPWNTPLLPVRKPGTNDYRPVQDLREVNKRVQDIHPTVPNPYNLLCALPPQRSWYTVLDLKDAFFCLRLHPTSQPLFAFEWRDPGTGRTGQLTWTRLPQGFKNSPTIFNEALHRDLANFRIQHPQVTLLQYVDDLLLAGATKQDCLEGTKALLLELSDLGYRASAKKAQICRREVTYLGYSLRDGQRWLTEARKKTVVQIPAPTTAKQVREFLGKAGFCRLFIPGFATLAAPLYPLTKPKGEFSWAPEHQKAFDAIKKALLSAPALALPDVTKPFTLYVDERKGVARGVLTQTLGPWRRPVAYLSKKLDPVASGWPVCLKAIAAVAILVKDADKLTLGQNITVIAPHALENIVRQPPDRWMTNARMTHYQSLLLTERVTFAPPAALNPATLLPEETDEPVTHDCHQLLIEETGVRKDLTDIPLTGEVLTWFTDGSSYVVEGKRMAGAAVVDGTRTIWASSLPEGTSAQKAELMALTQALRLAEGKSINIYTDSRYAFATAHVHGAIYKQRGWLTSAGREIKNKEEILSLLEALHLPKRLAIIHCPGHQKAKDPISRGNQMADRVAKQAAQGVNLLPAGKRTADGSEFEKRTADGSEFESPKKKAKVE

SEQ ID NO: 268 - protein, 2086 aa, synthetic construct; identical to SEQ ID NO: 38

SEQ ID NO: 269 - protein, 2080 aa, synthetic construct
MPAAKRVKLDGGDKKYSIGLDIGTNSVGWAVITDEYKVPSKKFKVLGNTDRHSIKKNLIGALLFDSGETAEATRLKRTARRRYTRRKNRICYLQEIFSNEMAKVDDSFFHRLEESFLVEEDKKHERHPIFGNIVDEVAYHEKYPTIYHLRKKLVDSTDKADLRLIYLALAHMIKFRGHFLIEGDLNPDNSDVDKLFIQLVQTYNQLFEENPINASGVDAKAILSARLSKSRRLENLIAQLPGEKKNGLFGNLIALSLGLTPNFKSNFDLAEDAKLQLSKDTYDDDLDNLLAQIGDQYADLFLAAKNLSDAILLSDILRVNTEITKAPLSASMIKRYDEHHQDLTLLKALVRQQLPEKYKEIFFDQSKNGYAGYIDGGASQEEFYKFIKPILEKMDGTEELLVKLNREDLLRKQRTFDNGSIPHQIHLGELHAILRRQEDFYPFLKDNREKIEKILTFRIPYYVGPLARGNSRFAWMTRKSEETITPWNFEEVVDKGASAQSFIERMTNFDKNLPNEKVLPKHSLLYEYFTVYNELTKVKYVTEGMRKPAFLSGEQKKAIVDLLFKTNRKVTVKQLKEDYFKKIECFDSVEISGVEDRFNASLGTYHDLLKIIKDKDFLDNEENEDILEDIVLTLTLFEDREMIEERLKTYAHLFDDKVMKQLKRRRYTGWGRLSRKLINGIRDKQSGKTILDFLKSDGFANRNFMQLIHDDSLTFKEDIQKAQVSGQGDSLHEHIANLAGSPAIKKGILQTVKVVDELVKVMGRHKPENIVIEMARENQTTQKGQKNSRERMKRIEEGIKELGSQILKEHPVENTQLQNEKLYLYYLQNGRDMYVDQELDINRLSDYDVDHIVPQSFLKDDSIDNKVLTRSDKARGKSDNVPSEEVVKKMKNYWRQLLNAKLITQRKFDNLTKAERGGLSELDKAGFIKRQLVETRQITKHVAQILDSRMNTKYDENDKLIREVKVITLKSKLVSDFRKDFQFYKVREINNYHHAHDAYLNAVVGTALIKKYPKLESEFVYGDYKVYDVRKMIAKSEQEIGKATAKYFFYSNIMNFFKTEITLANGEIRKRPLIETNGETGEIVWDKGRDFATVRKVLSMPQVNIVKKTEVQTGGFSKESILPKRNSDKLIARKKDWDPKKYGGFDSPTVAYSVLVVAKVEKGKSKKLKSVKELLGITIMERSSFEKNPIDFLEAKGYKEVKKDLIIKLPKYSLFELENGRKRMLASAGELQKGNELALPSKYVNFLYLASHYEKLKGSPEDNEQKQLFVEQHKHYLDEIIEQISEFSKRVILADANLDKVLSAYNKHRDKPIREQAENIIHLFTLTNLGAPAAFKYFDTTIDRKRYTSTKEVLDATLIHQSITGLYETRIDLSQLGGDGGPAPGGLDDEYRLYSPLVKPDQNIQFWLEQFPQAWAETAGMGLAKQVPPQVIQLKASATPVSVRQYPLSKEAQEGIRPHVQRLIQQGILVPVQSPWNTPLLPVRKPGTNDYRPVQDLREVNKRVQDIHPTVPNPYNLLCALPPQRSWYTVLDLKDAFFCLRLHPTSQPLFAFEWRDPGTGRTGQLTWTRLPQGFKNSPTIFNEALHRDLANFRIQHPQVTLLQYVDDLLLAGATKQDCLEGTKALLLELSDLGYRASAKKAQICRREVTYLGYSLRDGQRWLTEARKKTVVQIPAPTTAKQVREFLGKAGFCRLFIPGFATLAAPLYPLTKPKGEFSWAPEHQKAFDAIKKALLSAPALALPDVTKPFTLYVDERKGVARGVLTQTLGPWRRPVAYLSKKLDPVASGWPVCLKAIAAVAILVKDADKLTLGQNITVIAPHALENIVRQPPDRWMTNARMTHYQSLLLTERVTFAPPAALNPATLLPEETDEPVTHDCHQLLIEETGVRKDLTDIPLTGEVLTWFTDGSSYVVEGKRMAGAAVVDGTRTIWASSLPEGTSAQKAELMALTQALRLAEGKSINIYTDSRYAFATAHVHGAIYKQRGWLTSAGREIKNKEEILSLLEALHLPKRLAIIHCPGHQKAKDPISRGNQMADRVAKQAAQGVNLLPAGKRTADGSEFEKRTADGSEFESPKKKAKVE

SEQ ID NO: 270 - protein, 2086 aa, synthetic construct; identical to SEQ ID NO: 69

SEQ ID NO: 271 - protein, 2083 aa, synthetic construct; identical to SEQ ID NO: 88

SEQ ID NO: 272 - protein, 2086 aa, synthetic construct; identical to SEQ ID NO: 85

SEQ ID NO: 273 - protein, 2085 aa, synthetic construct
MPAAKRVKLDGGDKKYSIGLDIGTNSVGWAVITDEYKVPSKKFKVLGNTDRHSIKKNLIGALLFDSGETAEATRLKRTARRRYTRRKNRICYLQEIFSNEMAKVDDSFFHRLEESFLVEEDKKHERHPIFGNIVDEVAYHEKYPTIYHLRKKLVDSTDKADLRLIYLALAHMIKFRGHFLIEGDLNPDNSDVDKLFIQLVQTYNQLFEENPINASGVDAKAILSARLSKSRRLENLIAQLPGEKKNGLFGNLIALSLGLTPNFKSNFDLAEDAKLQLSKDTYDDDLDNLLAQIGDQYADLFLAAKNLSDAILLSDILRVNTEITKAPLSASMIKRYDEHHQDLTLLKALVRQQLPEKYKEIFFDQSKNGYAGYIDGGASQEEFYKFIKPILEKMDGTEELLVKLNREDLLRKQRTFDNGSIPHQIHLGELHAILRRQEDFYPFLKDNREKIEKILTFRIPYYVGPLARGNSRFAWMTRKSEETITPWNFEEVVDKGASAQSFIERMTNFDKNLPNEKVLPKHSLLYEYFTVYNELTKVKYVTEGMRKPAFLSGEQKKAIVDLLFKTNRKVTVKQLKEDYFKKIECFDSVEISGVEDRFNASLGTYHDLLKIIKDKDFLDNEENEDILEDIVLTLTLFEDREMIEERLKTYAHLFDDKVMKQLKRRRYTGWGRLSRKLINGIRDKQSGKTILDFLKSDGFANRNFMQLIHDDSLTFKEDIQKAQVSGQGDSLHEHIANLAGSPAIKKGILQTVKVVDELVKVMGRHKPENIVIEMARENQTTQKGQKNSRERMKRIEEGIKELGSQILKEHPVENTQLQNEKLYLYYLQNGRDMYVDQELDINRLSDYDVDHIVPQSFLKDDSIDNKVLTRSDKARGKSDNVPSEEVVKKMKNYWRQLLNAKLITQRKFDNLTKAERGGLSELDKAGFIKRQLVETRQITKHVAQILDSRMNTKYDENDKLIREVKVITLKSKLVSDFRKDFQFYKVREINNYHHAHDAYLNAVVGTALIKKYPKLESEFVYGDYKVYDVRKMIAKSEQEIGKATAKYFFYSNIMNFFKTEITLANGEIRKRPLIETNGETGEIVWDKGRDFATVRKVLSMPQVNIVKKTEVQTGGFSKESILPKRNSDKLIARKKDWDPKKYGGFDSPTVAYSVLVVAKVEKGKSKKLKSVKELLGITIMERSSFEKNPIDFLEAKGYKEVKKDLIIKLPKYSLFELENGRKRMLASAGELQKGNELALPSKYVNFLYLASHYEKLKGSPEDNEQKQLFVEQHKHYLDEIIEQISEFSKRVILADANLDKVLSAYNKHRDKPIREQAENIIHLFTLTNLGAPAAFKYFDTTIDRKRYTSTKEVLDATLIHQSITGLYETRIDLSQLGGDGGGGGEAAAKGGLDDEYRLYSPLVKPDQNIQFWLEQFPQAWAETAGMGLAKQVPPQVIQLKASATPVSVRQYPLSKEAQEGIRPHVQRLIQQGILVPVQSPWNTPLLPVRKPGTNDYRPVQDLREVNKRVQDIHPTVPNPYNLLCALPPQRSWYTVLDLKDAFFCLRLHPTSQPLFAFEWRDPGTGRTGQLTWTRLPQGFKNSPTIFNEALHRDLANFRIQHPQVTLLQYVDDLLLAGATKQDCLEGTKALLLELSDLGYRASAKKAQICRREVTYLGYSLRDGQRWLTEARKKTVVQIPAPTTAKQVREFLGKAGFCRLFIPGFATLAAPLYPLTKPKGEFSWAPEHQKAFDAIKKALLSAPALALPDVTKPFTLYVDERKGVARGVLTQTLGPWRRPVAYLSKKLDPVASGWPVCLKAIAAVAILVKDADKLTLGQNITVIAPHALENIVRQPPDRWMTNARMTHYQSLLLTERVTFAPPAALNPATLLPEETDEPVTHDCHQLLIEETGVRKDLTDIPLTGEVLTWFTDGSSYVVEGKRMAGAAVVDGTRTIWASSLPEGTSAQKAELMALTQALRLAEGKSINIYTDSRYAFATAHVHGAIYKQRGWLTSAGREIKNKEEILSLLEALHLPKRLAIIHCPGHQKAKDPISRGNQMADRVAKQAAQGVNLLPAGKRTADGSEFEKRTADGSEFESPKKKAKVE

SEQ ID NO: 274 - protein, 2086 aa, synthetic construct
MPAAKRVKLDGGDKKYSIGLDIGTNSVGWAVITDEYKVPSKKFKVLGNTDRHSIKKNLIGALLFDSGETAEATRLKRTARRRYTRRKNRICYLQEIFSNEMAKVDDSFFHRLEESFLVEEDKKHERHPIFGNIVDEVAYHEKYPTIYHLRKKLVDSTDKADLRLIYLALAHMIKFRGHFLIEGDLNPDNSDVDKLFIQLVQTYNQLFEENPINASGVDAKAILSARLSKSRRLENLIAQLPGEKKNGLFGNLIALSLGLTPNFKSNFDLAEDAKLQLSKDTYDDDLDNLLAQIGDQYADLFLAAKNLSDAILLSDILRVNTEITKAPLSASMIKRYDEHHQDLTLLKALVRQQLPEKYKEIFFDQSKNGYAGYIDGGASQEEFYKFIKPILEKMDGTEELLVKLNREDLLRKQRTFDNGSIPHQIHLGELHAILRRQEDFYPFLKDNREKIEKILTFRIPYYVGPLARGNSRFAWMTRKSEETITPWNFEEVVDKGASAQSFIERMTNFDKNLPNEKVLPKHSLLYEYFTVYNELTKVKYVTEGMRKPAFLSGEQKKAIVDLLFKTNRKVTVKQLKEDYFKKIECFDSVEISGVEDRFNASLGTYHDLLKIIKDKDFLDNEENEDILEDIVLTLTLFEDREMIEERLKTYAHLFDDKVMKQLKRRRYTGWGRLSRKLINGIRDKQSGKTILDFLKSDGFANRNFMQLIHDDSLTFKEDIQKAQVSGQGDSLHEHIANLAGSPAIKKGILQTVKVVDELVKVMGRHKPENIVIEMARENQTTQKGQKNSRERMKRIEEGIKELGSQILKEHPVENTQLQNEKLYLYYLQNGRDMYVDQELDINRLSDYDVDHIVPQSFLKDDSIDNKVLTRSDKARGKSDNVPSEEVVKKMKNYWRQLLNAKLITQRKFDNLTKAERGGLSELDKAGFIKRQLVETRQITKHVAQILDSRMNTKYDENDKLIREVKVITLKSKLVSDFRKDFQFYKVREINNYHHAHDAYLNAVVGTALIKKYPKLESEFVYGDYKVYDVRKMIAKSEQEIGKATAKYFFYSNIMNFFKTEITLANGEIRKRPLIETNGETGEIVWDKGRDFATVRKVLSMPQVNIVKKTEVQTGGFSKESILPKRNSDKLIARKKDWDPKKYGGFDSPTVAYSVLVVAKVEKGKSKKLKSVKELLGITIMERSSFEKNPIDFLEAKGYKEVKKDLIIKLPKYSLFELENGRKRMLASAGELQKGNELALPSKYVNFLYLASHYEKLKGSPEDNEQKQLFVEQHKHYLDEIIEQISEFSKRVILADANLDKVLSAYNKHRDKPIREQAENIIHLFTLTNLGAPAAFKYFDTTIDRKRYTSTKEVLDATLIHQSITGLYETRIDLSQLGGDGGGGSGGGGSSGGLDDEYRLYSPLVKPDQNIQFWLEQFPQAWAETAGMGLAKQVPPQVIQLKASATPVSVRQYPLSKEAQEGIRPHVQRLIQQGILVPVQSPWNTPLLPVRKPGTNDYRPVQDLREVNKRVQDIHPTVPNPYNLLCALPPQRSWYTVLDLKDAFFCLRLHPTSQPLFAFEWRDPGTGRTGQLTWTRLPQGFKNSPTIFNEALHRDLANFRIQHPQVTLLQYVDDLLLAGATKQDCLEGTKALLLELSDLGYRASAKKAQICRREVTYLGYSLRDGQRWLTEARKKTVVQIPAPTTAKQVREFLGKAGFCRLFIPGFATLAAPLYPLTKPKGEFSWAPEHQKAFDAIKKALLSAPALALPDVTKPFTLYVDERKGVARGVLTQTLGPWRRPVAYLSKKLDPVASGWPVCLKAIAAVAILVKDADKLTLGQNITVIAPHALENIVRQPPDRWMTNARMTHYQSLLLTERVTFAPPAALNPATLLPEETDEPVTHDCHQLLIEETGVRKDLTDIPLTGEVLTWFTDGSSYVVEGKRMAGAAVVDGTRTIWASSLPEGTSAQKAELMALTQALRLAEGKSINIYTDSRYAFATAHVHGAIYKQRGWLTSAGREIKNKEEILSLLEALHLPKRLAIIHCPGHQKAKDPISRGNQMADRVAKQAAQGVNLLPAGKRTADGSEFEKRTADGSEFESPKKKAKVE

SEQ ID NO: 275 - protein, 2086 aa, synthetic construct; identical to SEQ ID NO: 91

SEQ ID NO: 276 - protein, 2086 aa, synthetic construct; identical to SEQ ID NO: 95

SEQ ID NO: 277 - protein, 2085 aa, synthetic construct
MPAAKRVKLDGGDKKYSIGLDIGTNSVGWAVITDEYKVPSKKFKVLGNTDRHSIKKNLIGALLFDSGETAEATRLKRTARRRYTRRKNRICYLQEIFSNEMAKVDDSFFHRLEESFLVEEDKKHERHPIFGNIVDEVAYHEKYPTIYHLRKKLVDSTDKADLRLIYLALAHMIKFRGHFLIEGDLNPDNSDVDKLFIQLVQTYNQLFEENPINASGVDAKAILSARLSKSRRLENLIAQLPGEKKNGLFGNLIALSLGLTPNFKSNFDLAEDAKLQLSKDTYDDDLDNLLAQIGDQYADLFLAAKNLSDAILLSDILRVNTEITKAPLSASMIKRYDEHHQDLTLLKALVRQQLPEKYKEIFFDQSKNGYAGYIDGGASQEEFYKFIKPILEKMDGTEELLVKLNREDLLRKQRTFDNGSIPHQIHLGELHAILRRQEDFYPFLKDNREKIEKILTFRIPYYVGPLARGNSRFAWMTRKSEETITPWNFEEVVDKGASAQSFIERMTNFDKNLPNEKVLPKHSLLYEYFTVYNELTKVKYVTEGMRKPAFLSGEQKKAIVDLLFKTNRKVTVKQLKEDYFKKIECFDSVEISGVEDRFNASLGTYHDLLKIIKDKDFLDNEENEDILEDIVLTLTLFEDREMIEERLKTYAHLFDDKVMKQLKRRRYTGWGRLSRKLINGIRDKQSGKTILDFLKSDGFANRNFMQLIHDDSLTFKEDIQKAQVSGQGDSLHEHIANLAGSPAIKKGILQTVKVVDELVKVMGRHKPENIVIEMARENQTTQKGQKNSRERMKRIEEGIKELGSQILKEHPVENTQLQNEKLYLYYLQNGRDMYVDQELDINRLSDYDVDHIVPQSFLKDDSIDNKVLTRSDKARGKSDNVPSEEVVKKMKNYWRQLLNAKLITQRKFDNLTKAERGGLSELDKAGFIKRQLVETRQITKHVAQILDSRMNTKYDENDKLIREVKVITLKSKLVSDFRKDFQFYKVREINNYHHAHDAYLNAVVGTALIKKYPKLESEFVYGDYKVYDVRKMIAKSEQEIGKATAKYFFYSNIMNFFKTEITLANGEIRKRPLIETNGETGEIVWDKGRDFATVRKVLSMPQVNIVKKTEVQTGGFSKESILPKRNSDKLIARKKDWDPKKYGGFDSPTVAYSVLVVAKVEKGKSKKLKSVKELLGITIMERSSFEKNPIDFLEAKGYKEVKKDLIIKLPKYSLFELENGRKRMLASAGELQKGNELALPSKYVNFLYLASHYEKLKGSPEDNEQKQLFVEQHKHYLDEIIEQISEFSKRVILADANLDKVLSAYNKHRDKPIREQAENIIHLFTLTNLGAPAAFKYFDTTIDRKRYTSTKEVLDATLIHQSITGLYETRIDLSQLGGDGGGGSEAAAKGGLDDEYRLYSPLVKPDQNIQFWLEQFPQAWAETAGMGLAKQVPPQVIQLKASATPVSVRQYPLSKEAQEGIRPHVQRLIQQGILVPVQSPWNTPLLPVRKPGTNDYRPVQDLREVNKRVQDIHPTVPNPYNLLCALPPQRSWYTVLDLKDAFFCLRLHPTSQPLFAFEWRDPGTGRTGQLTWTRLPQGFKNSPTIFNEALHRDLANFRIQHPQVTLLQYVDDLLLAGATKQDCLEGTKALLLELSDLGYRASAKKAQICRREVTYLGYSLRDGQRWLTEARKKTVVQIPAPTTAKQVREFLGKAGFCRLFIPGFATLAAPLYPLTKPKGEFSWAPEHQKAFDAIKKALLSAPALALPDVTKPFTLYVDERKGVARGVLTQTLGPWRRPVAYLSKKLDPVASGWPVCLKAIAAVAILVKDADKLTLGQNITVIAPHALENIVRQPPDRWMTNARMTHYQSLLLTERVTFAPPAALNPATLLPEETDEPVTHDCHQLLIEETGVRKDLTDIPLTGEVLTWFTDGSSYVVEGKRMAGAAVVDGTRTIWASSLPEGTSAQKAELMALTQALRLAEGKSINIYTDSRYAFATAHVHGAIYKQRGWLTSAGREIKNKEEILSLLEALHLPKRLAIIHCPGHQKAKDPISRGNQMADRVAKQAAQGVNLLPAGKRTADGSEFEKRTADGSEFESPKKKAKVE

SEQ ID NO: 278 - protein, 2090 aa, synthetic construct; identical to SEQ ID NO: 112

SEQ ID NO: 279 - protein, 2094 aa, synthetic construct
MPAAKRVKLDGGDKKYSIGLDIGTNSVGWAVITDEYKVPSKKFKVLGNTDRHSIKKNLIGALLFDSGETAEATRLKRTARRRYTRRKNRICYLQEIFSNEMAKVDDSFFHRLEESFLVEEDKKHERHPIFGNIVDEVAYHEKYPTIYHLRKKLVDSTDKADLRLIYLALAHMIKFRGHFLIEGDLNPDNSDVDKLFIQLVQTYNQLFEENPINASGVDAKAILSARLSKSRRLENLIAQLPGEKKNGLFGNLIALSLGLTPNFKSNFDLAEDAKLQLSKDTYDDDLDNLLAQIGDQYADLFLAAKNLSDAILLSDILRVNTEITKAPLSASMIKRYDEHHQDLTLLKALVRQQLPEKYKEIFFDQSKNGYAGYIDGGASQEEFYKFIKPILEKMDGTEELLVKLNREDLLRKQRTFDNGSIPHQIHLGELHAILRRQEDFYPFLKDNREKIEKILTFRIPYYVGPLARGNSRFAWMTRKSEETITPWNFEEVVDKGASAQSFIERMTNFDKNLPNEKVLPKHSLLYEYFTVYNELTKVKYVTEGMRKPAFLSGEQKKAIVDLLFKTNRKVTVKQLKEDYFKKIECFDSVEISGVEDRFNASLGTYHDLLKIIKDKDFLDNEENEDILEDIVLTLTLFEDREMIEERLKTYAHLFDDKVMKQLKRRRYTGWGRLSRKLINGIRDKQSGKTILDFLKSDGFANRNFMQLIHDDSLTFKEDIQKAQVSGQGDSLHEHIANLAGSPAIKKGILQTVKVVDELVKVMGRHKPENIVIEMARENQTTQKGQKNSRERMKRIEEGIKELGSQILKEHPVENTQLQNEKLYLYYLQNGRDMYVDQELDINRLSDYDVDHIVPQSFLKDDSIDNKVLTRSDKARGKSDNVPSEEVVKKMKNYWRQLLNAKLITQRKFDNLTKAERGGLSELDKAGFIKRQLVETRQITKHVAQILDSRMNTKYDENDKLIREVKVITLKSKLVSDFRKDFQFYKVREINNYHHAHDAYLNAVVGTALIKKYPKLESEFVYGDYKVYDVRKMIAKSEQEIGKATAKYFFYSNIMNFFKTEITLANGEIRKRPLIETNGETGEIVWDKGRDFATVRKVLSMPQVNIVKKTEVQTGGFSKESILPKRNSDKLIARKKDWDPKKYGGFDSPTVAYSVLVVAKVEKGKSKKLKSVKELLGITIMERSSFEKNPIDFLEAKGYKEVKKDLIIKLPKYSLFELENGRKRMLASAGELQKGNELALPSKYVNFLYLASHYEKLKGSPEDNEQKQLFVEQHKHYLDEIIEQISEFSKRVILADANLDKVLSAYNKHRDKPIREQAENIIHLFTLTNLGAPAAFKYFDTTIDRKRYTSTKEVLDATLIHQSITGLYETRIDLSQLGGDGGEAAAKEAAAKEAAAKGGTLQLDDEYRLYSPLVKPDQNIQFWLEQFPQAWAETAGMGLAKQVPPQVIQLKASATPVSVRQYPLSKEAQEGIRPHVQRLIQQGILVPVQSPWNTPLLPVRKPGTNDYRPVQDLREVNKRVQDIHPTVPNPYNLLCALPPQRSWYTVLDLKDAFFCLRLHPTSQPLFAFEWRDPGTGRTGQLTWTRLPQGFKNSPTIFDEALHRDLANFRIQHPQVTLLQYVDDLLLAGATKQDCLEGTKALLLELSDLGYRASAKKAQICRREVTYLGYSLRDGQRWLTEARKKTVVQIPAPTTAKQVREFLGTAGFCRLWIPGFATLAAPLYPLTKEKGEFSWAPEHQKAFDAIKKALLSAPALALPDVTKPFTLYVDERKGVARGVLTQTLGPWRRPVAYLSKKLDPVASGWPVCLKAIAAVAILVKDADKLTLGQNITVIAPHALENIVRQPPDRWMTNARMTHYQSLLLTERVTFAPPAALNPATLLPEETDEPVTHDCHQLLIEETGVRKDLTDIPLTGEVLTWFTDGSSYVVEGKRMAGAAVVDGTRTIWASSLPEGTSAQKAELMALTQALRLAEGKSINIYTDSRYAFATAHVHGAIYKQRGLLTSAGREIKNKEEILSLLEALHLPKRLAIIHCPGHQKAKDPISRGNQMADRVAKQAAQGVNLLAGKRTADGSEFEKRTADGSEFESPKKKAKVE

SEQ ID NO: 280 - protein, 2109 aa, synthetic construct
MPAAKRVKLDGGDKKYSIGLDIGTNSVGWAVITDEYKVPSKKFKVLGNTDRHSIKKNLIGALLFDSGETAEATRLKRTARRRYTRRKNRICYLQEIFSNEMAKVDDSFFHRLEESFLVEEDKKHERHPIFGNIVDEVAYHEKYPTIYHLRKKLVDSTDKADLRLIYLALAHMIKFRGHFLIEGDLNPDNSDVDKLFIQLVQTYNQLFEENPINASGVDAKAILSARLSKSRRLENLIAQLPGEKKNGLFGNLIALSLGLTPNFKSNFDLAEDAKLQLSKDTYDDDLDNLLAQIGDQYADLFLAAKNLSDAILLSDILRVNTEITKAPLSASMIKRYDEHHQDLTLLKALVRQQLPEKYKEIFFDQSKNGYAGYIDGGASQEEFYKFIKPILEKMDGTEELLVKLNREDLLRKQRTFDNGSIPHQIHLGELHAILRRQEDFYPFLKDNREKIEKILTFRIPYYVGPLARGNSRFAWMTRKSEETITPWNFEEVVDKGASAQSFIERMTNFDKNLPNEKVLPKHSLLYEYFTVYNELTKVKYVTEGMRKPAFLSGEQKKAIVDLLFKTNRKVTVKQLKEDYFKKIECFDSVEISGVEDRFNASLGTYHDLLKIIKDKDFLDNEENEDILEDIVLTLTLFEDREMIEERLKTYAHLFDDKVMKQLKRRRYTGWGRLSRKLINGIRDKQSGKTILDFLKSDGFANRNFMQLIHDDSLTFKEDIQKAQVSGQGDSLHEHIANLAGSPAIKKGILQTVKVVDELVKVMGRHKPENIVIEMARENQTTQKGQKNSRERMKRIEEGIKELGSQILKEHPVENTQLQNEKLYLYYLQNGRDMYVDQELDINRLSDYDVDHIVPQSFLKDDSIDNKVLTRSDKARGKSDNVPSEEVVKKMKNYWRQLLNAKLITQRKFDNLTKAERGGLSELDKAGFIKRQLVETRQITKHVAQILDSRMNTKYDENDKLIREVKVITLKSKLVSDFRKDFQFYKVREINNYHHAHDAYLNAVVGTALIKKYPKLESEFVYGDYKVYDVRKMIAKSEQEIGKATAKYFFYSNIMNFFKTEITLANGEIRKRPLIETNGETGEIVWDKGRDFATVRKVLSMPQVNIVKKTEVQTGGFSKESILPKRNSDKLIARKKDWDPKKYGGFDSPTVAYSVLVVAKVEKGKSKKLKSVKELLGITIMERSSFEKNPIDFLEAKGYKEVKKDLIIKLPKYSLFELENGRKRMLASAGELQKGNELALPSKYVNFLYLASHYEKLKGSPEDNEQKQLFVEQHKHYLDEIIEQISEFSKRVILADANLDKVLSAYNKHRDKPIREQAENIIHLFTLTNLGAPAAFKYFDTTIDRKRYTSTKEVLDATLIHQSITGLYETRIDLSQLGGDGGEAAAKEAAAKEAAAKEAAAKEAAAKEAAAKGGTLQLDDEYRLYSPLVKPDQNIQFWLEQFPQAWAETAGMGLAKQVPPQVIQLKASATPVSVRQYPLSKEAQEGIRPHVQRLIQQGILVPVQSPWNTPLLPVRKPGTNDYRPVQDLREVNKRVQDIHPTVPNPYNLLCALPPQRSWYTVLDLKDAFFCLRLHPTSQPLFAFEWRDPGTGRTGQLTWTRLPQGFKNSPTIFDEALHRDLANFRIQHPQVTLLQYVDDLLLAGATKQDCLEGTKALLLELSDLGYRASAKKAQICRREVTYLGYSLRDGQRWLTEARKKTVVQIPAPTTAKQVREFLGTAGFCRLWIPGFATLAAPLYPLTKEKGEFSWAPEHQKAFDAIKKALLSAPALALPDVTKPFTLYVDERKGVARGVLTQTLGPWRRPVAYLSKKLDPVASGWPVCLKAIAAVAILVKDADKLTLGQNITVIAPHALENIVRQPPDRWMTNARMTHYQSLLLTERVTFAPPAALNPATLLPEETDEPVTHDCHQLLIEETGVRKDLTDIPLTGEVLTWFTDGSSYVVEGKRMAGAAVVDGTRTIWASSLPEGTSAQKAELMALTQALRLAEGKSINIYTDSRYAFATAHVHGAIYKQRGLLTSAGREIKNKEEILSLLEALHLPKRLAIIHCPGHQKAKDPISRGNQMADRVAKQAAQGVNLLAGKRTADGSEFEKRTADGSEFESPKKKAKVE

SEQ ID NO: 281 - protein, 2088 aa, synthetic construct
MPAAKRVKLDGGDKKYSIGLDIGTNSVGWAVITDEYKVPSKKFKVLGNTDRHSIKKNLIGALLFDSGETAEATRLKRTARRRYTRRKNRICYLQEIFSNEMAKVDDSFFHRLEESFLVEEDKKHERHPIFGNIVDEVAYHEKYPTIYHLRKKLVDSTDKADLRLIYLALAHMIKFRGHFLIEGDLNPDNSDVDKLFIQLVQTYNQLFEENPINASGVDAKAILSARLSKSRRLENLIAQLPGEKKNGLFGNLIALSLGLTPNFKSNFDLAEDAKLQLSKDTYDDDLDNLLAQIGDQYADLFLAAKNLSDAILLSDILRVNTEITKAPLSASMIKRYDEHHQDLTLLKALVRQQLPEKYKEIFFDQSKNGYAGYIDGGASQEEFYKFIKPILEKMDGTEELLVKLNREDLLRKQRTFDNGSIPHQIHLGELHAILRRQEDFYPFLKDNREKIEKILTFRIPYYVGPLARGNSRFAWMTRKSEETITPWNFEEVVDKGASAQSFIERMTNFDKNLPNEKVLPKHSLLYEYFTVYNELTKVKYVTEGMRKPAFLSGEQKKAIVDLLFKTNRKVTVKQLKEDYFKKIECFDSVEISGVEDRFNASLGTYHDLLKIIKDKDFLDNEENEDILEDIVLTLTLFEDREMIEERLKTYAHLFDDKVMKQLKRRRYTGWGRLSRKLINGIRDKQSGKTILDFLKSDGFANRNFMQLIHDDSLTFKEDIQKAQVSGQGDSLHEHIANLAGSPAIKKGILQTVKVVDELVKVMGRHKPENIVIEMARENQTTQKGQKNSRERMKRIEEGIKELGSQILKEHPVENTQLQNEKLYLYYLQNGRDMYVDQELDINRLSDYDVDHIVPQSFLKDDSIDNKVLTRSDKARGKSDNVPSEEVVKKMKNYWRQLLNAKLITQRKFDNLTKAERGGLSELDKAGFIKRQLVETRQITKHVAQILDSRMNTKYDENDKLIREVKVITLKSKLVSDFRKDFQFYKVREINNYHHAHDAYLNAVVGTALIKKYPKLESEFVYGDYKVYDVRKMIAKSEQEIGKATAKYFFYSNIMNFFKTEITLANGEIRKRPLIETNGETGEIVWDKGRDFATVRKVLSMPQVNIVKKTEVQTGGFSKESILPKRNSDKLIARKKDWDPKKYGGFDSPTVAYSVLVVAKVEKGKSKKLKSVKELLGITIMERSSFEKNPIDFLEAKGYKEVKKDLIIKLPKYSLFELENGRKRMLASAGELQKGNELALPSKYVNFLYLASHYEKLKGSPEDNEQKQLFVEQHKHYLDEIIEQISEFSKRVILADANLDKVLSAYNKHRDKPIREQAENIIHLFTLTNLGAPAAFKYFDTTIDRKRYTSTKEVLDATLIHQSITGLYETRIDLSQLGGDGGPAPGGSGSSGGTLQLDDEYRLYSPLVKPDQNIQFWLEQFPQAWAETAGMGLAKQVPPQVIQLKASATPVSVRQYPLSKEAQEGIRPHVQRLIQQGILVPVQSPWNTPLLPVRKPGTNDYRPVQDLREVNKRVQDIHPTVPNPYNLLCALPPQRSWYTVLDLKDAFFCLRLHPTSQPLFAFEWRDPGTGRTGQLTWTRLPQGFKNSPTIFDEALHRDLANFRIQHPQVTLLQYVDDLLLAGATKQDCLEGTKALLLELSDLGYRASAKKAQICRREVTYLGYSLRDGQRWLTEARKKTVVQIPAPTTAKQVREFLGTAGFCRLWIPGFATLAAPLYPLTKEKGEFSWAPEHQKAFDAIKKALLSAPALALPDVTKPFTLYVDERKGVARGVLTQTLGPWRRPVAYLSKKLDPVASGWPVCLKAIAAVAILVKDADKLTLGQNITVIAPHALENIVRQPPDRWMTNARMTHYQSLLLTERVTFAPPAALNPATLLPEETDEPVTHDCHQLLIEETGVRKDLTDIPLTGEVLTWFTDGSSYVVEGKRMAGAAVVDGTRTIWASSLPEGTSAQKAELMALTQALRLAEGKSINIYTDSRYAFATAHVHGAIYKQRGLLTSAGREIKNKEEILSLLEALHLPKRLAIIHCPGHQKAKDPISRGNQMADRVAKQAAQGVNLLAGKRTADGSEFEKRTADGSEFESPKKKAKVE

SEQ ID NO: 282 - protein, 2087 aa, synthetic construct
MPAAKRVKLDGGDKKYSIGLDIGTNSVGWAVITDEYKVPSKKFKVLGNTDRHSIKKNLIGALLFDSGETAEATRLKRTARRRYTRRKNRICYLQEIFSNEMAKVDDSFFHRLEESFLVEEDKKHERHPIFGNIVDEVAYHEKYPTIYHLRKKLVDSTDKADLRLIYLALAHMIKFRGHFLIEGDLNPDNSDVDKLFIQLVQTYNQLFEENPINASGVDAKAILSARLSKSRRLENLIAQLPGEKKNGLFGNLIALSLGLTPNFKSNFDLAEDAKLQLSKDTYDDDLDNLLAQIGDQYADLFLAAKNLSDAILLSDILRVNTEITKAPLSASMIKRYDEHHQDLTLLKALVRQQLPEKYKEIFFDQSKNGYAGYIDGGASQEEFYKFIKPILEKMDGTEELLVKLNREDLLRKQRTFDNGSIPHQIHLGELHAILRRQEDFYPFLKDNREKIEKILTFRIPYYVGPLARGNSRFAWMTRKSEETITPWNFEEVVDKGASAQSFIERMTNFDKNLPNEKVLPKHSLLYEYFTVYNELTKVKYVTEGMRKPAFLSGEQKKAIVDLLFKTNRKVTVKQLKEDYFKKIECFDSVEISGVEDRFNASLGTYHDLLKIIKDKDFLDNEENEDILEDIVLTLTLFEDREMIEERLKTYAHLFDDKVMKQLKRRRYTGWGRLSRKLINGIRDKQSGKTILDFLKSDGFANRNFMQLIHDDSLTFKEDIQKAQVSGQGDSLHEHIANLAGSPAIKKGILQTVKVVDELVKVMGRHKPENIVIEMARENQTTQKGQKNSRERMKRIEEGIKELGSQILKEHPVENTQLQNEKLYLYYLQNGRDMYVDQELDINRLSDYDVDHIVPQSFLKDDSIDNKVLTRSDKARGKSDNVPSEEVVKKMKNYWRQLLNAKLITQRKFDNLTKAERGGLSELDKAGFIKRQLVETRQITKHVAQILDSRMNTKYDENDKLIREVKVITLKSKLVSDFRKDFQFYKVREINNYHHAHDAYLNAVVGTALIKKYPKLESEFVYGDYKVYDVRKMIAKSEQEIGKATAKYFFYSNIMNFFKTEITLANGEIRKRPLIETNGETGEIVWDKGRDFATVRKVLSMPQVNIVKKTEVQTGGFSKESILPKRNSDKLIARKKDWDPKKYGGFDSPTVAYSVLVVAKVEKGKSKKLKSVKELLGITIMERSSFEKNPIDFLEAKGYKEVKKDLIIKLPKYSLFELENGRKRMLASAGELQKGNELALPSKYVNFLYLASHYEKLKGSPEDNEQKQLFVEQHKHYLDEIIEQISEFSKRVILADANLDKVLSAYNKHRDKPIREQAENIIHLFTLTNLGAPAAFKYFDTTIDRKRYTSTKEVLDATLIHQSITGLYETRIDLSQLGGDGGEAAAKGGGGGTLQLDDEYRLYSPLVKPDQNIQFWLEQFPQAWAETAGMGLAKQVPPQVIQLKASATPVSVRQYPLSKEAQEGIRPHVQRLIQQGILVPVQSPWNTPLLPVRKPGTNDYRPVQDLREVNKRVQDIHPTVPNPYNLLCALPPQRSWYTVLDLKDAFFCLRLHPTSQPLFAFEWRDPGTGRTGQLTWTRLPQGFKNSPTIFDEALHRDLANFRIQHPQVTLLQYVDDLLLAGATKQDCLEGTKALLLELSDLGYRASAKKAQICRREVTYLGYSLRDGQRWLTEARKKTVVQIPAPTTAKQVREFLGTAGFCRLWIPGFATLAAPLYPLTKEKGEFSWAPEHQKAFDAIKKALLSAPALALPDVTKPFTLYVDERKGVARGVLTQTLGPWRRPVAYLSKKLDPVASGWPVCLKAIAAVAILVKDADKLTLGQNITVIAPHALENIVRQPPDRWMTNARMTHYQSLLLTERVTFAPPAALNPATLLPEETDEPVTHDCHQLLIEETGVRKDLTDIPLTGEVLTWFTDGSSYVVEGKRMAGAAVVDGTRTIWASSLPEGTSAQKAELMALTQALRLAEGKSINIYTDSRYAFATAHVHGAIYKQRGLLTSAGREIKNKEEILSLLEALHLPKRLAIIHCPGHQKAKDPISRGNQMADRVAKQAAQGVNLLAGKRTADGSEFEKRTADGSEFESPKKKAKVE

SEQ ID NO: 283 - protein, 2091 aa, synthetic construct
MPAAKRVKLDGGDKKYSIGLDIGTNSVGWAVITDEYKVPSKKFKVLGNTDRHSIKKNLIGALLFDSGETAEATRLKRTARRRYTRRKNRICYLQEIFSNEMAKVDDSFFHRLEESFLVEEDKKHERHPIFGNIVDEVAYHEKYPTIYHLRKKLVDSTDKADLRLIYLALAHMIKFRGHFLIEGDLNPDNSDVDKLFIQLVQTYNQLFEENPINASGVDAKAILSARLSKSRRLENLIAQLPGEKKNGLFGNLIALSLGLTPNFKSNFDLAEDAKLQLSKDTYDDDLDNLLAQIGDQYADLFLAAKNLSDAILLSDILRVNTEITKAPLSASMIKRYDEHHQDLTLLKALVRQQLPEKYKEIFFDQSKNGYAGYIDGGASQEEFYKFIKPILEKMDGTEELLVKLNREDLLRKQRTFDNGSIPHQIHLGELHAILRRQEDFYPFLKDNREKIEKILTFRIPYYVGPLARGNSRFAWMTRKSEETITPWNFEEVVDKGASAQSFIERMTNFDKNLPNEKVLPKHSLLYEYFTVYNELTKVKYVTEGMRKPAFLSGEQKKAIVDLLFKTNRKVTVKQLKEDYFKKIECFDSVEISGVEDRFNASLGTYHDLLKIIKDKDFLDNEENEDILEDIVLTLTLFEDREMIEERLKTYAHLFDDKVMKQLKRRRYTGWGRLSRKLINGIRDKQSGKTILDFLKSDGFANRNFMQLIHDDSLTFKEDIQKAQVSGQGDSLHEHIANLAGSPAIKKGILQTVKVVDELVKVMGRHKPENIVIEMARENQTTQKGQKNSRERMKRIEEGIKELGSQILKEHPVENTQLQNEKLYLYYLQNGRDMYVDQELDINRLSDYDVDHIVPQSFLKDDSIDNKVLTRSDKARGKSDNVPSEEVVKKMKNYWRQLLNAKLITQRKFDNLTKAERGGLSELDKAGFIKRQLVETRQITKHVAQILDSRMNTKYDENDKLIREVKVITLKSKLVSDFRKDFQFYKVREINNYHHAHDAYLNAVVGTALIKKYPKLESEFVYGDYKVYDVRKMIAKSEQEIGKATAKYFFYSNIMNFFKTEITLANGEIRKRPLIETNGETGEIVWDKGRDFATVRKVLSMPQVNIVKKTEVQTGGFSKESILPKRNSDKLIARKKDWDPKKYGGFDSPTVAYSVLVVAKVEKGKSKKLKSVKELLGITIMERSSFEKNPIDFLEAKGYKEVKKDLIIKLPKYSLFELENGRKRMLASAGELQKGNELALPSKYVNFLYLASHYEKLKGSPEDNEQKQLFVEQHKHYLDEIIEQISEFSKRVILADANLDKVLSAYNKHRDKPIREQAENIIHLFTLTNLGAPAAFKYFDTTIDRKRYTSTKEVLDATLIHQSITGLYETRIDLSQLGGDGGGSAGSAAGSGEFGGTLQLDDEYRLYSPLVKPDQNIQFWLEQFPQAWAETAGMGLAKQVPPQVIQLKASATPVSVRQYPLSKEAQEGIRPHVQRLIQQGILVPVQSPWNTPLLPVRKPGTNDYRPVQDLREVNKRVQDIHPTVPNPYNLLCALPPQRSWYTVLDLKDAFFCLRLHPTSQPLFAFEWRDPGTGRTGQLTWTRLPQGFKNSPTIFDEALHRDLANFRIQHPQVTLLQYVDDLLLAGATKQDCLEGTKALLLELSDLGYRASAKKAQICRREVTYLGYSLRDGQRWLTEARKKTVVQIPAPTTAKQVREFLGTAGFCRLWIPGFATLAAPLYPLTKEKGEFSWAPEHQKAFDAIKKALLSAPALALPDVTKPFTLYVDERKGVARGVLTQTLGPWRRPVAYLSKKLDPVASGWPVCLKAIAAVAILVKDADKLTLGQNITVIAPHALENIVRQPPDRWMTNARMTHYQSLLLTERVTFAPPAALNPATLLPEETDEPVTHDCHQLLIEETGVRKDLTDIPLTGEVLTWFTDGSSYVVEGKRMAGAAVVDGTRTIWASSLPEGTSAQKAELMALTQALRLAEGKSINIYTDSRYAFATAHVHGAIYKQRGLLTSAGREIKNKEEILSLLEALHLPKRLAIIHCPGHQKAKDPISRGNQMADRVAKQAAQGVNLLAGKRTADGSEFEKRTADGSEFESPKKKAKVE

SEQ ID NO: 284 - protein, 2088 aa, synthetic construct
MPAAKRVKLDGGDKKYSIGLDIGTNSVGWAVITDEYKVPSKKFKVLGNTDRHSIKKNLIGALLFDSGETAEATRLKRTARRRYTRRKNRICYLQEIFSNEMAKVDDSFFHRLEESFLVEEDKKHERHPIFGNIVDEVAYHEKYPTIYHLRKKLVDSTDKADLRLIYLALAHMIKFRGHFLIEGDLNPDNSDVDKLFIQLVQTYNQLFEENPINASGVDAKAILSARLSKSRRLENLIAQLPGEKKNGLFGNLIALSLGLTPNFKSNFDLAEDAKLQLSKDTYDDDLDNLLAQIGDQYADLFLAAKNLSDAILLSDILRVNTEITKAPLSASMIKRYDEHHQDLTLLKALVRQQLPEKYKEIFFDQSKNGYAGYIDGGASQEEFYKFIKPILEKMDGTEELLVKLNREDLLRKQRTFDNGSIPHQIHLGELHAILRRQEDFYPFLKDNREKIEKILTFRIPYYVGPLARGNSRFAWMTRKSEETITPWNFEEVVDKGASAQSFIERMTNFDKNLPNEKVLPKHSLLYEYFTVYNELTKVKYVTEGMRKPAFLSGEQKKAIVDLLFKTNRKVTVKQLKEDYFKKIECFDSVEISGVEDRFNASLGTYHDLLKIIKDKDFLDNEENEDILEDIVLTLTLFEDREMIEERLKTYAHLFDDKVMKQLKRRRYTGWGRLSRKLINGIRDKQSGKTILDFLKSDGFANRNFMQLIHDDSLTFKEDIQKAQVSGQGDSLHEHIANLAGSPAIKKGILQTVKVVDELVKVMGRHKPENIVIEMARENQTTQKGQKNSRERMKRIEEGIKELGSQILKEHPVENTQLQNEKLYLYYLQNGRDMYVDQELDINRLSDYDVDHIVPQSFLKDDSIDNKVLTRSDKARGKSDNVPSEEVVKKMKNYWRQLLNAKLITQRKFDNLTKAERGGLSELDKAGFIKRQLVETRQITKHVAQILDSRMNTKYDENDKLIREVKVITLKSKLVSDFRKDFQFYKVREINNYHHAHDAYLNAVVGTALIKKYPKLESEFVYGDYKVYDVRKMIAKSEQEIGKATAKYFFYSNIMNFFKTEITLANGEIRKRPLIETNGETGEIVWDKGRDFATVRKVLSMPQVNIVKKTEVQTGGFSKESILPKRNSDKLIARKKDWDPKKYGGFDSPTVAYSVLVVAKVEKGKSKKLKSVKELLGITIMERSSFEKNPIDFLEAKGYKEVKKDLIIKLPKYSLFELENGRKRMLASAGELQKGNELALPSKYVNFLYLASHYEKLKGSPEDNEQKQLFVEQHKHYLDEIIEQISEFSKRVILADANLDKVLSAYNKHRDKPIREQAENIIHLFTLTNLGAPAAFKYFDTTIDRKRYTSTKEVLDATLIHQSITGLYETRIDLSQLGGDGGGSSGGGGGSGGTLQLDDEYRLYSPLVKPDQNIQFWLEQFPQAWAETAGMGLAKQVPPQVIQLKASATPVSVRQYPLSKEAQEGIRPHVQRLIQQGILVPVQSPWNTPLLPVRKPGTNDYRPVQDLREVNKRVQDIHPTVPNPYNLLCALPPQRSWYTVLDLKDAFFCLRLHPTSQPLFAFEWRDPGTGRTGQLTWTRLPQGFKNSPTIFDEALHRDLANFRIQHPQVTLLQYVDDLLLAGATKQDCLEGTKALLLELSDLGYRASAKKAQICRREVTYLGYSLRDGQRWLTEARKKTVVQIPAPTTAKQVREFLGTAGFCRLWIPGFATLAAPLYPLTKEKGEFSWAPEHQKAFDAIKKALLSAPALALPDVTKPFTLYVDERKGVARGVLTQTLGPWRRPVAYLSKKLDPVASGWPVCLKAIAAVAILVKDADKLTLGQNITVIAPHALENIVRQPPDRWMTNARMTHYQSLLLTERVTFAPPAALNPATLLPEETDEPVTHDCHQLLIEETGVRKDLTDIPLTGEVLTWFTDGSSYVVEGKRMAGAAVVDGTRTIWASSLPEGTSAQKAELMALTQALRLAEGKSINIYTDSRYAFATAHVHGAIYKQRGLLTSAGREIKNKEEILSLLEALHLPKRLAIIHCPGHQKAKDPISRGNQMADRVAKQAAQGVNLLAGKRTADGSEFEKRTADGSEFESPKKKAKVE

SEQ ID NO: 285 - protein, 2090 aa, synthetic construct
MPAAKRVKLDGGDKKYSIGLDIGTNSVGWAVITDEYKVPSKKFKVLGNTDRHSIKKNLIGALLFDSGETAEATRLKRTARRRYTRRKNRICYLQEIFSNEMAKVDDSFFHRLEESFLVEEDKKHERHPIFGNIVDEVAYHEKYPTIYHLRKKLVDSTDKADLRLIYLALAHMIKFRGHFLIEGDLNPDNSDVDKLFIQLVQTYNQLFEENPINASGVDAKAILSARLSKSRRLENLIAQLPGEKKNGLFGNLIALSLGLTPNFKSNFDLAEDAKLQLSKDTYDDDLDNLLAQIGDQYADLFLAAKNLSDAILLSDILRVNTEITKAPLSASMIKRYDEHHQDLTLLKALVRQQLPEKYKEIFFDQSKNGYAGYIDGGASQEEFYKFIKPILEKMDGTEELLVKLNREDLLRKQRTFDNGSIPHQIHLGELHAILRRQEDFYPFLKDNREKIEKILTFRIPYYVGPLARGNSRFAWMTRKSEETITPWNFEEVVDKGASAQSFIERMTNFDKNLPNEKVLPKHSLLYEYFTVYNELTKVKYVTEGMRKPAFLSGEQKKAIVDLLFKTNRKVTVKQLKEDYFKKIECFDSVEISGVEDRFNASLGTYHDLLKIIKDKDFLDNEENEDILEDIVLTLTLFEDREMIEERLKTYAHLFDDKVMKQLKRRRYTGWGRLSRKLINGIRDKQSGKTILDFLKSDGFANRNFMQLIHDDSLTFKEDIQKAQVSGQGDSLHEHIANLAGSPAIKKGILQTVKVVDELVKVMGRHKPENIVIEMARENQTTQKGQKNSRERMKRIEEGIKELGSQILKEHPVENTQLQNEKLYLYYLQNGRDMYVDQELDINRLSDYDVDHIVPQSFLKDDSIDNKVLTRSDKARGKSDNVPSEEVVKKMKNYWRQLLNAKLITQRKFDNLTKAERGGLSELDKAGFIKRQLVETRQITKHVAQILDSRMNTKYDENDKLIREVKVITLKSKLVSDFRKDFQFYKVREINNYHHAHDAYLNAVVGTALIKKYPKLESEFVYGDYKVYDVRKMIAKSEQEIGKATAKYFFYSNIMNFFKTEITLANGEIRKRPLIETNGETGEIVWDKGRDFATVRKVLSMPQVNIVKKTEVQTGGFSKESILPKRNSDKLIARKKDWDPKKYGGFDSPTVAYSVLVVAKVEKGKSKKLKSVKELLGITIMERSSFEKNPIDFLEAKGYKEVKKDLIIKLPKYSLFELENGRKRMLASAGELQKGNELALPSKYVNFLYLASHYEKLKGSPEDNEQKQLFVEQHKHYLDEIIEQISEFSKRVILADANLDKVLSAYNKHRDKPIREQAENIIHLFTLTNLGAPAAFKYFDTTIDRKRYTSTKEVLDATLIHQSITGLYETRIDLSQLGGDGGGSSEAAAKGGGGGTLQLDDEYRLYSPLVKPDQNIQFWLEQFPQAWAETAGMGLAKQVPPQVIQLKASATPVSVRQYPLSKEAQEGIRPHVQRLIQQGILVPVQSPWNTPLLPVRKPGTNDYRPVQDLREVNKRVQDIHPTVPNPYNLLCALPPQRSWYTVLDLKDAFFCLRLHPTSQPLFAFEWRDPGTGRTGQLTWTRLPQGFKNSPTIFDEALHRDLANFRIQHPQVTLLQYVDDLLLAGATKQDCLEGTKALLLELSDLGYRASAKKAQICRREVTYLGYSLRDGQRWLTEARKKTVVQIPAPTTAKQVREFLGTAGFCRLWIPGFATLAAPLYPLTKEKGEFSWAPEHQKAFDAIKKALLSAPALALPDVTKPFTLYVDERKGVARGVLTQTLGPWRRPVAYLSKKLDPVASGWPVCLKAIAAVAILVKDADKLTLGQNITVIAPHALENIVRQPPDRWMTNARMTHYQSLLLTERVTFAPPAALNPATLLPEETDEPVTHDCHQLLIEETGVRKDLTDIPLTGEVLTWFTDGSSYVVEGKRMAGAAVVDGTRTIWASSLPEGTSAQKAELMALTQALRLAEGKSINIYTDSRYAFATAHVHGAIYKQRGLLTSAGREIKNKEEILSLLEALHLPKRLAIIHCPGHQKAKDPISRGNQMADRVAKQAAQGVNLLAGKRTADGSEFEKRTADGSEFESPKKKAKVE

SEQ ID NO: 286 - protein, 2090 aa, synthetic construct
MPAAKRVKLDGGDKKYSIGLDIGTNSVGWAVITDEYKVPSKKFKVLGNTDRHSIKKNLIGALLFDSGETAEATRLKRTARRRYTRRKNRICYLQEIFSNEMAKVDDSFFHRLEESFLVEEDKKHERHPIFGNIVDEVAYHEKYPTIYHLRKKLVDSTDKADLRLIYLALAHMIKFRGHFLIEGDLNPDNSDVDKLFIQLVQTYNQLFEENPINASGVDAKAILSARLSKSRRLENLIAQLPGEKKNGLFGNLIALSLGLTPNFKSNFDLAEDAKLQLSKDTYDDDLDNLLAQIGDQYADLFLAAKNLSDAILLSDILRVNTEITKAPLSASMIKRYDEHHQDLTLLKALVRQQLPEKYKEIFFDQSKNGYAGYIDGGASQEEFYKFIKPILEKMDGTEELLVKLNREDLLRKQRTFDNGSIPHQIHLGELHAILRRQEDFYPFLKDNREKIEKILTFRIPYYVGPLARGNSRFAWMTRKSEETITPWNFEEVVDKGASAQSFIERMTNFDKNLPNEKVLPKHSLLYEYFTVYNELTKVKYVTEGMRKPAFLSGEQKKAIVDLLFKTNRKVTVKQLKEDYFKKIECFDSVEISGVEDRFNASLGTYHDLLKIIKDKDFLDNEENEDILEDIVLTLTLFEDREMIEERLKTYAHLFDDKVMKQLKRRRYTGWGRLSRKLINGIRDKQSGKTILDFLKSDGFANRNFMQLIHDDSLTFKEDIQKAQVSGQGDSLHEHIANLAGSPAIKKGILQTVKVVDELVKVMGRHKPENIVIEMARENQTTQKGQKNSRERMKRIEEGIKELGSQILKEHPVENTQLQNEKLYLYYLQNGRDMYVDQELDINRLSDYDVDHIVPQSFLKDDSIDNKVLTRSDKARGKSDNVPSEEVVKKMKNYWRQLLNAKLITQRKFDNLTKAERGGLSELDKAGFIKRQLVETRQITKHVAQILDSRMNTKYDENDKLIREVKVITLKSKLVSDFRKDFQFYKVREINNYHHAHDAYLNAVVGTALIKKYPKLESEFVYGDYKVYDVRKMIAKSEQEIGKATAKYFFYSNIMNFFKTEITLANGEIRKRPLIETNGETGEIVWDKGRDFATVRKVLSMPQVNIVKKTEVQTGGFSKESILPKRNSDKLIARKKDWDPKKYGGFDSPTVAYSVLVVAKVEKGKSKKLKSVKELLGITIMERSSFEKNPIDFLEAKGYKEVKKDLIIKLPKYSLFELENGRKRMLASAGELQKGNELALPSKYVNFLYLASHYEKLKGSPEDNEQKQLFVEQHKHYLDEIIEQISEFSKRVILADANLDKVLSAYNKHRDKPIREQAENIIHLFTLTNLGAPAAFKYFDTTIDRKRYTSTKEVLDATLIHQSITGLYETRIDLSQLGGDGGGGSGGGEAAAKGGTLQLDDEYRLYSPLVKPDQNIQFWLEQFPQAWAETAGMGLAKQVPPQVIQLKASATPVSVRQYPLSKEAQEGIRPHVQRLIQQGILVPVQSPWNTPLLPVRKPGTNDYRPVQDLREVNKRVQDIHPTVPNPYNLLCALPPQRSWYTVLDLKDAFFCLRLHPTSQPLFAFEWRDPGTGRTGQLTWTRLPQGFKNSPTIFDEALHRDLANFRIQHPQVTLLQYVDDLLLAGATKQDCLEGTKALLLELSDLGYRASAKKAQICRREVTYLGYSLRDGQRWLTEARKKTVVQIPAPTTAKQVREFLGTAGFCRLWIPGFATLAAPLYPLTKEKGEFSWAPEHQKAFDAIKKALLSAPALALPDVTKPFTLYVDERKGVARGVLTQTLGPWRRPVAYLSKKLDPVASGWPVCLKAIAAVAILVKDADKLTLGQNITVIAPHALENIVRQPPDRWMTNARMTHYQSLLLTERVTFAPPAALNPATLLPEETDEPVTHDCHQLLIEETGVRKDLTDIPLTGEVLTWFTDGSSYVVEGKRMAGAAVVDGTRTIWASSLPEGTSAQKAELMALTQALRLAEGKSINIYTDSRYAFATAHVHGAIYKQRGLLTSAGREIKNKEEILSLLEALHLPKRLAIIHCPGHQKAKDPISRGNQMADRVAKQAAQGVNLLAGKRTADGSEFEKRTADGSEFESPKKKAKVE

SEQ ID NO: 287 - protein, 2090 aa, synthetic construct
MPAAKRVKLDGGDKKYSIGLDIGTNSVGWAVITDEYKVPSKKFKVLGNTDRHSIKKNLIGALLFDSGETAEATRLKRTARRRYTRRKNRICYLQEIFSNEMAKVDDSFFHRLEESFLVEEDKKHERHPIFGNIVDEVAYHEKYPTIYHLRKKLVDSTDKADLRLIYLALAHMIKFRGHFLIEGDLNPDNSDVDKLFIQLVQTYNQLFEENPINASGVDAKAILSARLSKSRRLENLIAQLPGEKKNGLFGNLIALSLGLTPNFKSNFDLAEDAKLQLSKDTYDDDLDNLLAQIGDQYADLFLAAKNLSDAILLSDILRVNTEITKAPLSASMIKRYDEHHQDLTLLKALVRQQLPEKYKEIFFDQSKNGYAGYIDGGASQEEFYKFIKPILEKMDGTEELLVKLNREDLLRKQRTFDNGSIPHQIHLGELHAILRRQEDFYPFLKDNREKIEKILTFRIPYYVGPLARGNSRFAWMTRKSEETITPWNFEEVVDKGASAQSFIERMTNFDKNLPNEKVLPKHSLLYEYFTVYNELTKVKYVTEGMRKPAFLSGEQKKAIVDLLFKTNRKVTVKQLKEDYFKKIECFDSVEISGVEDRFNASLGTYHDLLKIIKDKDFLDNEENEDILEDIVLTLTLFEDREMIEERLKTYAHLFDDKVMKQLKRRRYTGWGRLSRKLINGIRDKQSGKTILDFLKSDGFANRNFMQLIHDDSLTFKEDIQKAQVSGQGDSLHEHIANLAGSPAIKKGILQTVKVVDELVKVMGRHKPENIVIEMARENQTTQKGQKNSRERMKRIEEGIKELGSQILKEHPVENTQLQNEKLYLYYLQNGRDMYVDQELDINRLSDYDVDHIVPQSFLKDDSIDNKVLTRSDKARGKSDNVPSEEVVKKMKNYWRQLLNAKLITQRKFDNLTKAERGGLSELDKAGFIKRQLVETRQITKHVAQILDSRMNTKYDENDKLIREVKVITLKSKLVSDFRKDFQFYKVREINNYHHAHDAYLNAVVGTALIKKYPKLESEFVYGDYKVYDVRKMIAKSEQEIGKATAKYFFYSNIMNFFKTEITLANGEIRKRPLIETNGETGEIVWDKGRDFATVRKVLSMPQVNIVKKTEVQTGGFSKESILPKRNSDKLIARKKDWDPKKYGGFDSPTVAYSVLVVAKVEKGKSKKLKSVKELLGITIMERSSFEKNPIDFLEAKGYKEVKKDLIIKLPKYSLFELENGRKRMLASAGELQKGNELALPSKYVNFLYLASHYEKLKGSPEDNEQKQLFVEQHKHYLDEIIEQISEFSKRVILADANLDKVLSAYNKHRDKPIREQAENIIHLFTLTNLGAPAAFKYFDTTIDRKRYTSTKEVLDATLIHQSITGLYETRIDLSQLGGDGGEAAAKPAPGGSGGTLQLDDEYRLYSPLVKPDQNIQFWLEQFPQAWAETAGMGLAKQVPPQVIQLKASATPVSVRQYPLSKEAQEGIRPHVQRLIQQGILVPVQSPWNTPLLPVRKPGTNDYRPVQDLREVNKRVQDIHPTVPNPYNLLCALPPQRSWYTVLDLKDAFFCLRLHPTSQPLFAFEWRDPGTGRTGQLTWTRLPQGFKNSPTIFDEALHRDLANFRIQHPQVTLLQYVDDLLLAGATKQDCLEGTKALLLELSDLGYRASAKKAQICRREVTYLGYSLRDGQRWLTEARKKTVVQIPAPTTAKQVREFLGTAGFCRLWIPGFATLAAPLYPLTKEKGEFSWAPEHQKAFDAIKKALLSAPALALPDVTKPFTLYVDERKGVARGVLTQTLGPWRRPVAYLSKKLDPVASGWPVCLKAIAAVAILVKDADKLTLGQNITVIAPHALENIVRQPPDRWMTNARMTHYQSLLLTERVTFAPPAALNPATLLPEETDEPVTHDCHQLLIEETGVRKDLTDIPLTGEVLTWFTDGSSYVVEGKRMAGAAVVDGTRTIWASSLPEGTSAQKAELMALTQALRLAEGKSINIYTDSRYAFATAHVHGAIYKQRGLLTSAGREIKNKEEILSLLEALHLPKRLAIIHCPGHQKAKDPISRGNQMADRVAKQAAQGVNLLAGKRTADGSEFEKRTADGSEFESPKKKAKVE

SEQ ID NO: 288 - protein, 2090 aa, synthetic construct
MPAAKRVKLDGGDKKYSIGLDIGTNSVGWAVITDEYKVPSKKFKVLGNTDRHSIKKNLIGALLFDSGETAEATRLKRTARRRYTRRKNRICYLQEIFSNEMAKVDDSFFHRLEESFLVEEDKKHERHPIFGNIVDEVAYHEKYPTIYHLRKKLVDSTDKADLRLIYLALAHMIKFRGHFLIEGDLNPDNSDVDKLFIQLVQTYNQLFEENPINASGVDAKAILSARLSKSRRLENLIAQLPGEKKNGLFGNLIALSLGLTPNFKSNFDLAEDAKLQLSKDTYDDDLDNLLAQIGDQYADLFLAAKNLSDAILLSDILRVNTEITKAPLSASMIKRYDEHHQDLTLLKALVRQQLPEKYKEIFFDQSKNGYAGYIDGGASQEEFYKFIKPILEKMDGTEELLVKLNREDLLRKQRTFDNGSIPHQIHLGELHAILRRQEDFYPFLKDNREKIEKILTFRIPYYVGPLARGNSRFAWMTRKSEETITPWNFEEVVDKGASAQSFIERMTNFDKNLPNEKVLPKHSLLYEYFTVYNELTKVKYVTEGMRKPAFLSGEQKKAIVDLLFKTNRKVTVKQLKEDYFKKIECFDSVEISGVEDRFNASLGTYHDLLKIIKDKDFLDNEENEDILEDIVLTLTLFEDREMIEERLKTYAHLFDDKVMKQLKRRRYTGWGRLSRKLINGIRDKQSGKTILDFLKSDGFANRNFMQLIHDDSLTFKEDIQKAQVSGQGDSLHEHIANLAGSPAIKKGILQTVKVVDELVKVMGRHKPENIVIEMARENQTTQKGQKNSRERMKRIEEGIKELGSQILKEHPVENTQLQNEKLYLYYLQNGRDMYVDQELDINRLSDYDVDHIVPQSFLKDDSIDNKVLTRSDKARGKSDNVPSEEVVKKMKNYWRQLLNAKLITQRKFDNLTKAERGGLSELDKAGFIKRQLVETRQITKHVAQILDSRMNTKYDENDKLIREVKVITLKSKLVSDFRKDFQFYKVREINNYHHAHDAYLNAVVGTALIKKYPKLESEFVYGDYKVYDVRKMIAKSEQEIGKATAKYFFYSNIMNFFKTEITLANGEIRKRPLIETNGETGEIVWDKGRDFATVRKVLSMPQVNIVKKTEVQTGGFSKESILPKRNSDKLIARKKDWDPKKYGGFDSPTVAYSVLVVAKVEKGKSKKLKSVKELLGITIMERSSFEKNPIDFLEAKGYKEVKKDLIIKLPKYSLFELENGRKRMLASAGELQKGNELALPSKYVNFLYLASHYEKLKGSPEDNEQKQLFVEQHKHYLDEIIEQISEFSKRVILADANLDKVLSAYNKHRDKPIREQAENIIHLFTLTNLGAPAAFKYFDTTIDRKRYTSTKEVLDATLIHQSITGLYETRIDLSQLGGDGGEAAAKGGGGGSGGTLQLDDEYRLYSPLVKPDQNIQFWLEQFPQAWAETAGMGLAKQVPPQVIQLKASATPVSVRQYPLSKEAQEGIRPHVQRLIQQGILVPVQSPWNTPLLPVRKPGTNDYRPVQDLREVNKRVQDIHPTVPNPYNLLCALPPQRSWYTVLDLKDAFFCLRLHPTSQPLFAFEWRDPGTGRTGQLTWTRLPQGFKNSPTIFDEALHRDLANFRIQHPQVTLLQYVDDLLLAGATKQDCLEGTKALLLELSDLGYRASAKKAQICRREVTYLGYSLRDGQRWLTEARKKTVVQIPAPTTAKQVREFLGTAGFCRLWIPGFATLAAPLYPLTKEKGEFSWAPEHQKAFDAIKKALLSAPALALPDVTKPFTLYVDERKGVARGVLTQTLGPWRRPVAYLSKKLDPVASGWPVCLKAIAAVAILVKDADKLTLGQNITVIAPHALENIVRQPPDRWMTNARMTHYQSLLLTERVTFAPPAALNPATLLPEETDEPVTHDCHQLLIEETGVRKDLTDIPLTGEVLTWFTDGSSYVVEGKRMAGAAVVDGTRTIWASSLPEGTSAQKAELMALTQALRLAEGKSINIYTDSRYAFATAHVHGAIYKQRGLLTSAGREIKNKEEILSLLEALHLPKRLAIIHCPGHQKAKDPISRGNQMADRVAKQAAQGVNLLAGKRTADGSEFEKRTADGSEFESPKKKAKVE

SEQ ID NO: 289 - protein, 2082 aa, synthetic construct
MPAAKRVKLDGGDKKYSIGLDIGTNSVGWAVITDEYKVPSKKFKVLGNTDRHSIKKNLIGALLFDSGETAEATRLKRTARRRYTRRKNRICYLQEIFSNEMAKVDDSFFHRLEESFLVEEDKKHERHPIFGNIVDEVAYHEKYPTIYHLRKKLVDSTDKADLRLIYLALAHMIKFRGHFLIEGDLNPDNSDVDKLFIQLVQTYNQLFEENPINASGVDAKAILSARLSKSRRLENLIAQLPGEKKNGLFGNLIALSLGLTPNFKSNFDLAEDAKLQLSKDTYDDDLDNLLAQIGDQYADLFLAAKNLSDAILLSDILRVNTEITKAPLSASMIKRYDEHHQDLTLLKALVRQQLPEKYKEIFFDQSKNGYAGYIDGGASQEEFYKFIKPILEKMDGTEELLVKLNREDLLRKQRTFDNGSIPHQIHLGELHAILRRQEDFYPFLKDNREKIEKILTFRIPYYVGPLARGNSRFAWMTRKSEETITPWNFEEVVDKGASAQSFIERMTNFDKNLPNEKVLPKHSLLYEYFTVYNELTKVKYVTEGMRKPAFLSGEQKKAIVDLLFKTNRKVTVKQLKEDYFKKIECFDSVEISGVEDRFNASLGTYHDLLKIIKDKDFLDNEENEDILEDIVLTLTLFEDREMIEERLKTYAHLFDDKVMKQLKRRRYTGWGRLSRKLINGIRDKQSGKTILDFLKSDGFANRNFMQLIHDDSLTFKEDIQKAQVSGQGDSLHEHIANLAGSPAIKKGILQTVKVVDELVKVMGRHKPENIVIEMARENQTTQKGQKNSRERMKRIEEGIKELGSQILKEHPVENTQLQNEKLYLYYLQNGRDMYVDQELDINRLSDYDVDHIVPQSFLKDDSIDNKVLTRSDKARGKSDNVPSEEVVKKMKNYWRQLLNAKLITQRKFDNLTKAERGGLSELDKAGFIKRQLVETRQITKHVAQILDSRMNTKYDENDKLIREVKVITLKSKLVSDFRKDFQFYKVREINNYHHAHDAYLNAVVGTALIKKYPKLESEFVYGDYKVYDVRKMIAKSEQEIGKATAKYFFYSNIMNFFKTEITLANGEIRKRPLIETNGETGEIVWDKGRDFATVRKVLSMPQVNIVKKTEVQTGGFSKESILPKRNSDKLIARKKDWDPKKYGGFDSPTVAYSVLVVAKVEKGKSKKLKSVKELLGITIMERSSFEKNPIDFLEAKGYKEVKKDLIIKLPKYSLFELENGRKRMLASAGELQKGNELALPSKYVNFLYLASHYEKLKGSPEDNEQKQLFVEQHKHYLDEIIEQISEFSKRVILADANLDKVLSAYNKHRDKPIREQAENIIHLFTLTNLGAPAAFKYFDTTIDRKRYTSTKEVLDATLIHQSITGLYETRIDLSQLGGDGGGGGGGTLQLDDEYRLYSPLVKPDQNIQFWLEQFPQAWAETAGMGLAKQVPPQVIQLKASATPVSVRQYPLSKEAQEGIRPHVQRLIQQGILVPVQSPWNTPLLPVRKPGTNDYRPVQDLREVNKRVQDIHPTVPNPYNLLCALPPQRSWYTVLDLKDAFFCLRLHPTSQPLFAFEWRDPGTGRTGQLTWTRLPQGFKNSPTIFDEALHRDLANFRIQHPQVTLLQYVDDLLLAGATKQDCLEGTKALLLELSDLGYRASAKKAQICRREVTYLGYSLRDGQRWLTEARKKTVVQIPAPTTAKQVREFLGTAGFCRLWIPGFATLAAPLYPLTKEKGEFSWAPEHQKAFDAIKKALLSAPALALPDVTKPFTLYVDERKGVARGVLTQTLGPWRRPVAYLSKKLDPVASGWPVCLKAIAAVAILVKDADKLTLGQNITVIAPHALENIVRQPPDRWMTNARMTHYQSLLLTERVTFAPPAALNPATLLPEETDEPVTHDCHQLLIEETGVRKDLTDIPLTGEVLTWFTDGSSYVVEGKRMAGAAVVDGTRTIWASSLPEGTSAQKAELMALTQALRLAEGKSINIYTDSRYAFATAHVHGAIYKQRGLLTSAGREIKNKEEILSLLEALHLPKRLAIIHCPGHQKAKDPISRGNQMADRVAKQAAQGVNLLAGKRTADGSEFEKRTADGSEFESPKKKAKVE

SEQ ID NO: 290 - protein, 2090 aa, synthetic construct
MPAAKRVKLDGGDKKYSIGLDIGTNSVGWAVITDEYKVPSKKFKVLGNTDRHSIKKNLIGALLFDSGETAEATRLKRTARRRYTRRKNRICYLQEIFSNEMAKVDDSFFHRLEESFLVEEDKKHERHPIFGNIVDEVAYHEKYPTIYHLRKKLVDSTDKADLRLIYLALAHMIKFRGHFLIEGDLNPDNSDVDKLFIQLVQTYNQLFEENPINASGVDAKAILSARLSKSRRLENLIAQLPGEKKNGLFGNLIALSLGLTPNFKSNFDLAEDAKLQLSKDTYDDDLDNLLAQIGDQYADLFLAAKNLSDAILLSDILRVNTEITKAPLSASMIKRYDEHHQDLTLLKALVRQQLPEKYKEIFFDQSKNGYAGYIDGGASQEEFYKFIKPILEKMDGTEELLVKLNREDLLRKQRTFDNGSIPHQIHLGELHAILRRQEDFYPFLKDNREKIEKILTFRIPYYVGPLARGNSRFAWMTRKSEETITPWNFEEVVDKGASAQSFIERMTNFDKNLPNEKVLPKHSLLYEYFTVYNELTKVKYVTEGMRKPAFLSGEQKKAIVDLLFKTNRKVTVKQLKEDYFKKIECFDSVEISGVEDRFNASLGTYHDLLKIIKDKDFLDNEENEDILEDIVLTLTLFEDREMIEERLKTYAHLFDDKVMKQLKRRRYTGWGRLSRKLINGIRDKQSGKTILDFLKSDGFANRNFMQLIHDDSLTFKEDIQKAQVSGQGDSLHEHIANLAGSPAIKKGILQTVKVVDELVKVMGRHKPENIVIEMARENQTTQKGQKNSRERMKRIEEGIKELGSQILKEHPVENTQLQNEKLYLYYLQNGRDMYVDQELDINRLSDYDVDHIVPQSFLKDDSIDNKVLTRSDKARGKSDNVPSEEVVKKMKNYWRQLLNAKLITQRKFDNLTKAERGGLSELDKAGFIKRQLVETRQITKHVAQILDSRMNTKYDENDKLIREVKVITLKSKLVSDFRKDFQFYKVREINNYHHAHDAYLNAVVGTALIKKYPKLESEFVYGDYKVYDVRKMIAKSEQEIGKATAKYFFYSNIMNFFKTEITLANGEIRKRPLIETNGETGEIVWDKGRDFATVRKVLSMPQVNIVKKTEVQTGGFSKESILPKRNSDKLIARKKDWDPKKYGGFDSPTVAYSVLVVAKVEKGKSKKLKSVKELLGITIMERSSFEKNPIDFLEAKGYKEVKKDLIIKLPKYSLFELENGRKRMLASAGELQKGNELALPSKYVNFLYLASHYEKLKGSPEDNEQKQLFVEQHKHYLDEIIEQISEFSKRVILADANLDKVLSAYNKHRDKPIREQAENIIHLFTLTNLGAPAAFKYFDTTIDRKRYTSTKEVLDATLIHQSITGLYETRIDLSQLGGDGGEAAAKGGGGSSGGTLQLDDEYRLYSPLVKPDQNIQFWLEQFPQAWAETAGMGLAKQVPPQVIQLKASATPVSVRQYPLSKEAQEGIRPHVQRLIQQGILVPVQSPWNTPLLPVRKPGTNDYRPVQDLREVNKRVQDIHPTVPNPYNLLCALPPQRSWYTVLDLKDAFFCLRLHPTSQPLFAFEWRDPGTGRTGQLTWTRLPQGFKNSPTIFDEALHRDLANFRIQHPQVTLLQYVDDLLLAGATKQDCLEGTKALLLELSDLGYRASAKKAQICRREVTYLGYSLRDGQRWLTEARKKTVVQIPAPTTAKQVREFLGTAGFCRLWIPGFATLAAPLYPLTKEKGEFSWAPEHQKAFDAIKKALLSAPALALPDVTKPFTLYVDERKGVARGVLTQTLGPWRRPVAYLSKKLDPVASGWPVCLKAIAAVAILVKDADKLTLGQNITVIAPHALENIVRQPPDRWMTNARMTHYQSLLLTERVTFAPPAALNPATLLPEETDEPVTHDCHQLLIEETGVRKDLTDIPLTGEVLTWFTDGSSYVVEGKRMAGAAVVDGTRTIWASSLPEGTSAQKAELMALTQALRLAEGKSINIYTDSRYAFATAHVHGAIYKQRGLLTSAGREIKNKEEILSLLEALHLPKRLAIIHCPGHQKAKDPISRGNQMADRVAKQAAQGVNLLAGKRTADGSEFEKRTADGSEFESPKKKAKVE

SEQ ID NO: 291 - protein, 2083 aa, synthetic construct
MPAAKRVKLDGGDKKYSIGLDIGTNSVGWAVITDEYKVPSKKFKVLGNTDRHSIKKNLIGALLFDSGETAEATRLKRTARRRYTRRKNRICYLQEIFSNEMAKVDDSFFHRLEESFLVEEDKKHERHPIFGNIVDEVAYHEKYPTIYHLRKKLVDSTDKADLRLIYLALAHMIKFRGHFLIEGDLNPDNSDVDKLFIQLVQTYNQLFEENPINASGVDAKAILSARLSKSRRLENLIAQLPGEKKNGLFGNLIALSLGLTPNFKSNFDLAEDAKLQLSKDTYDDDLDNLLAQIGDQYADLFLAAKNLSDAILLSDILRVNTEITKAPLSASMIKRYDEHHQDLTLLKALVRQQLPEKYKEIFFDQSKNGYAGYIDGGASQEEFYKFIKPILEKMDGTEELLVKLNREDLLRKQRTFDNGSIPHQIHLGELHAILRRQEDFYPFLKDNREKIEKILTFRIPYYVGPLARGNSRFAWMTRKSEETITPWNFEEVVDKGASAQSFIERMTNFDKNLPNEKVLPKHSLLYEYFTVYNELTKVKYVTEGMRKPAFLSGEQKKAIVDLLFKTNRKVTVKQLKEDYFKKIECFDSVEISGVEDRFNASLGTYHDLLKIIKDKDFLDNEENEDILEDIVLTLTLFEDREMIEERLKTYAHLFDDKVMKQLKRRRYTGWGRLSRKLINGIRDKQSGKTILDFLKSDGFANRNFMQLIHDDSLTFKEDIQKAQVSGQGDSLHEHIANLAGSPAIKKGILQTVKVVDELVKVMGRHKPENIVIEMARENQTTQKGQKNSRERMKRIEEGIKELGSQILKEHPVENTQLQNEKLYLYYLQNGRDMYVDQELDINRLSDYDVDHIVPQSFLKDDSIDNKVLTRSDKARGKSDNVPSEEVVKKMKNYWRQLLNAKLITQRKFDNLTKAERGGLSELDKAGFIKRQLVETRQITKHVAQILDSRMNTKYDENDKLIREVKVITLKSKLVSDFRKDFQFYKVREINNYHHAHDAYLNAVVGTALIKKYPKLESEFVYGDYKVYDVRKMIAKSEQEIGKATAKYFFYSNIMNFFKTEITLANGEIRKRPLIETNGETGEIVWDKGRDFATVRKVLSMPQVNIVKKTEVQTGGFSKESILPKRNSDKLIARKKDWDPKKYGGFDSPTVAYSVLVVAKVEKGKSKKLKSVKELLGITIMERSSFEKNPIDFLEAKGYKEVKKDLIIKLPKYSLFELENGRKRMLASAGELQKGNELALPSKYVNFLYLASHYEKLKGSPEDNEQKQLFVEQHKHYLDEIIEQISEFSKRVILADANLDKVLSAYNKHRDKPIREQAENIIHLFTLTNLGAPAAFKYFDTTIDRKRYTSTKEVLDATLIHQSITGLYETRIDLSQLGGDGGGGGGGGTLQLDDEYRLYSPLVKPDQNIQFWLEQFPQAWAETAGMGLAKQVPPQVIQLKASATPVSVRQYPLSKEAQEGIRPHVQRLIQQGILVPVQSPWNTPLLPVRKPGTNDYRPVQDLREVNKRVQDIHPTVPNPYNLLCALPPQRSWYTVLDLKDAFFCLRLHPTSQPLFAFEWRDPGTGRTGQLTWTRLPQGFKNSPTIFDEALHRDLANFRIQHPQVTLLQYVDDLLLAGATKQDCLEGTKALLLELSDLGYRASAKKAQICRREVTYLGYSLRDGQRWLTEARKKTVVQIPAPTTAKQVREFLGTAGFCRLWIPGFATLAAPLYPLTKEKGEFSWAPEHQKAFDAIKKALLSAPALALPDVTKPFTLYVDERKGVARGVLTQTLGPWRRPVAYLSKKLDPVASGWPVCLKAIAAVAILVKDADKLTLGQNITVIAPHALENIVRQPPDRWMTNARMTHYQSLLLTERVTFAPPAALNPATLLPEETDEPVTHDCHQLLIEETGVRKDLTDIPLTGEVLTWFTDGSSYVVEGKRMAGAAVVDGTRTIWASSLPEGTSAQKAELMALTQALRLAEGKSINIYTDSRYAFATAHVHGAIYKQRGLLTSAGREIKNKEEILSLLEALHLPKRLAIIHCPGHQKAKDPISRGNQMADRVAKQAAQGVNLLAGKRTADGSEFEKRTADGSEFESPKKKAKVE

SEQ ID NO: 292 - protein, 2097 aa, synthetic construct
MPAAKRVKLDGGDKKYSIGLDIGTNSVGWAVITDEYKVPSKKFKVLGNTDRHSIKKNLIGALLFDSGETAEATRLKRTARRRYTRRKNRICYLQEIFSNEMAKVDDSFFHRLEESFLVEEDKKHERHPIFGNIVDEVAYHEKYPTIYHLRKKLVDSTDKADLRLIYLALAHMIKFRGHFLIEGDLNPDNSDVDKLFIQLVQTYNQLFEENPINASGVDAKAILSARLSKSRRLENLIAQLPGEKKNGLFGNLIALSLGLTPNFKSNFDLAEDAKLQLSKDTYDDDLDNLLAQIGDQYADLFLAAKNLSDAILLSDILRVNTEITKAPLSASMIKRYDEHHQDLTLLKALVRQQLPEKYKEIFFDQSKNGYAGYIDGGASQEEFYKFIKPILEKMDGTEELLVKLNREDLLRKQRTFDNGSIPHQIHLGELHAILRRQEDFYPFLKDNREKIEKILTFRIPYYVGPLARGNSRFAWMTRKSEETITPWNFEEVVDKGASAQSFIERMTNFDKNLPNEKVLPKHSLLYEYFTVYNELTKVKYVTEGMRKPAFLSGEQKKAIVDLLFKTNRKVTVKQLKEDYFKKIECFDSVEISGVEDRFNASLGTYHDLLKIIKDKDFLDNEENEDILEDIVLTLTLFEDREMIEERLKTYAHLFDDKVMKQLKRRRYTGWGRLSRKLINGIRDKQSGKTILDFLKSDGFANRNFMQLIHDDSLTFKEDIQKAQVSGQGDSLHEHIANLAGSPAIKKGILQTVKVVDELVKVMGRHKPENIVIEMARENQTTQKGQKNSRERMKRIEEGIKELGSQILKEHPVENTQLQNEKLYLYYLQNGRDMYVDQELDINRLSDYDVDHIVPQSFLKDDSIDNKVLTRSDKARGKSDNVPSEEVVKKMKNYWRQLLNAKLITQRKFDNLTKAERGGLSELDKAGFIKRQLVETRQITKHVAQILDSRMNTKYDENDKLIREVKVITLKSKLVSDFRKDFQFYKVREINNYHHAHDAYLNAVVGTALIKKYPKLESEFVYGDYKVYDVRKMIAKSEQEIGKATAKYFFYSNIMNFFKTEITLANGEIRKRPLIETNGETGEIVWDKGRDFATVRKVLSMPQVNIVKKTEVQTGGFSKESILPKRNSDKLIARKKDWDPKKYGGFDSPTVAYSVLVVAKVEKGKSKKLKSVKELLGITIMERSSFEKNPIDFLEAKGYKEVKKDLIIKLPKYSLFELENGRKRMLASAGELQKGNELALPSKYVNFLYLASHYEKLKGSPEDNEQKQLFVEQHKHYLDEIIEQISEFSKRVILADANLDKVLSAYNKHRDKPIREQAENIIHLFTLTNLGAPAAFKYFDTTIDRKRYTSTKEVLDATLIHQSITGLYETRIDLSQLGGDGGGGSGGSGGSGGSGGSGGSGGTLQLDDEYRLYSPLVKPDQNIQFWLEQFPQAWAETAGMGLAKQVPPQVIQLKASATPVSVRQYPLSKEAQEGIRPHVQRLIQQGILVPVQSPWNTPLLPVRKPGTNDYRPVQDLREVNKRVQDIHPTVPNPYNLLCALPPQRSWYTVLDLKDAFFCLRLHPTSQPLFAFEWRDPGTGRTGQLTWTRLPQGFKNSPTIFDEALHRDLANFRIQHPQVTLLQYVDDLLLAGATKQDCLEGTKALLLELSDLGYRASAKKAQICRREVTYLGYSLRDGQRWLTEARKKTVVQIPAPTTAKQVREFLGTAGFCRLWIPGFATLAAPLYPLTKEKGEFSWAPEHQKAFDAIKKALLSAPALALPDVTKPFTLYVDERKGVARGVLTQTLGPWRRPVAYLSKKLDPVASGWPVCLKAIAAVAILVKDADKLTLGQNITVIAPHALENIVRQPPDRWMTNARMTHYQSLLLTERVTFAPPAALNPATLLPEETDEPVTHDCHQLLIEETGVRKDLTDIPLTGEVLTWFTDGSSYVVEGKRMAGAAVVDGTRTIWASSLPEGTSAQKAELMALTQALRLAEGKSINIYTDSRYAFATAHVHGAIYKQRGLLTSAGREIKNKEEILSLLEALHLPKRLAIIHCPGHQKAKDPISRGNQMADRVAKQAAQGVNLLAGKRTADGSEFEKRTADGSEFESPKKKAKVE

SEQ ID NO: 293 - protein, 2087 aa, synthetic construct
MPAAKRVKLDGGDKKYSIGLDIGTNSVGWAVITDEYKVPSKKFKVLGNTDRHSIKKNLIGALLFDSGETAEATRLKRTARRRYTRRKNRICYLQEIFSNEMAKVDDSFFHRLEESFLVEEDKKHERHPIFGNIVDEVAYHEKYPTIYHLRKKLVDSTDKADLRLIYLALAHMIKFRGHFLIEGDLNPDNSDVDKLFIQLVQTYNQLFEENPINASGVDAKAILSARLSKSRRLENLIAQLPGEKKNGLFGNLIALSLGLTPNFKSNFDLAEDAKLQLSKDTYDDDLDNLLAQIGDQYADLFLAAKNLSDAILLSDILRVNTEITKAPLSASMIKRYDEHHQDLTLLKALVRQQLPEKYKEIFFDQSKNGYAGYIDGGASQEEFYKFIKPILEKMDGTEELLVKLNREDLLRKQRTFDNGSIPHQIHLGELHAILRRQEDFYPFLKDNREKIEKILTFRIPYYVGPLARGNSRFAWMTRKSEETITPWNFEEVVDKGASAQSFIERMTNFDKNLPNEKVLPKHSLLYEYFTVYNELTKVKYVTEGMRKPAFLSGEQKKAIVDLLFKTNRKVTVKQLKEDYFKKIECFDSVEISGVEDRFNASLGTYHDLLKIIKDKDFLDNEENEDILEDIVLTLTLFEDREMIEERLKTYAHLFDDKVMKQLKRRRYTGWGRLSRKLINGIRDKQSGKTILDFLKSDGFANRNFMQLIHDDSLTFKEDIQKAQVSGQGDSLHEHIANLAGSPAIKKGILQTVKVVDELVKVMGRHKPENIVIEMARENQTTQKGQKNSRERMKRIEEGIKELGSQILKEHPVENTQLQNEKLYLYYLQNGRDMYVDQELDINRLSDYDVDHIVPQSFLKDDSIDNKVLTRSDKARGKSDNVPSEEVVKKMKNYWRQLLNAKLITQRKFDNLTKAERGGLSELDKAGFIKRQLVETRQITKHVAQILDSRMNTKYDENDKLIREVKVITLKSKLVSDFRKDFQFYKVREINNYHHAHDAYLNAVVGTALIKKYPKLESEFVYGDYKVYDVRKMIAKSEQEIGKATAKYFFYSNIMNFFKTEITLANGEIRKRPLIETNGETGEIVWDKGRDFATVRKVLSMPQVNIVKKTEVQTGGFSKESILPKRNSDKLIARKKDWDPKKYGGFDSPTVAYSVLVVAKVEKGKSKKLKSVKELLGITIMERSSFEKNPIDFLEAKGYKEVKKDLIIKLPKYSLFELENGRKRMLASAGELQKGNELALPSKYVNFLYLASHYEKLKGSPEDNEQKQLFVEQHKHYLDEIIEQISEFSKRVILADANLDKVLSAYNKHRDKPIREQAENIIHLFTLTNLGAPAAFKYFDTTIDRKRYTSTKEVLDATLIHQSITGLYETRIDLSQLGGDGGGSSEAAAKGGTLQLDDEYRLYSPLVKPDQNIQFWLEQFPQAWAETAGMGLAKQVPPQVIQLKASATPVSVRQYPLSKEAQEGIRPHVQRLIQQGILVPVQSPWNTPLLPVRKPGTNDYRPVQDLREVNKRVQDIHPTVPNPYNLLCALPPQRSWYTVLDLKDAFFCLRLHPTSQPLFAFEWRDPGTGRTGQLTWTRLPQGFKNSPTIFDEALHRDLANFRIQHPQVTLLQYVDDLLLAGATKQDCLEGTKALLLELSDLGYRASAKKAQICRREVTYLGYSLRDGQRWLTEARKKTVVQIPAPTTAKQVREFLGTAGFCRLWIPGFATLAAPLYPLTKEKGEFSWAPEHQKAFDAIKKALLSAPALALPDVTKPFTLYVDERKGVARGVLTQTLGPWRRPVAYLSKKLDPVASGWPVCLKAIAAVAILVKDADKLTLGQNITVIAPHALENIVRQPPDRWMTNARMTHYQSLLLTERVTFAPPAALNPATLLPEETDEPVTHDCHQLLIEETGVRKDLTDIPLTGEVLTWFTDGSSYVVEGKRMAGAAVVDGTRTIWASSLPEGTSAQKAELMALTQALRLAEGKSINIYTDSRYAFATAHVHGAIYKQRGLLTSAGREIKNKEEILSLLEALHLPKRLAIIHCPGHQKAKDPISRGNQMADRVAKQAAQGVNLLAGKRTADGSEFEKRTADGSEFESPKKKAKVE

SEQ ID NO: 294 - protein, 2088 aa, synthetic construct
MPAAKRVKLDGGDKKYSIGLDIGTNSVGWAVITDEYKVPSKKFKVLGNTDRHSIKKNLIGALLFDSGETAEATRLKRTARRRYTRRKNRICYLQEIFSNEMAKVDDSFFHRLEESFLVEEDKKHERHPIFGNIVDEVAYHEKYPTIYHLRKKLVDSTDKADLRLIYLALAHMIKFRGHFLIEGDLNPDNSDVDKLFIQLVQTYNQLFEENPINASGVDAKAILSARLSKSRRLENLIAQLPGEKKNGLFGNLIALSLGLTPNFKSNFDLAEDAKLQLSKDTYDDDLDNLLAQIGDQYADLFLAAKNLSDAILLSDILRVNTEITKAPLSASMIKRYDEHHQDLTLLKALVRQQLPEKYKEIFFDQSKNGYAGYIDGGASQEEFYKFIKPILEKMDGTEELLVKLNREDLLRKQRTFDNGSIPHQIHLGELHAILRRQEDFYPFLKDNREKIEKILTFRIPYYVGPLARGNSRFAWMTRKSEETITPWNFEEVVDKGASAQSFIERMTNFDKNLPNEKVLPKHSLLYEYFTVYNELTKVKYVTEGMRKPAFLSGEQKKAIVDLLFKTNRKVTVKQLKEDYFKKIECFDSVEISGVEDRFNASLGTYHDLLKIIKDKDFLDNEENEDILEDIVLTLTLFEDREMIEERLKTYAHLFDDKVMKQLKRRRYTGWGRLSRKLINGIRDKQSGKTILDFLKSDGFANRNFMQLIHDDSLTFKEDIQKAQVSGQGDSLHEHIANLAGSPAIKKGILQTVKVVDELVKVMGRHKPENIVIEMARENQTTQKGQKNSRERMKRIEEGIKELGSQILKEHPVENTQLQNEKLYLYYLQNGRDMYVDQELDINRLSDYDVDHIVPQSFLKDDSIDNKVLTRSDKARGKSDNVPSEEVVKKMKNYWRQLLNAKLITQRKFDNLTKAERGGLSELDKAGFIKRQLVETRQITKHVAQILDSRMNTKYDENDKLIREVKVITLKSKLVSDFRKDFQFYKVREINNYHHAHDAYLNAVVGTALIKKYPKLESEFVYGDYKVYDVRKMIAKSEQEIGKATAKYFFYSNIMNFFKTEITLANGEIRKRPLIETNGETGEIVWDKGRDFATVRKVLSMPQVNIVKKTEVQTGGFSKESILPKRNSDKLIARKKDWDPKKYGGFDSPTVAYSVLVVAKVEKGKSKKLKSVKELLGITIMERSSFEKNPIDFLEAKGYKEVKKDLIIKLPKYSLFELENGRKRMLASAGELQKGNELALPSKYVNFLYLASHYEKLKGSPEDNEQKQLFVEQHKHYLDEIIEQISEFSKRVILADANLDKVLSAYNKHRDKPIREQAENIIHLFTLTNLGAPAAFKYFDTTIDRKRYTSTKEVLDATLIHQSITGLYETRIDLSQLGGDGGGGSGGSGGSGGTLQLDDEYRLYSPLVKPDQNIQFWLEQFPQAWAETAGMGLAKQVPPQVIQLKASATPVSVRQYPLSKEAQEGIRPHVQRLIQQGILVPVQSPWNTPLLPVRKPGTNDYRPVQDLREVNKRVQDIHPTVPNPYNLLCALPPQRSWYTVLDLKDAFFCLRLHPTSQPLFAFEWRDPGTGRTGQLTWTRLPQGFKNSPTIFDEALHRDLANFRIQHPQVTLLQYVDDLLLAGATKQDCLEGTKALLLELSDLGYRASAKKAQICRREVTYLGYSLRDGQRWLTEARKKTVVQIPAPTTAKQVREFLGTAGFCRLWIPGFATLAAPLYPLTKEKGEFSWAPEHQKAFDAIKKALLSAPALALPDVTKPFTLYVDERKGVARGVLTQTLGPWRRPVAYLSKKLDPVASGWPVCLKAIAAVAILVKDADKLTLGQNITVIAPHALENIVRQPPDRWMTNARMTHYQSLLLTERVTFAPPAALNPATLLPEETDEPVTHDCHQLLIEETGVRKDLTDIPLTGEVLTWFTDGSSYVVEGKRMAGAAVVDGTRTIWASSLPEGTSAQKAELMALTQALRLAEGKSINIYTDSRYAFATAHVHGAIYKQRGLLTSAGREIKNKEEILSLLEALHLPKRLAIIHCPGHQKAKDPISRGNQMADRVAKQAAQGVNLLAGKRTADGSEFEKRTADGSEFESPKKKAKVE

SEQ ID NO: 295 - protein, 2088 aa, synthetic construct
MPAAKRVKLDGGDKKYSIGLDIGTNSVGWAVITDEYKVPSKKFKVLGNTDRHSIKKNLIGALLFDSGETAEATRLKRTARRRYTRRKNRICYLQEIFSNEMAKVDDSFFHRLEESFLVEEDKKHERHPIFGNIVDEVAYHEKYPTIYHLRKKLVDSTDKADLRLIYLALAHMIKFRGHFLIEGDLNPDNSDVDKLFIQLVQTYNQLFEENPINASGVDAKAILSARLSKSRRLENLIAQLPGEKKNGLFGNLIALSLGLTPNFKSNFDLAEDAKLQLSKDTYDDDLDNLLAQIGDQYADLFLAAKNLSDAILLSDILRVNTEITKAPLSASMIKRYDEHHQDLTLLKALVRQQLPEKYKEIFFDQSKNGYAGYIDGGASQEEFYKFIKPILEKMDGTEELLVKLNREDLLRKQRTFDNGSIPHQIHLGELHAILRRQEDFYPFLKDNREKIEKILTFRIPYYVGPLARGNSRFAWMTRKSEETITPWNFEEVVDKGASAQSFIERMTNFDKNLPNEKVLPKHSLLYEYFTVYNELTKVKYVTEGMRKPAFLSGEQKKAIVDLLFKTNRKVTVKQLKEDYFKKIECFDSVEISGVEDRFNASLGTYHDLLKIIKDKDFLDNEENEDILEDIVLTLTLFEDREMIEERLKTYAHLFDDKVMKQLKRRRYTGWGRLSRKLINGIRDKQSGKTILDFLKSDGFANRNFMQLIHDDSLTFKEDIQKAQVSGQGDSLHEHIANLAGSPAIKKGILQTVKVVDELVKVMGRHKPENIVIEMARENQTTQKGQKNSRERMKRIEEGIKELGSQILKEHPVENTQLQNEKLYLYYLQNGRDMYVDQELDINRLSDYDVDHIVPQSFLKDDSIDNKVLTRSDKARGKSDNVPSEEVVKKMKNYWRQLLNAKLITQRKFDNLTKAERGGLSELDKAGFIKRQLVETRQITKHVAQILDSRMNTKYDENDKLIREVKVITLKSKLVSDFRKDFQFYKVREINNYHHAHDAYLNAVVGTALIKKYPKLESEFVYGDYKVYDVRKMIAKSEQEIGKATAKYFFYSNIMNFFKTEITLANGEIRKRPLIETNGETGEIVWDKGRDFATVRKVLSMPQVNIVKKTEVQTGGFSKESILPKRNSDKLIARKKDWDPKKYGGFDSPTVAYSVLVVAKVEKGKSKKLKSVKELLGITIMERSSFEKNPIDFLEAKGYKEVKKDLIIKLPKYSLFELENGRKRMLASAGELQKGNELALPSKYVNFLYLASHYEKLKGSPEDNEQKQLFVEQHKHYLDEIIEQISEFSKRVILADANLDKVLSAYNKHRDKPIREQAENIIHLFTLTNLGAPAAFKYFDTTIDRKRYTSTKEVLDATLIHQSITGLYETRIDLSQLGGDGGGSSPAPGGSGGTLQLDDEYRLYSPLVKPDQNIQFWLEQFPQAWAETAGMGLAKQVPPQVIQLKASATPVSVRQYPLSKEAQEGIRPHVQRLIQQGILVPVQSPWNTPLLPVRKPGTNDYRPVQDLREVNKRVQDIHPTVPNPYNLLCALPPQRSWYTVLDLKDAFFCLRLHPTSQPLFAFEWRDPGTGRTGQLTWTRLPQGFKNSPTIFDEALHRDLANFRIQHPQVTLLQYVDDLLLAGATKQDCLEGTKALLLELSDLGYRASAKKAQICRREVTYLGYSLRDGQRWLTEARKKTVVQIPAPTTAKQVREFLGTAGFCRLWIPGFATLAAPLYPLTKEKGEFSWAPEHQKAFDAIKKALLSAPALALPDVTKPFTLYVDERKGVARGVLTQTLGPWRRPVAYLSKKLDPVASGWPVCLKAIAAVAILVKDADKLTLGQNITVIAPHALENIVRQPPDRWMTNARMTHYQSLLLTERVTFAPPAALNPATLLPEETDEPVTHDCHQLLIEETGVRKDLTDIPLTGEVLTWFTDGSSYVVEGKRMAGAAVVDGTRTIWASSLPEGTSAQKAELMALTQALRLAEGKSINIYTDSRYAFATAHVHGAIYKQRGLLTSAGREIKNKEEILSLLEALHLPKRLAIIHCPGHQKAKDPISRGNQMADRVAKQAAQGVNLLAGKRTADGSEFEKRTADGSEFESPKKKAKVE

SEQ ID NO: 296 - protein, 2090 aa, synthetic construct
MPAAKRVKLDGGDKKYSIGLDIGTNSVGWAVITDEYKVPSKKFKVLGNTDRHSIKKNLIGALLFDSGETAEATRLKRTARRRYTRRKNRICYLQEIFSNEMAKVDDSFFHRLEESFLVEEDKKHERHPIFGNIVDEVAYHEKYPTIYHLRKKLVDSTDKADLRLIYLALAHMIKFRGHFLIEGDLNPDNSDVDKLFIQLVQTYNQLFEENPINASGVDAKAILSARLSKSRRLENLIAQLPGEKKNGLFGNLIALSLGLTPNFKSNFDLAEDAKLQLSKDTYDDDLDNLLAQIGDQYADLFLAAKNLSDAILLSDILRVNTEITKAPLSASMIKRYDEHHQDLTLLKALVRQQLPEKYKEIFFDQSKNGYAGYIDGGASQEEFYKFIKPILEKMDGTEELLVKLNREDLLRKQRTFDNGSIPHQIHLGELHAILRRQEDFYPFLKDNREKIEKILTFRIPYYVGPLARGNSRFAWMTRKSEETITPWNFEEVVDKGASAQSFIERMTNFDKNLPNEKVLPKHSLLYEYFTVYNELTKVKYVTEGMRKPAFLSGEQKKAIVDLLFKTNRKVTVKQLKEDYFKKIECFDSVEISGVEDRFNASLGTYHDLLKIIKDKDFLDNEENEDILEDIVLTLTLFEDREMIEERLKTYAHLFDDKVMKQLKRRRYTGWGRLSRKLINGIRDKQSGKTILDFLKSDGFANRNFMQLIHDDSLTFKEDIQKAQVSGQGDSLHEHIANLAGSPAIKKGILQTVKVVDELVKVMGRHKPENIVIEMARENQTTQKGQKNSRERMKRIEEGIKELGSQILKEHPVENTQLQNEKLYLYYLQNGRDMYVDQELDINRLSDYDVDHIVPQSFLKDDSIDNKVLTRSDKARGKSDNVPSEEVVKKMKNYWRQLLNAKLITQRKFDNLTKAERGGLSELDKAGFIKRQLVETRQITKHVAQILDSRMNTKYDENDKLIREVKVITLKSKLVSDFRKDFQFYKVREINNYHHAHDAYLNAVVGTALIKKYPKLESEFVYGDYKVYDVRKMIAKSEQEIGKATAKYFFYSNIMNFFKTEITLANGEIRKRPLIETNGETGEIVWDKGRDFATVRKVLSMPQVNIVKKTEVQTGGFSKESILPKRNSDKLIARKKDWDPKKYGGFDSPTVAYSVLVVAKVEKGKSKKLKSVKELLGITIMERSSFEKNPIDFLEAKGYKEVKKDLIIKLPKYSLFELENGRKRMLASAGELQKGNELALPSKYVNFLYLASHYEKLKGSPEDNEQKQLFVEQHKHYLDEIIEQISEFSKRVILADANLDKVLSAYNKHRDKPIREQAENIIHLFTLTNLGAPAAFKYFDTTIDRKRYTSTKEVLDATLIHQSITGLYETRIDLSQLGGDGGEAAAKGSSGGGGGTLQLDDEYRLYSPLVKPDQNIQFWLEQFPQAWAETAGMGLAKQVPPQVIQLKASATPVSVRQYPLSKEAQEGIRPHVQRLIQQGILVPVQSPWNTPLLPVRKPGTNDYRPVQDLREVNKRVQDIHPTVPNPYNLLCALPPQRSWYTVLDLKDAFFCLRLHPTSQPLFAFEWRDPGTGRTGQLTWTRLPQGFKNSPTIFDEALHRDLANFRIQHPQVTLLQYVDDLLLAGATKQDCLEGTKALLLELSDLGYRASAKKAQICRREVTYLGYSLRDGQRWLTEARKKTVVQIPAPTTAKQVREFLGTAGFCRLWIPGFATLAAPLYPLTKEKGEFSWAPEHQKAFDAIKKALLSAPALALPDVTKPFTLYVDERKGVARGVLTQTLGPWRRPVAYLSKKLDPVASGWPVCLKAIAAVAILVKDADKLTLGQNITVIAPHALENIVRQPPDRWMTNARMTHYQSLLLTERVTFAPPAALNPATLLPEETDEPVTHDCHQLLIEETGVRKDLTDIPLTGEVLTWFTDGSSYVVEGKRMAGAAVVDGTRTIWASSLPEGTSAQKAELMALTQALRLAEGKSINIYTDSRYAFATAHVHGAIYKQRGLLTSAGREIKNKEEILSLLEALHLPKRLAIIHCPGHQKAKDPISRGNQMADRVAKQAAQGVNLLAGKRTADGSEFEKRTADGSEFESPKKKAKVE

SEQ ID NO: 297 - protein, 2087 aa, synthetic construct
MPAAKRVKLDGGDKKYSIGLDIGTNSVGWAVITDEYKVPSKKFKVLGNTDRHSIKKNLIGALLFDSGETAEATRLKRTARRRYTRRKNRICYLQEIFSNEMAKVDDSFFHRLEESFLVEEDKKHERHPIFGNIVDEVAYHEKYPTIYHLRKKLVDSTDKADLRLIYLALAHMIKFRGHFLIEGDLNPDNSDVDKLFIQLVQTYNQLFEENPINASGVDAKAILSARLSKSRRLENLIAQLPGEKKNGLFGNLIALSLGLTPNFKSNFDLAEDAKLQLSKDTYDDDLDNLLAQIGDQYADLFLAAKNLSDAILLSDILRVNTEITKAPLSASMIKRYDEHHQDLTLLKALVRQQLPEKYKEIFFDQSKNGYAGYIDGGASQEEFYKFIKPILEKMDGTEELLVKLNREDLLRKQRTFDNGSIPHQIHLGELHAILRRQEDFYPFLKDNREKIEKILTFRIPYYVGPLARGNSRFAWMTRKSEETITPWNFEEVVDKGASAQSFIERMTNFDKNLPNEKVLPKHSLLYEYFTVYNELTKVKYVTEGMRKPAFLSGEQKKAIVDLLFKTNRKVTVKQLKEDYFKKIECFDSVEISGVEDRFNASLGTYHDLLKIIKDKDFLDNEENEDILEDIVLTLTLFEDREMIEERLKTYAHLFDDKVMKQLKRRRYTGWGRLSRKLINGIRDKQSGKTILDFLKSDGFANRNFMQLIHDDSLTFKEDIQKAQVSGQGDSLHEHIANLAGSPAIKKGILQTVKVVDELVKVMGRHKPENIVIEMARENQTTQKGQKNSRERMKRIEEGIKELGSQILKEHPVENTQLQNEKLYLYYLQNGRDMYVDQELDINRLSDYDVDHIVPQSFLKDDSIDNKVLTRSDKARGKSDNVPSEEVVKKMKNYWRQLLNAKLITQRKFDNLTKAERGGLSELDKAGFIKRQLVETRQITKHVAQILDSRMNTKYDENDKLIREVKVITLKSKLVSDFRKDFQFYKVREINNYHHAHDAYLNAVVGTALIKKYPKLESEFVYGDYKVYDVRKMIAKSEQEIGKATAKYFFYSNIMNFFKTEITLANGEIRKRPLIETNGETGEIVWDKGRDFATVRKVLSMPQVNIVKKTEVQTGGFSKESILPKRNSDKLIARKKDWDPKKYGGFDSPTVAYSVLVVAKVEKGKSKKLKSVKELLGITIMERSSFEKNPIDFLEAKGYKEVKKDLIIKLPKYSLFELENGRKRMLASAGELQKGNELALPSKYVNFLYLASHYEKLKGSPEDNEQKQLFVEQHKHYLDEIIEQISEFSKRVILADANLDKVLSAYNKHRDKPIREQAENIIHLFTLTNLGAPAAFKYFDTTIDRKRYTSTKEVLDATLIHQSITGLYETRIDLSQLGGDGGEAAAKPAPGGTLQLDDEYRLYSPLVKPDQNIQFWLEQFPQAWAETAGMGLAKQVPPQVIQLKASATPVSVRQYPLSKEAQEGIRPHVQRLIQQGILVPVQSPWNTPLLPVRKPGTNDYRPVQDLREVNKRVQDIHPTVPNPYNLLCALPPQRSWYTVLDLKDAFFCLRLHPTSQPLFAFEWRDPGTGRTGQLTWTRLPQGFKNSPTIFDEALHRDLANFRIQHPQVTLLQYVDDLLLAGATKQDCLEGTKALLLELSDLGYRASAKKAQICRREVTYLGYSLRDGQRWLTEARKKTVVQIPAPTTAKQVREFLGTAGFCRLWIPGFATLAAPLYPLTKEKGEFSWAPEHQKAFDAIKKALLSAPALALPDVTKPFTLYVDERKGVARGVLTQTLGPWRRPVAYLSKKLDPVASGWPVCLKAIAAVAILVKDADKLTLGQNITVIAPHALENIVRQPPDRWMTNARMTHYQSLLLTERVTFAPPAALNPATLLPEETDEPVTHDCHQLLIEETGVRKDLTDIPLTGEVLTWFTDGSSYVVEGKRMAGAAVVDGTRTIWASSLPEGTSAQKAELMALTQALRLAEGKSINIYTDSRYAFATAHVHGAIYKQRGLLTSAGREIKNKEEILSLLEALHLPKRLAIIHCPGHQKAKDPISRGNQMADRVAKQAAQGVNLLAGKRTADGSEFEKRTADGSEFESPKKKAKVE

SEQ ID NO: 298 - protein, 2094 aa, synthetic construct
MPAAKRVKLDGGDKKYSIGLDIGTNSVGWAVITDEYKVPSKKFKVLGNTDRHSIKKNLIGALLFDSGETAEATRLKRTARRRYTRRKNRICYLQEIFSNEMAKVDDSFFHRLEESFLVEEDKKHERHPIFGNIVDEVAYHEKYPTIYHLRKKLVDSTDKADLRLIYLALAHMIKFRGHFLIEGDLNPDNSDVDKLFIQLVQTYNQLFEENPINASGVDAKAILSARLSKSRRLENLIAQLPGEKKNGLFGNLIALSLGLTPNFKSNFDLAEDAKLQLSKDTYDDDLDNLLAQIGDQYADLFLAAKNLSDAILLSDILRVNTEITKAPLSASMIKRYDEHHQDLTLLKALVRQQLPEKYKEIFFDQSKNGYAGYIDGGASQEEFYKFIKPILEKMDGTEELLVKLNREDLLRKQRTFDNGSIPHQIHLGELHAILRRQEDFYPFLKDNREKIEKILTFRIPYYVGPLARGNSRFAWMTRKSEETITPWNFEEVVDKGASAQSFIERMTNFDKNLPNEKVLPKHSLLYEYFTVYNELTKVKYVTEGMRKPAFLSGEQKKAIVDLLFKTNRKVTVKQLKEDYFKKIECFDSVEISGVEDRFNASLGTYHDLLKIIKDKDFLDNEENEDILEDIVLTLTLFEDREMIEERLKTYAHLFDDKVMKQLKRRRYTGWGRLSRKLINGIRDKQSGKTILDFLKSDGFANRNFMQLIHDDSLTFKEDIQKAQVSGQGDSLHEHIANLAGSPAIKKGILQTVKVVDELVKVMGRHKPENIVIEMARENQTTQKGQKNSRERMKRIEEGIKELGSQILKEHPVENTQLQNEKLYLYYLQNGRDMYVDQELDINRLSDYDVDHIVPQSFLKDDSIDNKVLTRSDKARGKSDNVPSEEVVKKMKNYWRQLLNAKLITQRKFDNLTKAERGGLSELDKAGFIKRQLVETRQITKHVAQILDSRMNTKYDENDKLIREVKVITLKSKLVSDFRKDFQFYKVREINNYHHAHDAYLNAVVGTALIKKYPKLESEFVYGDYKVYDVRKMIAKSEQEIGKATAKYFFYSNIMNFFKTEITLANGEIRKRPLIETNGETGEIVWDKGRDFATVRKVLSMPQVNIVKKTEVQTGGFSKESILPKRNSDKLIARKKDWDPKKYGGFDSPTVAYSVLVVAKVEKGKSKKLKSVKELLGITIMERSSFEKNPIDFLEAKGYKEVKKDLIIKLPKYSLFELENGRKRMLASAGELQKGNELALPSKYVNFLYLASHYEKLKGSPEDNEQKQLFVEQHKHYLDEIIEQISEFSKRVILADANLDKVLSAYNKHRDKPIREQAENIIHLFTLTNLGAPAAFKYFDTTIDRKRYTSTKEVLDATLIHQSITGLYETRIDLSQLGGDGGEAAAKEAAAKEAAAKGGTLQLDDEYRLYSPLVKPDQNIQFWLEQFPQAWAETAGMGLAKQVPPQVIQLKASATPVSVRQYPLSKEAQEGIRPHVQRLIQQGILVPVQSPWNTPLLPVRKPGTNDYRPVQDLREVNKRVQDIHPTVPNPYNLLCALPPQRSWYTVLDLKDAFFCLRLHPTSQPLFAFEWRDPGTGRTGQLTWTRLPQGFKNSPTIFNEALHRDLANFRIQHPQVTLLQYVDDLLLAGATKQDCLEGTKALLLELSDLGYRASAKKAQICRREVTYLGYSLRDGQRWLTEARKKTVVQIPAPTTAKQVREFLGTAGFCRLWIPGFATLAAPLYPLTKPKGEFSWAPEHQKAFDAIKKALLSAPALALPDVTKPFTLYVDERKGVARGVLTQTLGPWRRPVAYLSKKLDPVASGWPVCLKAIAAVAILVKDADKLTLGQNITVIAPHALENIVRQPPDRWMTNARMTHYQSLLLTERVTFAPPAALNPATLLPEETDEPVTHDCHQLLIEETGVRKDLTDIPLTGEVLTWFTDGSSYVVEGKRMAGAAVVDGTRTIWASSLPEGTSAQKAELMALTQALRLAEGKSINIYTDSRYAFATAHVHGAIYKQRGWLTSAGREIKNKEEILSLLEALHLPKRLAIIHCPGHQKAKDPISRGNQMADRVAKQAAQGVNLLAGKRTADGSEFEKRTADGSEFESPKKKAKVE

SEQ ID NO: 299 - protein, 2090 aa, synthetic construct
MPAAKRVKLDGGDKKYSIGLDIGTNSVGWAVITDEYKVPSKKFKVLGNTDRHSIKKNLIGALLFDSGETAEATRLKRTARRRYTRRKNRICYLQEIFSNEMAKVDDSFFHRLEESFLVEEDKKHERHPIFGNIVDEVAYHEKYPTIYHLRKKLVDSTDKADLRLIYLALAHMIKFRGHFLIEGDLNPDNSDVDKLFIQLVQTYNQLFEENPINASGVDAKAILSARLSKSRRLENLIAQLPGEKKNGLFGNLIALSLGLTPNFKSNFDLAEDAKLQLSKDTYDDDLDNLLAQIGDQYADLFLAAKNLSDAILLSDILRVNTEITKAPLSASMIKRYDEHHQDLTLLKALVRQQLPEKYKEIFFDQSKNGYAGYIDGGASQEEFYKFIKPILEKMDGTEELLVKLNREDLLRKQRTFDNGSIPHQIHLGELHAILRRQEDFYPFLKDNREKIEKILTFRIPYYVGPLARGNSRFAWMTRKSEETITPWNFEEVVDKGASAQSFIERMTNFDKNLPNEKVLPKHSLLYEYFTVYNELTKVKYVTEGMRKPAFLSGEQKKAIVDLLFKTNRKVTVKQLKEDYFKKIECFDSVEISGVEDRFNASLGTYHDLLKIIKDKDFLDNEENEDILEDIVLTLTLFEDREMIEERLKTYAHLFDDKVMKQLKRRRYTGWGRLSRKLINGIRDKQSGKTILDFLKSDGFANRNFMQLIHDDSLTFKEDIQKAQVSGQGDSLHEHIANLAGSPAIKKGILQTVKVVDELVKVMGRHKPENIVIEMARENQTTQKGQKNSRERMKRIEEGIKELGSQILKEHPVENTQLQNEKLYLYYLQNGRDMYVDQELDINRLSDYDVDHIVPQSFLKDDSIDNKVLTRSDKARGKSDNVPSEEVVKKMKNYWRQLLNAKLITQRKFDNLTKAERGGLSELDKAGFIKRQLVETRQITKHVAQILDSRMNTKYDENDKLIREVKVITLKSKLVSDFRKDFQFYKVREINNYHHAHDAYLNAVVGTALIKKYPKLESEFVYGDYKVYDVRKMIAKSEQEIGKATAKYFFYSNIMNFFKTEITLANGEIRKRPLIETNGETGEIVWDKGRDFATVRKVLSMPQVNIVKKTEVQTGGFSKESILPKRNSDKLIARKKDWDPKKYGGFDSPTVAYSVLVVAKVEKGKSKKLKSVKELLGITIMERSSFEKNPIDFLEAKGYKEVKKDLIIKLPKYSLFELENGRKRMLASAGELQKGNELALPSKYVNFLYLASHYEKLKGSPEDNEQKQLFVEQHKHYLDEIIEQISEFSKRVILADANLDKVLSAYNKHRDKPIREQAENIIHLFTLTNLGAPAAFKYFDTTIDRKRYTSTKEVLDATLIHQSITGLYETRIDLSQLGGDGGEAAAKGGSGGGGGTLQLDDEYRLYSPLVKPDQNIQFWLEQFPQAWAETAGMGLAKQVPPQVIQLKASATPVSVRQYPLSKEAQEGIRPHVQRLIQQGILVPVQSPWNTPLLPVRKPGTNDYRPVQDLREVNKRVQDIHPTVPNPYNLLCALPPQRSWYTVLDLKDAFFCLRLHPTSQPLFAFEWRDPGTGRTGQLTWTRLPQGFKNSPTIFNEALHRDLANFRIQHPQVTLLQYVDDLLLAGATKQDCLEGTKALLLELSDLGYRASAKKAQICRREVTYLGYSLRDGQRWLTEARKKTVVQIPAPTTAKQVREFLGTAGFCRLWIPGFATLAAPLYPLTKPKGEFSWAPEHQKAFDAIKKALLSAPALALPDVTKPFTLYVDERKGVARGVLTQTLGPWRRPVAYLSKKLDPVASGWPVCLKAIAAVAILVKDADKLTLGQNITVIAPHALENIVRQPPDRWMTNARMTHYQSLLLTERVTFAPPAALNPATLLPEETDEPVTHDCHQLLIEETGVRKDLTDIPLTGEVLTWFTDGSSYVVEGKRMAGAAVVDGTRTIWASSLPEGTSAQKAELMALTQALRLAEGKSINIYTDSRYAFATAHVHGAIYKQRGWLTSAGREIKNKEEILSLLEALHLPKRLAIIHCPGHQKAKDPISRGNQMADRVAKQAAQGVNLLAGKRTADGSEFEKRTADGSEFESPKKKAKVE

SEQ ID NO: 300 - protein, 2125 aa, synthetic construct; identical to SEQ ID NO: 156

SEQ ID NO: 301 - protein, 2090 aa, synthetic construct
MPAAKRVKLDGGDKKYSIGLDIGTNSVGWAVITDEYKVPSKKFKVLGNTDRHSIKKNLIGALLFDSGETAEATRLKRTARRRYTRRKNRICYLQEIFSNEMAKVDDSFFHRLEESFLVEEDKKHERHPIFGNIVDEVAYHEKYPTIYHLRKKLVDSTDKADLRLIYLALAHMIKFRGHFLIEGDLNPDNSDVDKLFIQLVQTYNQLFEENPINASGVDAKAILSARLSKSRRLENLIAQLPGEKKNGLFGNLIALSLGLTPNFKSNFDLAEDAKLQLSKDTYDDDLDNLLAQIGDQYADLFLAAKNLSDAILLSDILRVNTEITKAPLSASMIKRYDEHHQDLTLLKALVRQQLPEKYKEIFFDQSKNGYAGYIDGGASQEEFYKFIKPILEKMDGTEELLVKLNREDLLRKQRTFDNGSIPHQIHLGELHAILRRQEDFYPFLKDNREKIEKILTFRIPYYVGPLARGNSRFAWMTRKSEETITPWNFEEVVDKGASAQSFIERMTNFDKNLPNEKVLPKHSLLYEYFTVYNELTKVKYVTEGMRKPAFLSGEQKKAIVDLLFKTNRKVTVKQLKEDYFKKIECFDSVEISGVEDRFNASLGTYHDLLKIIKDKDFLDNEENEDILEDIVLTLTLFEDREMIEERLKTYAHLFDDKVMKQLKRRRYTGWGRLSRKLINGIRDKQSGKTILDFLKSDGFANRNFMQLIHDDSLTFKEDIQKAQVSGQGDSLHEHIANLAGSPAIKKGILQTVKVVDELVKVMGRHKPENIVIEMARENQTTQKGQKNSRERMKRIEEGIKELGSQILKEHPVENTQLQNEKLYLYYLQNGRDMYVDQELDINRLSDYDVDHIVPQSFLKDDSIDNKVLTRSDKARGKSDNVPSEEVVKKMKNYWRQLLNAKLITQRKFDNLTKAERGGLSELDKAGFIKRQLVETRQITKHVAQILDSRMNTKYDENDKLIREVKVITLKSKLVSDFRKDFQFYKVREINNYHHAHDAYLNAVVGTALIKKYPKLESEFVYGDYKVYDVRKMIAKSEQEIGKATAKYFFYSNIMNFFKTEITLANGEIRKRPLIETNGETGEIVWDKGRDFATVRKVLSMPQVNIVKKTEVQTGGFSKESILPKRNSDKLIARKKDWDPKKYGGFDSPTVAYSVLVVAKVEKGKSKKLKSVKELLGITIMERSSFEKNPIDFLEAKGYKEVKKDLIIKLPKYSLFELENGRKRMLASAGELQKGNELALPSKYVNFLYLASHYEKLKGSPEDNEQKQLFVEQHKHYLDEIIEQISEFSKRVILADANLDKVLSAYNKHRDKPIREQAENIIHLFTLTNLGAPAAFKYFDTTIDRKRYTSTKEVLDATLIHQSITGLYETRIDLSQLGGDGGGGGEAAAKGSSGGTLQLDDEYRLYSPLVKPDQNIQFWLEQFPQAWAETAGMGLAKQVPPQVIQLKASATPVSVRQYPLSKEAQEGIRPHVQRLIQQGILVPVQSPWNTPLLPVRKPGTNDYRPVQDLREVNKRVQDIHPTVPNPYNLLCALPPQRSWYTVLDLKDAFFCLRLHPTSQPLFAFEWRDPGTGRTGQLTWTRLPQGFKNSPTIFNEALHRDLANFRIQHPQVTLLQYVDDLLLAGATKQDCLEGTKALLLELSDLGYRASAKKAQICRREVTYLGYSLRDGQRWLTEARKKTVVQIPAPTTAKQVREFLGTAGFCRLWIPGFATLAAPLYPLTKPKGEFSWAPEHQKAFDAIKKALLSAPALALPDVTKPFTLYVDERKGVARGVLTQTLGPWRRPVAYLSKKLDPVASGWPVCLKAIAAVAILVKDADKLTLGQNITVIAPHALENIVRQPPDRWMTNARMTHYQSLLLTERVTFAPPAALNPATLLPEETDEPVTHDCHQLLIEETGVRKDLTDIPLTGEVLTWFTDGSSYVVEGKRMAGAAVVDGTRTIWASSLPEGTSAQKAELMALTQALRLAEGKSINIYTDSRYAFATAHVHGAIYKQRGWLTSAGREIKNKEEILSLLEALHLPKRLAIIHCPGHQKAKDPISRGNQMADRVAKQAAQGVNLLAGKRTADGSEFEKRTADGSEFESPKKKAKVE

SEQ ID NO: 302 - protein, 2090 aa, synthetic construct; identical to SEQ ID NO: 164

SEQ ID NO: 303 - protein, 2112 aa, synthetic construct; identical to SEQ ID NO: 140

SEQ ID NO: 304 - protein, 2090 aa, synthetic construct
MPAAKRVKLDGGDKKYSIGLDIGTNSVGWAVITDEYKVPSKKFKVLGNTDRHSIKKNLIGALLFDSGETAEATRLKRTARRRYTRRKNRICYLQEIFSNEMAKVDDSFFHRLEESFLVEEDKKHERHPIFGNIVDEVAYHEKYPTIYHLRKKLVDSTDKADLRLIYLALAHMIKFRGHFLIEGDLNPDNSDVDKLFIQLVQTYNQLFEENPINASGVDAKAILSARLSKSRRLENLIAQLPGEKKNGLFGNLIALSLGLTPNFKSNFDLAEDAKLQLSKDTYDDDLDNLLAQIGDQYADLFLAAKNLSDAILLSDILRVNTEITKAPLSASMIKRYDEHHQDLTLLKALVRQQLPEKYKEIFFDQSKNGYAGYIDGGASQEEFYKFIKPILEKMDGTEELLVKLNREDLLRKQRTFDNGSIPHQIHLGELHAILRRQEDFYPFLKDNREKIEKILTFRIPYYVGPLARGNSRFAWMTRKSEETITPWNFEEVVDKGASAQSFIERMTNFDKNLPNEKVLPKHSLLYEYFTVYNELTKVKYVTEGMRKPAFLSGEQKKAIVDLLFKTNRKVTVKQLKEDYFKKIECFDSVEISGVEDRFNASLGTYHDLLKIIKDKDFLDNEENEDILEDIVLTLTLFEDREMIEERLKTYAHLFDDKVMKQLKRRRYTGWGRLSRKLINGIRDKQSGKTILDFLKSDGFANRNFMQLIHDDSLTFKEDIQKAQVSGQGDSLHEHIANLAGSPAIKKGILQTVKVVDELVKVMGRHKPENIVIEMARENQTTQKGQKNSRERMKRIEEGIKELGSQILKEHPVENTQLQNEKLYLYYLQNGRDMYVDQELDINRLSDYDVDHIVPQSFLKDDSIDNKVLTRSDKARGKSDNVPSEEVVKKMKNYWRQLLNAKLITQRKFDNLTKAERGGLSELDKAGFIKRQLVETRQITKHVAQILDSRMNTKYDENDKLIREVKVITLKSKLVSDFRKDFQFYKVREINNYHHAHDAYLNAVVGTALIKKYPKLESEFVYGDYKVYDVRKMIAKSEQEIGKATAKYFFYSNIMNFFKTEITLANGEIRKRPLIETNGETGEIVWDKGRDFATVRKVLSMPQVNIVKKTEVQTGGFSKESILPKRNSDKLIARKKDWDPKKYGGFDSPTVAYSVLVVAKVEKGKSKKLKSVKELLGITIMERSSFEKNPIDFLEAKGYKEVKKDLIIKLPKYSLFELENGRKRMLASAGELQKGNELALPSKYVNFLYLASHYEKLKGSPEDNEQKQLFVEQHKHYLDEIIEQISEFSKRVILADANLDKVLSAYNKHRDKPIREQAENIIHLFTLTNLGAPAAFKYFDTTIDRKRYTSTKEVLDATLIHQSITGLYETRIDLSQLGGDGGEAAAKPAPGSSGGTLQLDDEYRLYSPLVKPDQNIQFWLEQFPQAWAETAGMGLAKQVPPQVIQLKASATPVSVRQYPLSKEAQEGIRPHVQRLIQQGILVPVQSPWNTPLLPVRKPGTNDYRPVQDLREVNKRVQDIHPTVPNPYNLLCALPPQRSWYTVLDLKDAFFCLRLHPTSQPLFAFEWRDPGTGRTGQLTWTRLPQGFKNSPTIFNEALHRDLANFRIQHPQVTLLQYVDDLLLAGATKQDCLEGTKALLLELSDLGYRASAKKAQICRREVTYLGYSLRDGQRWLTEARKKTVVQIPAPTTAKQVREFLGTAGFCRLWIPGFATLAAPLYPLTKPKGEFSWAPEHQKAFDAIKKALLSAPALALPDVTKPFTLYVDERKGVARGVLTQTLGPWRRPVAYLSKKLDPVASGWPVCLKAIAAVAILVKDADKLTLGQNITVIAPHALENIVRQPPDRWMTNARMTHYQSLLLTERVTFAPPAALNPATLLPEETDEPVTHDCHQLLIEETGVRKDLTDIPLTGEVLTWFTDGSSYVVEGKRMAGAAVVDGTRTIWASSLPEGTSAQKAELMALTQALRLAEGKSINIYTDSRYAFATAHVHGAIYKQRGWLTSAGREIKNKEEILSLLEALHLPKRLAIIHCPGHQKAKDPISRGNQMADRVAKQAAQGVNLLAGKRTADGSEFEKRTADGSEFESPKKKAKVE

SEQ ID NO: 305 - protein, 2090 aa, synthetic construct; identical to SEQ ID NO: 127

SEQ ID NO: 306 - protein, 2087 aa, synthetic construct; identical to SEQ ID NO: 126

SEQ ID NO: 307 - protein, 2088 aa, synthetic construct
MPAAKRVKLDGGDKKYSIGLDIGTNSVGWAVITDEYKVPSKKFKVLGNTDRHSIKKNLIGALLFDSGETAEATRLKRTARRRYTRRKNRICYLQEIFSNEMAKVDDSFFHRLEESFLVEEDKKHERHPIFGNIVDEVAYHEKYPTIYHLRKKLVDSTDKADLRLIYLALAHMIKFRGHFLIEGDLNPDNSDVDKLFIQLVQTYNQLFEENPINASGVDAKAILSARLSKSRRLENLIAQLPGEKKNGLFGNLIALSLGLTPNFKSNFDLAEDAKLQLSKDTYDDDLDNLLAQIGDQYADLFLAAKNLSDAILLSDILRVNTEITKAPLSASMIKRYDEHHQDLTLLKALVRQQLPEKYKEIFFDQSKNGYAGYIDGGASQEEFYKFIKPILEKMDGTEELLVKLNREDLLRKQRTFDNGSIPHQIHLGELHAILRRQEDFYPFLKDNREKIEKILTFRIPYYVGPLARGNSRFAWMTRKSEETITPWNFEEVVDKGASAQSFIERMTNFDKNLPNEKVLPKHSLLYEYFTVYNELTKVKYVTEGMRKPAFLSGEQKKAIVDLLFKTNRKVTVKQLKEDYFKKIECFDSVEISGVEDRFNASLGTYHDLLKIIKDKDFLDNEENEDILEDIVLTLTLFEDREMIEERLKTYAHLFDDKVMKQLKRRRYTGWGRLSRKLINGIRDKQSGKTILDFLKSDGFANRNFMQLIHDDSLTFKEDIQKAQVSGQGDSLHEHIANLAGSPAIKKGILQTVKVVDELVKVMGRHKPENIVIEMARENQTTQKGQKNSRERMKRIEEGIKELGSQILKEHPVENTQLQNEKLYLYYLQNGRDMYVDQELDINRLSDYDVDHIVPQSFLKDDSIDNKVLTRSDKARGKSDNVPSEEVVKKMKNYWRQLLNAKLITQRKFDNLTKAERGGLSELDKAGFIKRQLVETRQITKHVAQILDSRMNTKYDENDKLIREVKVITLKSKLVSDFRKDFQFYKVREINNYHHAHDAYLNAVVGTALIKKYPKLESEFVYGDYKVYDVRKMIAKSEQEIGKATAKYFFYSNIMNFFKTEITLANGEIRKRPLIETNGETGEIVWDKGRDFATVRKVLSMPQVNIVKKTEVQTGGFSKESILPKRNSDKLIARKKDWDPKKYGGFDSPTVAYSVLVVAKVEKGKSKKLKSVKELLGITIMERSSFEKNPIDFLEAKGYKEVKKDLIIKLPKYSLFELENGRKRMLASAGELQKGNELALPSKYVNFLYLASHYEKLKGSPEDNEQKQLFVEQHKHYLDEIIEQISEFSKRVILADANLDKVLSAYNKHRDKPIREQAENIIHLFTLTNLGAPAAFKYFDTTIDRKRYTSTKEVLDATLIHQSITGLYETRIDLSQLGGDGGGGGGSSPAPGGTLQLDDEYRLYSPLVKPDQNIQFWLEQFPQAWAETAGMGLAKQVPPQVIQLKASATPVSVRQYPLSKEAQEGIRPHVQRLIQQGILVPVQSPWNTPLLPVRKPGTNDYRPVQDLREVNKRVQDIHPTVPNPYNLLCALPPQRSWYTVLDLKDAFFCLRLHPTSQPLFAFEWRDPGTGRTGQLTWTRLPQGFKNSPTIFNEALHRDLANFRIQHPQVTLLQYVDDLLLAGATKQDCLEGTKALLLELSDLGYRASAKKAQICRREVTYLGYSLRDGQRWLTEARKKTVVQIPAPTTAKQVREFLGTAGFCRLWIPGFATLAAPLYPLTKPKGEFSWAPEHQKAFDAIKKALLSAPALALPDVTKPFTLYVDERKGVARGVLTQTLGPWRRPVAYLSKKLDPVASGWPVCLKAIAAVAILVKDADKLTLGQNITVIAPHALENIVRQPPDRWMTNARMTHYQSLLLTERVTFAPPAALNPATLLPEETDEPVTHDCHQLLIEETGVRKDLTDIPLTGEVLTWFTDGSSYVVEGKRMAGAAVVDGTRTIWASSLPEGTSAQKAELMALTQALRLAEGKSINIYTDSRYAFATAHVHGAIYKQRGWLTSAGREIKNKEEILSLLEALHLPKRLAIIHCPGHQKAKDPISRGNQMADRVAKQAAQGVNLLAGKRTADGSEFEKRTADGSEFESPKKKAKVE

SEQ ID NO: 308 - protein, 2084 aa, synthetic construct; identical to SEQ ID NO: 151

SEQ ID NO: 309 - protein, 2092 aa, synthetic construct; identical to SEQ ID NO: 157

SEQ ID NO: 310 - protein, 2090 aa, synthetic construct
MPAAKRVKLDGGDKKYSIGLDIGTNSVGWAVITDEYKVPSKKFKVLGNTDRHSIKKNLIGALLFDSGETAEATRLKRTARRRYTRRKNRICYLQEIFSNEMAKVDDSFFHRLEESFLVEEDKKHERHPIFGNIVDEVAYHEKYPTIYHLRKKLVDSTDKADLRLIYLALAHMIKFRGHFLIEGDLNPDNSDVDKLFIQLVQTYNQLFEENPINASGVDAKAILSARLSKSRRLENLIAQLPGEKKNGLFGNLIALSLGLTPNFKSNFDLAEDAKLQLSKDTYDDDLDNLLAQIGDQYADLFLAAKNLSDAILLSDILRVNTEITKAPLSASMIKRYDEHHQDLTLLKALVRQQLPEKYKEIFFDQSKNGYAGYIDGGASQEEFYKFIKPILEKMDGTEELLVKLNREDLLRKQRTFDNGSIPHQIHLGELHAILRRQEDFYPFLKDNREKIEKILTFRIPYYVGPLARGNSRFAWMTRKSEETITPWNFEEVVDKGASAQSFIERMTNFDKNLPNEKVLPKHSLLYEYFTVYNELTKVKYVTEGMRKPAFLSGEQKKAIVDLLFKTNRKVTVKQLKEDYFKKIECFDSVEISGVEDRFNASLGTYHDLLKIIKDKDFLDNEENEDILEDIVLTLTLFEDREMIEERLKTYAHLFDDKVMKQLKRRRYTGWGRLSRKLINGIRDKQSGKTILDFLKSDGFANRNFMQLIHDDSLTFKEDIQKAQVSGQGDSLHEHIANLAGSPAIKKGILQTVKVVDELVKVMGRHKPENIVIEMARENQTTQKGQKNSRERMKRIEEGIKELGSQILKEHPVENTQLQNEKLYLYYLQNGRDMYVDQELDINRLSDYDVDHIVPQSFLKDDSIDNKVLTRSDKARGKSDNVPSEEVVKKMKNYWRQLLNAKLITQRKFDNLTKAERGGLSELDKAGFIKRQLVETRQITKHVAQILDSRMNTKYDENDKLIREVKVITLKSKLVSDFRKDFQFYKVREINNYHHAHDAYLNAVVGTALIKKYPKLESEFVYGDYKVYDVRKMIAKSEQEIGKATAKYFFYSNIMNFFKTEITLANGEIRKRPLIETNGETGEIVWDKGRDFATVRKVLSMPQVNIVKKTEVQTGGFSKESILPKRNSDKLIARKKDWDPKKYGGFDSPTVAYSVLVVAKVEKGKSKKLKSVKELLGITIMERSSFEKNPIDFLEAKGYKEVKKDLIIKLPKYSLFELENGRKRMLASAGELQKGNELALPSKYVNFLYLASHYEKLKGSPEDNEQKQLFVEQHKHYLDEIIEQISEFSKRVILADANLDKVLSAYNKHRDKPIREQAENIIHLFTLTNLGAPAAFKYFDTTIDRKRYTSTKEVLDATLIHQSITGLYETRIDLSQLGGDGGGSSPAPEAAAKGGTLQLDDEYRLYSPLVKPDQNIQFWLEQFPQAWAETAGMGLAKQVPPQVIQLKASATPVSVRQYPLSKEAQEGIRPHVQRLIQQGILVPVQSPWNTPLLPVRKPGTNDYRPVQDLREVNKRVQDIHPTVPNPYNLLCALPPQRSWYTVLDLKDAFFCLRLHPTSQPLFAFEWRDPGTGRTGQLTWTRLPQGFKNSPTIFNEALHRDLANFRIQHPQVTLLQYVDDLLLAGATKQDCLEGTKALLLELSDLGYRASAKKAQICRREVTYLGYSLRDGQRWLTEARKKTVVQIPAPTTAKQVREFLGTAGFCRLWIPGFATLAAPLYPLTKPKGEFSWAPEHQKAFDAIKKALLSAPALALPDVTKPFTLYVDERKGVARGVLTQTLGPWRRPVAYLSKKLDPVASGWPVCLKAIAAVAILVKDADKLTLGQNITVIAPHALENIVRQPPDRWMTNARMTHYQSLLLTERVTFAPPAALNPATLLPEETDEPVTHDCHQLLIEETGVRKDLTDIPLTGEVLTWFTDGSSYVVEGKRMAGAAVVDGTRTIWASSLPEGTSAQKAELMALTQALRLAEGKSINIYTDSRYAFATAHVHGAIYKQRGWLTSAGREIKNKEEILSLLEALHLPKRLAIIHCPGHQKAKDPISRGNQMADRVAKQAAQGVNLLAGKRTADGSEFEKRTADGSEFESPKKKAKVE

SEQ ID NO: 311 - protein, 2090 aa, synthetic construct
MPAAKRVKLDGGDKKYSIGLDIGTNSVGWAVITDEYKVPSKKFKVLGNTDRHSIKKNLIGALLFDSGETAEATRLKRTARRRYTRRKNRICYLQEIFSNEMAKVDDSFFHRLEESFLVEEDKKHERHPIFGNIVDEVAYHEKYPTIYHLRKKLVDSTDKADLRLIYLALAHMIKFRGHFLIEGDLNPDNSDVDKLFIQLVQTYNQLFEENPINASGVDAKAILSARLSKSRRLENLIAQLPGEKKNGLFGNLIALSLGLTPNFKSNFDLAEDAKLQLSKDTYDDDLDNLLAQIGDQYADLFLAAKNLSDAILLSDILRVNTEITKAPLSASMIKRYDEHHQDLTLLKALVRQQLPEKYKEIFFDQSKNGYAGYIDGGASQEEFYKFIKPILEKMDGTEELLVKLNREDLLRKQRTFDNGSIPHQIHLGELHAILRRQEDFYPFLKDNREKIEKILTFRIPYYVGPLARGNSRFAWMTRKSEETITPWNFEEVVDKGASAQSFIERMTNFDKNLPNEKVLPKHSLLYEYFTVYNELTKVKYVTEGMRKPAFLSGEQKKAIVDLLFKTNRKVTVKQLKEDYFKKIECFDSVEISGVEDRFNASLGTYHDLLKIIKDKDFLDNEENEDILEDIVLTLTLFEDREMIEERLKTYAHLFDDKVMKQLKRRRYTGWGRLSRKLINGIRDKQSGKTILDFLKSDGFANRNFMQLIHDDSLTFKEDIQKAQVSGQGDSLHEHIANLAGSPAIKKGILQTVKVVDELVKVMGRHKPENIVIEMARENQTTQKGQKNSRERMKRIEEGIKELGSQILKEHPVENTQLQNEKLYLYYLQNGRDMYVDQELDINRLSDYDVDHIVPQSFLKDDSIDNKVLTRSDKARGKSDNVPSEEVVKKMKNYWRQLLNAKLITQRKFDNLTKAERGGLSELDKAGFIKRQLVETRQITKHVAQILDSRMNTKYDENDKLIREVKVITLKSKLVSDFRKDFQFYKVREINNYHHAHDAYLNAVVGTALIKKYPKLESEFVYGDYKVYDVRKMIAKSEQEIGKATAKYFFYSNIMNFFKTEITLANGEIRKRPLIETNGETGEIVWDKGRDFATVRKVLSMPQVNIVKKTEVQTGGFSKESILPKRNSDKLIARKKDWDPKKYGGFDSPTVAYSVLVVAKVEKGKSKKLKSVKELLGITIMERSSFEKNPIDFLEAKGYKEVKKDLIIKLPKYSLFELENGRKRMLASAGELQKGNELALPSKYVNFLYLASHYEKLKGSPEDNEQKQLFVEQHKHYLDEIIEQISEFSKRVILADANLDKVLSAYNKHRDKPIREQAENIIHLFTLTNLGAPAAFKYFDTTIDRKRYTSTKEVLDATLIHQSITGLYETRIDLSQLGGDGGGGGGGSEAAAKGGTLQLDDEYRLYSPLVKPDQNIQFWLEQFPQAWAETAGMGLAKQVPPQVIQLKASATPVSVRQYPLSKEAQEGIRPHVQRLIQQGILVPVQSPWNTPLLPVRKPGTNDYRPVQDLREVNKRVQDIHPTVPNPYNLLCALPPQRSWYTVLDLKDAFFCLRLHPTSQPLFAFEWRDPGTGRTGQLTWTRLPQGFKNSPTIFNEALHRDLANFRIQHPQVTLLQYVDDLLLAGATKQDCLEGTKALLLELSDLGYRASAKKAQICRREVTYLGYSLRDGQRWLTEARKKTVVQIPAPTTAKQVREFLGTAGFCRLWIPGFATLAAPLYPLTKPKGEFSWAPEHQKAFDAIKKALLSAPALALPDVTKPFTLYVDERKGVARGVLTQTLGPWRRPVAYLSKKLDPVASGWPVCLKAIAAVAILVKDADKLTLGQNITVIAPHALENIVRQPPDRWMTNARMTHYQSLLLTERVTFAPPAALNPATLLPEETDEPVTHDCHQLLIEETGVRKDLTDIPLTGEVLTWFTDGSSYVVEGKRMAGAAVVDGTRTIWASSLPEGTSAQKAELMALTQALRLAEGKSINIYTDSRYAFATAHVHGAIYKQRGWLTSAGREIKNKEEILSLLEALHLPKRLAIIHCPGHQKAKDPISRGNQMADRVAKQAAQGVNLLAGKRTADGSEFEKRTADGSEFESPKKKAKVE

SEQ ID NO: 312 - protein, 2090 aa, synthetic construct; identical to SEQ ID NO: 116

SEQ ID NO: 313 - protein, 2109 aa, synthetic construct; identical to SEQ ID NO: 117

SEQ ID NO: 314 - protein, 2088 aa, synthetic construct
MPAAKRVKLDGGDKKYSIGLDIGTNSVGWAVITDEYKVPSKKFKVLGNTDRHSIKKNLIGALLFDSGETAEATRLKRTARRRYTRRKNRICYLQEIFSNEMAKVDDSFFHRLEESFLVEEDKKHERHPIFGNIVDEVAYHEKYPTIYHLRKKLVDSTDKADLRLIYLALAHMIKFRGHFLIEGDLNPDNSDVDKLFIQLVQTYNQLFEENPINASGVDAKAILSARLSKSRRLENLIAQLPGEKKNGLFGNLIALSLGLTPNFKSNFDLAEDAKLQLSKDTYDDDLDNLLAQIGDQYADLFLAAKNLSDAILLSDILRVNTEITKAPLSASMIKRYDEHHQDLTLLKALVRQQLPEKYKEIFFDQSKNGYAGYIDGGASQEEFYKFIKPILEKMDGTEELLVKLNREDLLRKQRTFDNGSIPHQIHLGELHAILRRQEDFYPFLKDNREKIEKILTFRIPYYVGPLARGNSRFAWMTRKSEETITPWNFEEVVDKGASAQSFIERMTNFDKNLPNEKVLPKHSLLYEYFTVYNELTKVKYVTEGMRKPAFLSGEQKKAIVDLLFKTNRKVTVKQLKEDYFKKIECFDSVEISGVEDRFNASLGTYHDLLKIIKDKDFLDNEENEDILEDIVLTLTLFEDREMIEERLKTYAHLFDDKVMKQLKRRRYTGWGRLSRKLINGIRDKQSGKTILDFLKSDGFANRNFMQLIHDDSLTFKEDIQKAQVSGQGDSLHEHIANLAGSPAIKKGILQTVKVVDELVKVMGRHKPENIVIEMARENQTTQKGQKNSRERMKRIEEGIKELGSQILKEHPVENTQLQNEKLYLYYLQNGRDMYVDQELDINRLSDYDVDHIVPQSFLKDDSIDNKVLTRSDKARGKSDNVPSEEVVKKMKNYWRQLLNAKLITQRKFDNLTKAERGGLSELDKAGFIKRQLVETRQITKHVAQILDSRMNTKYDENDKLIREVKVITLKSKLVSDFRKDFQFYKVREINNYHHAHDAYLNAVVGTALIKKYPKLESEFVYGDYKVYDVRKMIAKSEQEIGKATAKYFFYSNIMNFFKTEITLANGEIRKRPLIETNGETGEIVWDKGRDFATVRKVLSMPQVNIVKKTEVQTGGFSKESILPKRNSDKLIARKKDWDPKKYGGFDSPTVAYSVLVVAKVEKGKSKKLKSVKELLGITIMERSSFEKNPIDFLEAKGYKEVKKDLIIKLPKYSLFELENGRKRMLASAGELQKGNELALPSKYVNFLYLASHYEKLKGSPEDNEQKQLFVEQHKHYLDEIIEQISEFSKRVILADANLDKVLSAYNKHRDKPIREQAENIIHLFTLTNLGAPAAFKYFDTTIDRKRYTSTKEVLDATLIHQSITGLYETRIDLSQLGGDGGGGGPAPGSSGGTLQLDDEYRLYSPLVKPDQNIQFWLEQFPQAWAETAGMGLAKQVPPQVIQLKASATPVSVRQYPLSKEAQEGIRPHVQRLIQQGILVPVQSPWNTPLLPVRKPGTNDYRPVQDLREVNKRVQDIHPTVPNPYNLLCALPPQRSWYTVLDLKDAFFCLRLHPTSQPLFAFEWRDPGTGRTGQLTWTRLPQGFKNSPTIFNEALHRDLANFRIQHPQVTLLQYVDDLLLAGATKQDCLEGTKALLLELSDLGYRASAKKAQICRREVTYLGYSLRDGQRWLTEARKKTVVQIPAPTTAKQVREFLGTAGFCRLWIPGFATLAAPLYPLTKPKGEFSWAPEHQKAFDAIKKALLSAPALALPDVTKPFTLYVDERKGVARGVLTQTLGPWRRPVAYLSKKLDPVASGWPVCLKAIAAVAILVKDADKLTLGQNITVIAPHALENIVRQPPDRWMTNARMTHYQSLLLTERVTFAPPAALNPATLLPEETDEPVTHDCHQLLIEETGVRKDLTDIPLTGEVLTWFTDGSSYVVEGKRMAGAAVVDGTRTIWASSLPEGTSAQKAELMALTQALRLAEGKSINIYTDSRYAFATAHVHGAIYKQRGWLTSAGREIKNKEEILSLLEALHLPKRLAIIHCPGHQKAKDPISRGNQMADRVAKQAAQGVNLLAGKRTADGSEFEKRTADGSEFESPKKKAKVE

SEQ ID NO: 315 - protein, 2082 aa, synthetic construct; identical to SEQ ID NO: 120

SEQ ID NO: 316 - protein, 2097 aa, synthetic construct; identical to SEQ ID NO: 142

SEQ ID NO: 317 - protein, 2090 aa, synthetic construct
MPAAKRVKLDGGDKKYSIGLDIGTNSVGWAVITDEYKVPSKKFKVLGNTDRHSIKKNLIGALLFDSGETAEATRLKRTARRRYTRRKNRICYLQEIFSNEMAKVDDSFFHRLEESFLVEEDKKHERHPIFGNIVDEVAYHEKYPTIYHLRKKLVDSTDKADLRLIYLALAHMIKFRGHFLIEGDLNPDNSDVDKLFIQLVQTYNQLFEENPINASGVDAKAILSARLSKSRRLENLIAQLPGEKKNGLFGNLIALSLGLTPNFKSNFDLAEDAKLQLSKDTYDDDLDNLLAQIGDQYADLFLAAKNLSDAILLSDILRVNTEITKAPLSASMIKRYDEHHQDLTLLKALVRQQLPEKYKEIFFDQSKNGYAGYIDGGASQEEFYKFIKPILEKMDGTEELLVKLNREDLLRKQRTFDNGSIPHQIHLGELHAILRRQEDFYPFLKDNREKIEKILTFRIPYYVGPLARGNSRFAWMTRKSEETITPWNFEEVVDKGASAQSFIERMTNFDKNLPNEKVLPKHSLLYEYFTVYNELTKVKYVTEGMRKPAFLSGEQKKAIVDLLFKTNRKVTVKQLKEDYFKKIECFDSVEISGVEDRFNASLGTYHDLLKIIKDKDFLDNEENEDILEDIVLTLTLFEDREMIEERLKTYAHLFDDKVMKQLKRRRYTGWGRLSRKLINGIRDKQSGKTILDFLKSDGFANRNFMQLIHDDSLTFKEDIQKAQVSGQGDSLHEHIANLAGSPAIKKGILQTVKVVDELVKVMGRHKPENIVIEMARENQTTQKGQKNSRERMKRIEEGIKELGSQILKEHPVENTQLQNEKLYLYYLQNGRDMYVDQELDINRLSDYDVDHIVPQSFLKDDSIDNKVLTRSDKARGKSDNVPSEEVVKKMKNYWRQLLNAKLITQRKFDNLTKAERGGLSELDKAGFIKRQLVETRQITKHVAQILDSRMNTKYDENDKLIREVKVITLKSKLVSDFRKDFQFYKVREINNYHHAHDAYLNAVVGTALIKKYPKLESEFVYGDYKVYDVRKMIAKSEQEIGKATAKYFFYSNIMNFFKTEITLANGEIRKRPLIETNGETGEIVWDKGRDFATVRKVLSMPQVNIVKKTEVQTGGFSKESILPKRNSDKLIARKKDWDPKKYGGFDSPTVAYSVLVVAKVEKGKSKKLKSVKELLGITIMERSSFEKNPIDFLEAKGYKEVKKDLIIKLPKYSLFELENGRKRMLASAGELQKGNELALPSKYVNFLYLASHYEKLKGSPEDNEQKQLFVEQHKHYLDEIIEQISEFSKRVILADANLDKVLSAYNKHRDKPIREQAENIIHLFTLTNLGAPAAFKYFDTTIDRKRYTSTKEVLDATLIHQSITGLYETRIDLSQLGGDGGGSSGGGEAAAKGGTLQLDDEYRLYSPLVKPDQNIQFWLEQFPQAWAETAGMGLAKQVPPQVIQLKASATPVSVRQYPLSKEAQEGIRPHVQRLIQQGILVPVQSPWNTPLLPVRKPGTNDYRPVQDLREVNKRVQDIHPTVPNPYNLLCALPPQRSWYTVLDLKDAFFCLRLHPTSQPLFAFEWRDPGTGRTGQLTWTRLPQGFKNSPTIFNEALHRDLANFRIQHPQVTLLQYVDDLLLAGATKQDCLEGTKALLLELSDLGYRASAKKAQICRREVTYLGYSLRDGQRWLTEARKKTVVQIPAPTTAKQVREFLGTAGFCRLWIPGFATLAAPLYPLTKPKGEFSWAPEHQKAFDAIKKALLSAPALALPDVTKPFTLYVDERKGVARGVLTQTLGPWRRPVAYLSKKLDPVASGWPVCLKAIAAVAILVKDADKLTLGQNITVIAPHALENIVRQPPDRWMTNARMTHYQSLLLTERVTFAPPAALNPATLLPEETDEPVTHDCHQLLIEETGVRKDLTDIPLTGEVLTWFTDGSSYVVEGKRMAGAAVVDGTRTIWASSLPEGTSAQKAELMALTQALRLAEGKSINIYTDSRYAFATAHVHGAIYKQRGWLTSAGREIKNKEEILSLLEALHLPKRLAIIHCPGHQKAKDPISRGNQMADRVAKQAAQGVNLLAGKRTADGSEFEKRTADGSEFESPKKKAKVE

SEQ ID NO: 318 - protein, 2090 aa, synthetic construct; identical to SEQ ID NO: 121

SEQ ID NO: 319 - protein, 2090 aa, synthetic construct; identical to SEQ ID NO: 124

SEQ ID NO: 320 - protein, 2088 aa, synthetic construct
MPAAKRVKLDGGDKKYSIGLDIGTNSVGWAVITDEYKVPSKKFKVLGNTDRHSIKKNLIGALLFDSGETAEATRLKRTARRRYTRRKNRICYLQEIFSNEMAKVDDSFFHRLEESFLVEEDKKHERHPIFGNIVDEVAYHEKYPTIYHLRKKLVDSTDKADLRLIYLALAHMIKFRGHFLIEGDLNPDNSDVDKLFIQLVQTYNQLFEENPINASGVDAKAILSARLSKSRRLENLIAQLPGEKKNGLFGNLIALSLGLTPNFKSNFDLAEDAKLQLSKDTYDDDLDNLLAQIGDQYADLFLAAKNLSDAILLSDILRVNTEITKAPLSASMIKRYDEHHQDLTLLKALVRQQLPEKYKEIFFDQSKNGYAGYIDGGASQEEFYKFIKPILEKMDGTEELLVKLNREDLLRKQRTFDNGSIPHQIHLGELHAILRRQEDFYPFLKDNREKIEKILTFRIPYYVGPLARGNSRFAWMTRKSEETITPWNFEEVVDKGASAQSFIERMTNFDKNLPNEKVLPKHSLLYEYFTVYNELTKVKYVTEGMRKPAFLSGEQKKAIVDLLFKTNRKVTVKQLKEDYFKKIECFDSVEISGVEDRFNASLGTYHDLLKIIKDKDFLDNEENEDILEDIVLTLTLFEDREMIEERLKTYAHLFDDKVMKQLKRRRYTGWGRLSRKLINGIRDKQSGKTILDFLKSDGFANRNFMQLIHDDSLTFKEDIQKAQVSGQGDSLHEHIANLAGSPAIKKGILQTVKVVDELVKVMGRHKPENIVIEMARENQTTQKGQKNSRERMKRIEEGIKELGSQILKEHPVENTQLQNEKLYLYYLQNGRDMYVDQELDINRLSDYDVDHIVPQSFLKDDSIDNKVLTRSDKARGKSDNVPSEEVVKKMKNYWRQLLNAKLITQRKFDNLTKAERGGLSELDKAGFIKRQLVETRQITKHVAQILDSRMNTKYDENDKLIREVKVITLKSKLVSDFRKDFQFYKVREINNYHHAHDAYLNAVVGTALIKKYPKLESEFVYGDYKVYDVRKMIAKSEQEIGKATAKYFFYSNIMNFFKTEITLANGEIRKRPLIETNGETGEIVWDKGRDFATVRKVLSMPQVNIVKKTEVQTGGFSKESILPKRNSDKLIARKKDWDPKKYGGFDSPTVAYSVLVVAKVEKGKSKKLKSVKELLGITIMERSSFEKNPIDFLEAKGYKEVKKDLIIKLPKYSLFELENGRKRMLASAGELQKGNELALPSKYVNFLYLASHYEKLKGSPEDNEQKQLFVEQHKHYLDEIIEQISEFSKRVILADANLDKVLSAYNKHRDKPIREQAENIIHLFTLTNLGAPAAFKYFDTTIDRKRYTSTKEVLDATLIHQSITGLYETRIDLSQLGGDGGGGGGGSGSSGGTLQLDDEYRLYSPLVKPDQNIQFWLEQFPQAWAETAGMGLAKQVPPQVIQLKASATPVSVRQYPLSKEAQEGIRPHVQRLIQQGILVPVQSPWNTPLLPVRKPGTNDYRPVQDLREVNKRVQDIHPTVPNPYNLLCALPPQRSWYTVLDLKDAFFCLRLHPTSQPLFAFEWRDPGTGRTGQLTWTRLPQGFKNSPTIFNEALHRDLANFRIQHPQVTLLQYVDDLLLAGATKQDCLEGTKALLLELSDLGYRASAKKAQICRREVTYLGYSLRDGQRWLTEARKKTVVQIPAPTTAKQVREFLGTAGFCRLWIPGFATLAAPLYPLTKPKGEFSWAPEHQKAFDAIKKALLSAPALALPDVTKPFTLYVDERKGVARGVLTQTLGPWRRPVAYLSKKLDPVASGWPVCLKAIAAVAILVKDADKLTLGQNITVIAPHALENIVRQPPDRWMTNARMTHYQSLLLTERVTFAPPAALNPATLLPEETDEPVTHDCHQLLIEETGVRKDLTDIPLTGEVLTWFTDGSSYVVEGKRMAGAAVVDGTRTIWASSLPEGTSAQKAELMALTQALRLAEGKSINIYTDSRYAFATAHVHGAIYKQRGWLTSAGREIKNKEEILSLLEALHLPKRLAIIHCPGHQKAKDPISRGNQMADRVAKQAAQGVNLLAGKRTADGSEFEKRTADGSEFESPKKKAKVE

SEQ ID NO: 321 - protein, 2090 aa, synthetic construct; identical to SEQ ID NO: 138

SEQ ID NO: 322 - protein, 2090 aa, synthetic construct
MPAAKRVKLDGGDKKYSIGLDIGTNSVGWAVITDEYKVPSKKFKVLGNTDRHSIKKNLIGALLFDSGETAEATRLKRTARRRYTRRKNRICYLQEIFSNEMAKVDDSFFHRLEESFLVEEDKKHERHPIFGNIVDEVAYHEKYPTIYHLRKKLVDSTDKADLRLIYLALAHMIKFRGHFLIEGDLNPDNSDVDKLFIQLVQTYNQLFEENPINASGVDAKAILSARLSKSRRLENLIAQLPGEKKNGLFGNLIALSLGLTPNFKSNFDLAEDAKLQLSKDTYDDDLDNLLAQIGDQYADLFLAAKNLSDAILLSDILRVNTEITKAPLSASMIKRYDEHHQDLTLLKALVRQQLPEKYKEIFFDQSKNGYAGYIDGGASQEEFYKFIKPILEKMDGTEELLVKLNREDLLRKQRTFDNGSIPHQIHLGELHAILRRQEDFYPFLKDNREKIEKILTFRIPYYVGPLARGNSRFAWMTRKSEETITPWNFEEVVDKGASAQSFIERMTNFDKNLPNEKVLPKHSLLYEYFTVYNELTKVKYVTEGMRKPAFLSGEQKKAIVDLLFKTNRKVTVKQLKEDYFKKIECFDSVEISGVEDRFNASLGTYHDLLKIIKDKDFLDNEENEDILEDIVLTLTLFEDREMIEERLKTYAHLFDDKVMKQLKRRRYTGWGRLSRKLINGIRDKQSGKTILDFLKSDGFANRNFMQLIHDDSLTFKEDIQKAQVSGQGDSLHEHIANLAGSPAIKKGILQTVKVVDELVKVMGRHKPENIVIEMARENQTTQKGQKNSRERMKRIEEGIKELGSQILKEHPVENTQLQNEKLYLYYLQNGRDMYVDQELDINRLSDYDVDHIVPQSFLKDDSIDNKVLTRSDKARGKSDNVPSEEVVKKMKNYWRQLLNAKLITQRKFDNLTKAERGGLSELDKAGFIKRQLVETRQITKHVAQILDSRMNTKYDENDKLIREVKVITLKSKLVSDFRKDFQFYKVREINNYHHAHDAYLNAVVGTALIKKYPKLESEFVYGDYKVYDVRKMIAKSEQEIGKATAKYFFYSNIMNFFKTEITLANGEIRKRPLIETNGETGEIVWDKGRDFATVRKVLSMPQVNIVKKTEVQTGGFSKESILPKRNSDKLIARKKDWDPKKYGGFDSPTVAYSVLVVAKVEKGKSKKLKSVKELLGITIMERSSFEKNPIDFLEAKGYKEVKKDLIIKLPKYSLFELENGRKRMLASAGELQKGNELALPSKYVNFLYLASHYEKLKGSPEDNEQKQLFVEQHKHYLDEIIEQISEFSKRVILADANLDKVLSAYNKHRDKPIREQAENIIHLFTLTNLGAPAAFKYFDTTIDRKRYTSTKEVLDATLIHQSITGLYETRIDLSQLGGDGGGGGEAAAKGGSGGTLQLDDEYRLYSPLVKPDQNIQFWLEQFPQAWAETAGMGLAKQVPPQVIQLKASATPVSVRQYPLSKEAQEGIRPHVQRLIQQGILVPVQSPWNTPLLPVRKPGTNDYRPVQDLREVNKRVQDIHPTVPNPYNLLCALPPQRSWYTVLDLKDAFFCLRLHPTSQPLFAFEWRDPGTGRTGQLTWTRLPQGFKNSPTIFNEALHRDLANFRIQHPQVTLLQYVDDLLLAGATKQDCLEGTKALLLELSDLGYRASAKKAQICRREVTYLGYSLRDGQRWLTEARKKTVVQIPAPTTAKQVREFLGTAGFCRLWIPGFATLAAPLYPLTKPKGEFSWAPEHQKAFDAIKKALLSAPALALPDVTKPFTLYVDERKGVARGVLTQTLGPWRRPVAYLSKKLDPVASGWPVCLKAIAAVAILVKDADKLTLGQNITVIAPHALENIVRQPPDRWMTNARMTHYQSLLLTERVTFAPPAALNPATLLPEETDEPVTHDCHQLLIEETGVRKDLTDIPLTGEVLTWFTDGSSYVVEGKRMAGAAVVDGTRTIWASSLPEGTSAQKAELMALTQALRLAEGKSINIYTDSRYAFATAHVHGAIYKQRGWLTSAGREIKNKEEILSLLEALHLPKRLAIIHCPGHQKAKDPISRGNQMADRVAKQAAQGVNLLAGKRTADGSEFEKRTADGSEFESPKKKAKVE

SEQ ID NO: 323 - protein, 2090 aa, synthetic construct
MPAAKRVKLDGGDKKYSIGLDIGTNSVGWAVITDEYKVPSKKFKVLGNTDRHSIKKNLIGALLFDSGETAEATRLKRTARRRYTRRKNRICYLQEIFSNEMAKVDDSFFHRLEESFLVEEDKKHERHPIFGNIVDEVAYHEKYPTIYHLRKKLVDSTDKADLRLIYLALAHMIKFRGHFLIEGDLNPDNSDVDKLFIQLVQTYNQLFEENPINASGVDAKAILSARLSKSRRLENLIAQLPGEKKNGLFGNLIALSLGLTPNFKSNFDLAEDAKLQLSKDTYDDDLDNLLAQIGDQYADLFLAAKNLSDAILLSDILRVNTEITKAPLSASMIKRYDEHHQDLTLLKALVRQQLPEKYKEIFFDQSKNGYAGYIDGGASQEEFYKFIKPILEKMDGTEELLVKLNREDLLRKQRTFDNGSIPHQIHLGELHAILRRQEDFYPFLKDNREKIEKILTFRIPYYVGPLARGNSRFAWMTRKSEETITPWNFEEVVDKGASAQSFIERMTNFDKNLPNEKVLPKHSLLYEYFTVYNELTKVKYVTEGMRKPAFLSGEQKKAIVDLLFKTNRKVTVKQLKEDYFKKIECFDSVEISGVEDRFNASLGTYHDLLKIIKDKDFLDNEENEDILEDIVLTLTLFEDREMIEERLKTYAHLFDDKVMKQLKRRRYTGWGRLSRKLINGIRDKQSGKTILDFLKSDGFANRNFMQLIHDDSLTFKEDIQKAQVSGQGDSLHEHIANLAGSPAIKKGILQTVKVVDELVKVMGRHKPENIVIEMARENQTTQKGQKNSRERMKRIEEGIKELGSQILKEHPVENTQLQNEKLYLYYLQNGRDMYVDQELDINRLSDYDVDHIVPQSFLKDDSIDNKVLTRSDKARGKSDNVPSEEVVKKMKNYWRQLLNAKLITQRKFDNLTKAERGGLSELDKAGFIKRQLVETRQITKHVAQILDSRMNTKYDENDKLIREVKVITLKSKLVSDFRKDFQFYKVREINNYHHAHDAYLNAVVGTALIKKYPKLESEFVYGDYKVYDVRKMIAKSEQEIGKATAKYFFYSNIMNFFKTEITLANGEIRKRPLIETNGETGEIVWDKGRDFATVRKVLSMPQVNIVKKTEVQTGGFSKESILPKRNSDKLIARKKDWDPKKYGGFDSPTVAYSVLVVAKVEKGKSKKLKSVKELLGITIMERSSFEKNPIDFLEAKGYKEVKKDLIIKLPKYSLFELENGRKRMLASAGELQKGNELALPSKYVNFLYLASHYEKLKGSPEDNEQKQLFVEQHKHYLDEIIEQISEFSKRVILADANLDKVLSAYNKHRDKPIREQAENIIHLFTLTNLGAPAAFKYFDTTIDRKRYTSTKEVLDATLIHQSITGLYETRIDLSQLGGDGGGGSEAAAKGSSGGTLQLDDEYRLYSPLVKPDQNIQFWLEQFPQAWAETAGMGLAKQVPPQVIQLKASATPVSVRQYPLSKEAQEGIRPHVQRLIQQGILVPVQSPWNTPLLPVRKPGTNDYRPVQDLREVNKRVQDIHPTVPNPYNLLCALPPQRSWYTVLDLKDAFFCLRLHPTSQPLFAFEWRDPGTGRTGQLTWTRLPQGFKNSPTIFNEALHRDLANFRIQHPQVTLLQYVDDLLLAGATKQDCLEGTKALLLELSDLGYRASAKKAQICRREVTYLGYSLRDGQRWLTEARKKTVVQIPAPTTAKQVREFLGTAGFCRLWIPGFATLAAPLYPLTKPKGEFSWAPEHQKAFDAIKKALLSAPALALPDVTKPFTLYVDERKGVARGVLTQTLGPWRRPVAYLSKKLDPVASGWPVCLKAIAAVAILVKDADKLTLGQNITVIAPHALENIVRQPPDRWMTNARMTHYQSLLLTERVTFAPPAALNPATLLPEETDEPVTHDCHQLLIEETGVRKDLTDIPLTGEVLTWFTDGSSYVVEGKRMAGAAVVDGTRTIWASSLPEGTSAQKAELMALTQALRLAEGKSINIYTDSRYAFATAHVHGAIYKQRGWLTSAGREIKNKEEILSLLEALHLPKRLAIIHCPGHQKAKDPISRGNQMADRVAKQAAQGVNLLAGKRTADGSEFEKRTADGSEFESPKKKAKVE

SEQ ID NO: 324 - protein, 2090 aa, synthetic construct
MPAAKRVKLDGGDKKYSIGLDIGTNSVGWAVITDEYKVPSKKFKVLGNTDRHSIKKNLIGALLFDSGETAEATRLKRTARRRYTRRKNRICYLQEIFSNEMAKVDDSFFHRLEESFLVEEDKKHERHPIFGNIVDEVAYHEKYPTIYHLRKKLVDSTDKADLRLIYLALAHMIKFRGHFLIEGDLNPDNSDVDKLFIQLVQTYNQLFEENPINASGVDAKAILSARLSKSRRLENLIAQLPGEKKNGLFGNLIALSLGLTPNFKSNFDLAEDAKLQLSKDTYDDDLDNLLAQIGDQYADLFLAAKNLSDAILLSDILRVNTEITKAPLSASMIKRYDEHHQDLTLLKALVRQQLPEKYKEIFFDQSKNGYAGYIDGGASQEEFYKFIKPILEKMDGTEELLVKLNREDLLRKQRTFDNGSIPHQIHLGELHAILRRQEDFYPFLKDNREKIEKILTFRIPYYVGPLARGNSRFAWMTRKSEETITPWNFEEVVDKGASAQSFIERMTNFDKNLPNEKVLPKHSLLYEYFTVYNELTKVKYVTEGMRKPAFLSGEQKKAIVDLLFKTNRKVTVKQLKEDYFKKIECFDSVEISGVEDRFNASLGTYHDLLKIIKDKDFLDNEENEDILEDIVLTLTLFEDREMIEERLKTYAHLFDDKVMKQLKRRRYTGWGRLSRKLINGIRDKQSGKTILDFLKSDGFANRNFMQLIHDDSLTFKEDIQKAQVSGQGDSLHEHIANLAGSPAIKKGILQTVKVVDELVKVMGRHKPENIVIEMARENQTTQKGQKNSRERMKRIEEGIKELGSQILKEHPVENTQLQNEKLYLYYLQNGRDMYVDQELDINRLSDYDVDHIVPQSFLKDDSIDNKVLTRSDKARGKSDNVPSEEVVKKMKNYWRQLLNAKLITQRKFDNLTKAERGGLSELDKAGFIKRQLVETRQITKHVAQILDSRMNTKYDENDKLIREVKVITLKSKLVSDFRKDFQFYKVREINNYHHAHDAYLNAVVGTALIKKYPKLESEFVYGDYKVYDVRKMIAKSEQEIGKATAKYFFYSNIMNFFKTEITLANGEIRKRPLIETNGETGEIVWDKGRDFATVRKVLSMPQVNIVKKTEVQTGGFSKESILPKRNSDKLIARKKDWDPKKYGGFDSPTVAYSVLVVAKVEKGKSKKLKSVKELLGITIMERSSFEKNPIDFLEAKGYKEVKKDLIIKLPKYSLFELENGRKRMLASAGELQKGNELALPSKYVNFLYLASHYEKLKGSPEDNEQKQLFVEQHKHYLDEIIEQISEFSKRVILADANLDKVLSAYNKHRDKPIREQAENIIHLFTLTNLGAPAAFKYFDTTIDRKRYTSTKEVLDATLIHQSITGLYETRIDLSQLGGDGGGGGEAAAKPAPGGTLQLDDEYRLYSPLVKPDQNIQFWLEQFPQAWAETAGMGLAKQVPPQVIQLKASATPVSVRQYPLSKEAQEGIRPHVQRLIQQGILVPVQSPWNTPLLPVRKPGTNDYRPVQDLREVNKRVQDIHPTVPNPYNLLCALPPQRSWYTVLDLKDAFFCLRLHPTSQPLFAFEWRDPGTGRTGQLTWTRLPQGFKNSPTIFNEALHRDLANFRIQHPQVTLLQYVDDLLLAGATKQDCLEGTKALLLELSDLGYRASAKKAQICRREVTYLGYSLRDGQRWLTEARKKTVVQIPAPTTAKQVREFLGTAGFCRLWIPGFATLAAPLYPLTKPKGEFSWAPEHQKAFDAIKKALLSAPALALPDVTKPFTLYVDERKGVARGVLTQTLGPWRRPVAYLSKKLDPVASGWPVCLKAIAAVAILVKDADKLTLGQNITVIAPHALENIVRQPPDRWMTNARMTHYQSLLLTERVTFAPPAALNPATLLPEETDEPVTHDCHQLLIEETGVRKDLTDIPLTGEVLTWFTDGSSYVVEGKRMAGAAVVDGTRTIWASSLPEGTSAQKAELMALTQALRLAEGKSINIYTDSRYAFATAHVHGAIYKQRGWLTSAGREIKNKEEILSLLEALHLPKRLAIIHCPGHQKAKDPISRGNQMADRVAKQAAQGVNLLAGKRTADGSEFEKRTADGSEFESPKKKAKVE

SEQ ID NO: 325 - protein, 2087 aa, synthetic construct; identical to SEQ ID NO: 128

SEQ ID NO: 326 - protein, 2082 aa, synthetic construct
MPAAKRVKLDGGDKKYSIGLDIGTNSVGWAVITDEYKVPSKKFKVLGNTDRHSIKKNLIGALLFDSGETAEATRLKRTARRRYTRRKNRICYLQEIFSNEMAKVDDSFFHRLEESFLVEEDKKHERHPIFGNIVDEVAYHEKYPTIYHLRKKLVDSTDKADLRLIYLALAHMIKFRGHFLIEGDLNPDNSDVDKLFIQLVQTYNQLFEENPINASGVDAKAILSARLSKSRRLENLIAQLPGEKKNGLFGNLIALSLGLTPNFKSNFDLAEDAKLQLSKDTYDDDLDNLLAQIGDQYADLFLAAKNLSDAILLSDILRVNTEITKAPLSASMIKRYDEHHQDLTLLKALVRQQLPEKYKEIFFDQSKNGYAGYIDGGASQEEFYKFIKPILEKMDGTEELLVKLNREDLLRKQRTFDNGSIPHQIHLGELHAILRRQEDFYPFLKDNREKIEKILTFRIPYYVGPLARGNSRFAWMTRKSEETITPWNFEEVVDKGASAQSFIERMTNFDKNLPNEKVLPKHSLLYEYFTVYNELTKVKYVTEGMRKPAFLSGEQKKAIVDLLFKTNRKVTVKQLKEDYFKKIECFDSVEISGVEDRFNASLGTYHDLLKIIKDKDFLDNEENEDILEDIVLTLTLFEDREMIEERLKTYAHLFDDKVMKQLKRRRYTGWGRLSRKLINGIRDKQSGKTILDFLKSDGFANRNFMQLIHDDSLTFKEDIQKAQVSGQGDSLHEHIANLAGSPAIKKGILQTVKVVDELVKVMGRHKPENIVIEMARENQTTQKGQKNSRERMKRIEEGIKELGSQILKEHPVENTQLQNEKLYLYYLQNGRDMYVDQELDINRLSDYDVDHIVPQSFLKDDSIDNKVLTRSDKARGKSDNVPSEEVVKKMKNYWRQLLNAKLITQRKFDNLTKAERGGLSELDKAGFIKRQLVETRQITKHVAQILDSRMNTKYDENDKLIREVKVITLKSKLVSDFRKDFQFYKVREINNYHHAHDAYLNAVVGTALIKKYPKLESEFVYGDYKVYDVRKMIAKSEQEIGKATAKYFFYSNIMNFFKTEITLANGEIRKRPLIETNGETGEIVWDKGRDFATVRKVLSMPQVNIVKKTEVQTGGFSKESILPKRNSDKLIARKKDWDPKKYGGFDSPTVAYSVLVVAKVEKGKSKKLKSVKELLGITIMERSSFEKNPIDFLEAKGYKEVKKDLIIKLPKYSLFELENGRKRMLASAGELQKGNELALPSKYVNFLYLASHYEKLKGSPEDNEQKQLFVEQHKHYLDEIIEQISEFSKRVILADANLDKVLSAYNKHRDKPIREQAENIIHLFTLTNLGAPAAFKYFDTTIDRKRYTSTKEVLDATLIHQSITGLYETRIDLSQLGGDGGGGSGGTLQLDDEYRLYSPLVKPDQNIQFWLEQFPQAWAETAGMGLAKQVPPQVIQLKASATPVSVRQYPLSKEAQEGIRPHVQRLIQQGILVPVQSPWNTPLLPVRKPGTNDYRPVQDLREVNKRVQDIHPTVPNPYNLLCALPPQRSWYTVLDLKDAFFCLRLHPTSQPLFAFEWRDPGTGRTGQLTWTRLPQGFKNSPTIFNEALHRDLANFRIQHPQVTLLQYVDDLLLAGATKQDCLEGTKALLLELSDLGYRASAKKAQICRREVTYLGYSLRDGQRWLTEARKKTVVQIPAPTTAKQVREFLGTAGFCRLWIPGFATLAAPLYPLTKPKGEFSWAPEHQKAFDAIKKALLSAPALALPDVTKPFTLYVDERKGVARGVLTQTLGPWRRPVAYLSKKLDPVASGWPVCLKAIAAVAILVKDADKLTLGQNITVIAPHALENIVRQPPDRWMTNARMTHYQSLLLTERVTFAPPAALNPATLLPEETDEPVTHDCHQLLIEETGVRKDLTDIPLTGEVLTWFTDGSSYVVEGKRMAGAAVVDGTRTIWASSLPEGTSAQKAELMALTQALRLAEGKSINIYTDSRYAFATAHVHGAIYKQRGWLTSAGREIKNKEEILSLLEALHLPKRLAIIHCPGHQKAKDPISRGNQMADRVAKQAAQGVNLLAGKRTADGSEFEKRTADGSEFESPKKKAKVE

SEQ ID NO: 327 - protein, 2090 aa, synthetic construct; identical to SEQ ID NO: 132

SEQ ID NO: 328 - protein, 2095 aa, synthetic construct; identical to SEQ ID NO: 122

SEQ ID NO: 329 - protein, 2085 aa, synthetic construct; identical to SEQ ID NO: 143

SEQ ID NO: 330 - protein, 2090 aa, synthetic construct; identical to SEQ ID NO: 160

SEQ ID NO: 331 - protein, 2090 aa, synthetic construct
MPAAKRVKLDGGDKKYSIGLDIGTNSVGWAVITDEYKVPSKKFKVLGNTDRHSIKKNLIGALLFDSGETAEATRLKRTARRRYTRRKNRICYLQEIFSNEMAKVDDSFFHRLEESFLVEEDKKHERHPIFGNIVDEVAYHEKYPTIYHLRKKLVDSTDKADLRLIYLALAHMIKFRGHFLIEGDLNPDNSDVDKLFIQLVQTYNQLFEENPINASGVDAKAILSARLSKSRRLENLIAQLPGEKKNGLFGNLIALSLGLTPNFKSNFDLAEDAKLQLSKDTYDDDLDNLLAQIGDQYADLFLAAKNLSDAILLSDILRVNTEITKAPLSASMIKRYDEHHQDLTLLKALVRQQLPEKYKEIFFDQSKNGYAGYIDGGASQEEFYKFIKPILEKMDGTEELLVKLNREDLLRKQRTFDNGSIPHQIHLGELHAILRRQEDFYPFLKDNREKIEKILTFRIPYYVGPLARGNSRFAWMTRKSEETITPWNFEEVVDKGASAQSFIERMTNFDKNLPNEKVLPKHSLLYEYFTVYNELTKVKYVTEGMRKPAFLSGEQKKAIVDLLFKTNRKVTVKQLKEDYFKKIECFDSVEISGVEDRFNASLGTYHDLLKIIKDKDFLDNEENEDILEDIVLTLTLFEDREMIEERLKTYAHLFDDKVMKQLKRRRYTGWGRLSRKLINGIRDKQSGKTILDFLKSDGFANRNFMQLIHDDSLTFKEDIQKAQVSGQGDSLHEHIANLAGSPAIKKGILQTVKVVDELVKVMGRHKPENIVIEMARENQTTQKGQKNSRERMKRIEEGIKELGSQILKEHPVENTQLQNEKLYLYYLQNGRDMYVDQELDINRLSDYDVDHIVPQSFLKDDSIDNKVLTRSDKARGKSDNVPSEEVVKKMKNYWRQLLNAKLITQRKFDNLTKAERGGLSELDKAGFIKRQLVETRQITKHVAQILDSRMNTKYDENDKLIREVKVITLKSKLVSDFRKDFQFYKVREINNYHHAHDAYLNAVVGTALIKKYPKLESEFVYGDYKVYDVRKMIAKSEQEIGKATAKYFFYSNIMNFFKTEITLANGEIRKRPLIETNGETGEIVWDKGRDFATVRKVLSMPQVNIVKKTEVQTGGFSKESILPKRNSDKLIARKKDWDPKKYGGFDSPTVAYSVLVVAKVEKGKSKKLKSVKELLGITIMERSSFEKNPIDFLEAKGYKEVKKDLIIKLPKYSLFELENGRKRMLASAGELQKGNELALPSKYVNFLYLASHYEKLKGSPEDNEQKQLFVEQHKHYLDEIIEQISEFSKRVILADANLDKVLSAYNKHRDKPIREQAENIIHLFTLTNLGAPAAFKYFDTTIDRKRYTSTKEVLDATLIHQSITGLYETRIDLSQLGGDGGPAPEAAAKGGSGGTLQLDDEYRLYSPLVKPDQNIQFWLEQFPQAWAETAGMGLAKQVPPQVIQLKASATPVSVRQYPLSKEAQEGIRPHVQRLIQQGILVPVQSPWNTPLLPVRKPGTNDYRPVQDLREVNKRVQDIHPTVPNPYNLLCALPPQRSWYTVLDLKDAFFCLRLHPTSQPLFAFEWRDPGTGRTGQLTWTRLPQGFKNSPTIFNEALHRDLANFRIQHPQVTLLQYVDDLLLAGATKQDCLEGTKALLLELSDLGYRASAKKAQICRREVTYLGYSLRDGQRWLTEARKKTVVQIPAPTTAKQVREFLGTAGFCRLWIPGFATLAAPLYPLTKPKGEFSWAPEHQKAFDAIKKALLSAPALALPDVTKPFTLYVDERKGVARGVLTQTLGPWRRPVAYLSKKLDPVASGWPVCLKAIAAVAILVKDADKLTLGQNITVIAPHALENIVRQPPDRWMTNARMTHYQSLLLTERVTFAPPAALNPATLLPEETDEPVTHDCHQLLIEETGVRKDLTDIPLTGEVLTWFTDGSSYVVEGKRMAGAAVVDGTRTIWASSLPEGTSAQKAELMALTQALRLAEGKSINIYTDSRYAFATAHVHGAIYKQRGWLTSAGREIKNKEEILSLLEALHLPKRLAIIHCPGHQKAKDPISRGNQMADRVAKQAAQGVNLLAGKRTADGSEFEKRTADGSEFESPKKKAKVE

SEQ ID NO: 332 - protein, 2085 aa, synthetic construct
MPAAKRVKLDGGDKKYSIGLDIGTNSVGWAVITDEYKVPSKKFKVLGNTDRHSIKKNLIGALLFDSGETAEATRLKRTARRRYTRRKNRICYLQEIFSNEMAKVDDSFFHRLEESFLVEEDKKHERHPIFGNIVDEVAYHEKYPTIYHLRKKLVDSTDKADLRLIYLALAHMIKFRGHFLIEGDLNPDNSDVDKLFIQLVQTYNQLFEENPINASGVDAKAILSARLSKSRRLENLIAQLPGEKKNGLFGNLIALSLGLTPNFKSNFDLAEDAKLQLSKDTYDDDLDNLLAQIGDQYADLFLAAKNLSDAILLSDILRVNTEITKAPLSASMIKRYDEHHQDLTLLKALVRQQLPEKYKEIFFDQSKNGYAGYIDGGASQEEFYKFIKPILEKMDGTEELLVKLNREDLLRKQRTFDNGSIPHQIHLGELHAILRRQEDFYPFLKDNREKIEKILTFRIPYYVGPLARGNSRFAWMTRKSEETITPWNFEEVVDKGASAQSFIERMTNFDKNLPNEKVLPKHSLLYEYFTVYNELTKVKYVTEGMRKPAFLSGEQKKAIVDLLFKTNRKVTVKQLKEDYFKKIECFDSVEISGVEDRFNASLGTYHDLLKIIKDKDFLDNEENEDILEDIVLTLTLFEDREMIEERLKTYAHLFDDKVMKQLKRRRYTGWGRLSRKLINGIRDKQSGKTILDFLKSDGFANRNFMQLIHDDSLTFKEDIQKAQVSGQGDSLHEHIANLAGSPAIKKGILQTVKVVDELVKVMGRHKPENIVIEMARENQTTQKGQKNSRERMKRIEEGIKELGSQILKEHPVENTQLQNEKLYLYYLQNGRDMYVDQELDINRLSDYDVDHIVPQSFLKDDSIDNKVLTRSDKARGKSDNVPSEEVVKKMKNYWRQLLNAKLITQRKFDNLTKAERGGLSELDKAGFIKRQLVETRQITKHVAQILDSRMNTKYDENDKLIREVKVITLKSKLVSDFRKDFQFYKVREINNYHHAHDAYLNAVVGTALIKKYPKLESEFVYGDYKVYDVRKMIAKSEQEIGKATAKYFFYSNIMNFFKTEITLANGEIRKRPLIETNGETGEIVWDKGRDFATVRKVLSMPQVNIVKKTEVQTGGFSKESILPKRNSDKLIARKKDWDPKKYGGFDSPTVAYSVLVVAKVEKGKSKKLKSVKELLGITIMERSSFEKNPIDFLEAKGYKEVKKDLIIKLPKYSLFELENGRKRMLASAGELQKGNELALPSKYVNFLYLASHYEKLKGSPEDNEQKQLFVEQHKHYLDEIIEQISEFSKRVILADANLDKVLSAYNKHRDKPIREQAENIIHLFTLTNLGAPAAFKYFDTTIDRKRYTSTKEVLDATLIHQSITGLYETRIDLSQLGGDGGPAPGGGGGTLQLDDEYRLYSPLVKPDQNIQFWLEQFPQAWAETAGMGLAKQVPPQVIQLKASATPVSVRQYPLSKEAQEGIRPHVQRLIQQGILVPVQSPWNTPLLPVRKPGTNDYRPVQDLREVNKRVQDIHPTVPNPYNLLCALPPQRSWYTVLDLKDAFFCLRLHPTSQPLFAFEWRDPGTGRTGQLTWTRLPQGFKNSPTIFNEALHRDLANFRIQHPQVTLLQYVDDLLLAGATKQDCLEGTKALLLELSDLGYRASAKKAQICRREVTYLGYSLRDGQRWLTEARKKTVVQIPAPTTAKQVREFLGTAGFCRLWIPGFATLAAPLYPLTKPKGEFSWAPEHQKAFDAIKKALLSAPALALPDVTKPFTLYVDERKGVARGVLTQTLGPWRRPVAYLSKKLDPVASGWPVCLKAIAAVAILVKDADKLTLGQNITVIAPHALENIVRQPPDRWMTNARMTHYQSLLLTERVTFAPPAALNPATLLPEETDEPVTHDCHQLLIEETGVRKDLTDIPLTGEVLTWFTDGSSYVVEGKRMAGAAVVDGTRTIWASSLPEGTSAQKAELMALTQALRLAEGKSINIYTDSRYAFATAHVHGAIYKQRGWLTSAGREIKNKEEILSLLEALHLPKRLAIIHCPGHQKAKDPISRGNQMADRVAKQAAQGVNLLAGKRTADGSEFEKRTADGSEFESPKKKAKVE

SEQ ID NO: 333 - protein, 2083 aa, synthetic construct; identical to SEQ ID NO: 149

SEQ ID NO: 334 - protein, 2090 aa, synthetic construct; identical to SEQ ID NO: 146

SEQ ID NO: 335 - protein, 2087 aa, synthetic construct; identical to SEQ ID NO: 158

SEQ ID NO: 336 - protein, 2088 aa, synthetic construct
MPAAKRVKLDGGDKKYSIGLDIGTNSVGWAVITDEYKVPSKKFKVLGNTDRHSIKKNLIGALLFDSGETAEATRLKRTARRRYTRRKNRICYLQEIFSNEMAKVDDSFFHRLEESFLVEEDKKHERHPIFGNIVDEVAYHEKYPTIYHLRKKLVDSTDKADLRLIYLALAHMIKFRGHFLIEGDLNPDNSDVDKLFIQLVQTYNQLFEENPINASGVDAKAILSARLSKSRRLENLIAQLPGEKKNGLFGNLIALSLGLTPNFKSNFDLAEDAKLQLSKDTYDDDLDNLLAQIGDQYADLFLAAKNLSDAILLSDILRVNTEITKAPLSASMIKRYDEHHQDLTLLKALVRQQLPEKYKEIFFDQSKNGYAGYIDGGASQEEFYKFIKPILEKMDGTEELLVKLNREDLLRKQRTFDNGSIPHQIHLGELHAILRRQEDFYPFLKDNREKIEKILTFRIPYYVGPLARGNSRFAWMTRKSEETITPWNFEEVVDKGASAQSFIERMTNFDKNLPNEKVLPKHSLLYEYFTVYNELTKVKYVTEGMRKPAFLSGEQKKAIVDLLFKTNRKVTVKQLKEDYFKKIECFDSVEISGVEDRFNASLGTYHDLLKIIKDKDFLDNEENEDILEDIVLTLTLFEDREMIEERLKTYAHLFDDKVMKQLKRRRYTGWGRLSRKLINGIRDKQSGKTILDFLKSDGFANRNFMQLIHDDSLTFKEDIQKAQVSGQGDSLHEHIANLAGSPAIKKGILQTVKVVDELVKVMGRHKPENIVIEMARENQTTQKGQKNSRERMKRIEEGIKELGSQILKEHPVENTQLQNEKLYLYYLQNGRDMYVDQELDINRLSDYDVDHIVPQSFLKDDSIDNKVLTRSDKARGKSDNVPSEEVVKKMKNYWRQLLNAKLITQRKFDNLTKAERGGLSELDKAGFIKRQLVETRQITKHVAQILDSRMNTKYDENDKLIREVKVITLKSKLVSDFRKDFQFYKVREINNYHHAHDAYLNAVVGTALIKKYPKLESEFVYGDYKVYDVRKMIAKSEQEIGKATAKYFFYSNIMNFFKTEITLANGEIRKRPLIETNGETGEIVWDKGRDFATVRKVLSMPQVNIVKKTEVQTGGFSKESILPKRNSDKLIARKKDWDPKKYGGFDSPTVAYSVLVVAKVEKGKSKKLKSVKELLGITIMERSSFEKNPIDFLEAKGYKEVKKDLIIKLPKYSLFELENGRKRMLASAGELQKGNELALPSKYVNFLYLASHYEKLKGSPEDNEQKQLFVEQHKHYLDEIIEQISEFSKRVILADANLDKVLSAYNKHRDKPIREQAENIIHLFTLTNLGAPAAFKYFDTTIDRKRYTSTKEVLDATLIHQSITGLYETRIDLSQLGGDGGGGSGGGGSSGGTLQLDDEYRLYSPLVKPDQNIQFWLEQFPQAWAETAGMGLAKQVPPQVIQLKASATPVSVRQYPLSKEAQEGIRPHVQRLIQQGILVPVQSPWNTPLLPVRKPGTNDYRPVQDLREVNKRVQDIHPTVPNPYNLLCALPPQRSWYTVLDLKDAFFCLRLHPTSQPLFAFEWRDPGTGRTGQLTWTRLPQGFKNSPTIFNEALHRDLANFRIQHPQVTLLQYVDDLLLAGATKQDCLEGTKALLLELSDLGYRASAKKAQICRREVTYLGYSLRDGQRWLTEARKKTVVQIPAPTTAKQVREFLGTAGFCRLWIPGFATLAAPLYPLTKPKGEFSWAPEHQKAFDAIKKALLSAPALALPDVTKPFTLYVDERKGVARGVLTQTLGPWRRPVAYLSKKLDPVASGWPVCLKAIAAVAILVKDADKLTLGQNITVIAPHALENIVRQPPDRWMTNARMTHYQSLLLTERVTFAPPAALNPATLLPEETDEPVTHDCHQLLIEETGVRKDLTDIPLTGEVLTWFTDGSSYVVEGKRMAGAAVVDGTRTIWASSLPEGTSAQKAELMALTQALRLAEGKSINIYTDSRYAFATAHVHGAIYKQRGWLTSAGREIKNKEEILSLLEALHLPKRLAIIHCPGHQKAKDPISRGNQMADRVAKQAAQGVNLLAGKRTADGSEFEKRTADGSEFESPKKKAKVE

SEQ ID NO: 337 - protein, 2104 aa, synthetic construct; identical to SEQ ID NO: 150

SEQ ID NO: 338 - protein, 2088 aa, synthetic construct; identical to SEQ ID NO: 169

SEQ ID NO: 339 - protein, 2088 aa, synthetic construct; identical to SEQ ID NO: 162

SEQ ID NO: 340 - protein, 2088 aa, synthetic construct; identical to SEQ ID NO: 173

SEQ ID NO: 341 - protein, 2090 aa, synthetic construct; identical to SEQ ID NO: 141

SEQ ID NO: 342 - protein, 2094 aa, synthetic construct
MPAAKRVKLDGGDKKYSIGLDIGTNSVGWAVITDEYKVPSKKFKVLGNTDRHSIKKNLIGALLFDSGETAEATRLKRTARRRYTRRKNRICYLQEIFSNEMAKVDDSFFHRLEESFLVEEDKKHERHPIFGNIVDEVAYHEKYPTIYHLRKKLVDSTDKADLRLIYLALAHMIKFRGHFLIEGDLNPDNSDVDKLFIQLVQTYNQLFEENPINASGVDAKAILSARLSKSRRLENLIAQLPGEKKNGLFGNLIALSLGLTPNFKSNFDLAEDAKLQLSKDTYDDDLDNLLAQIGDQYADLFLAAKNLSDAILLSDILRVNTEITKAPLSASMIKRYDEHHQDLTLLKALVRQQLPEKYKEIFFDQSKNGYAGYIDGGASQEEFYKFIKPILEKMDGTEELLVKLNREDLLRKQRTFDNGSIPHQIHLGELHAILRRQEDFYPFLKDNREKIEKILTFRIPYYVGPLARGNSRFAWMTRKSEETITPWNFEEVVDKGASAQSFIERMTNFDKNLPNEKVLPKHSLLYEYFTVYNELTKVKYVTEGMRKPAFLSGEQKKAIVDLLFKTNRKVTVKQLKEDYFKKIECFDSVEISGVEDRFNASLGTYHDLLKIIKDKDFLDNEENEDILEDIVLTLTLFEDREMIEERLKTYAHLFDDKVMKQLKRRRYTGWGRLSRKLINGIRDKQSGKTILDFLKSDGFANRNFMQLIHDDSLTFKEDIQKAQVSGQGDSLHEHIANLAGSPAIKKGILQTVKVVDELVKVMGRHKPENIVIEMARENQTTQKGQKNSRERMKRIEEGIKELGSQILKEHPVENTQLQNEKLYLYYLQNGRDMYVDQELDINRLSDYDVDHIVPQSFLKDDSIDNKVLTRSDKARGKSDNVPSEEVVKKMKNYWRQLLNAKLITQRKFDNLTKAERGGLSELDKAGFIKRQLVETRQITKHVAQILDSRMNTKYDENDKLIREVKVITLKSKLVSDFRKDFQFYKVREINNYHHAHDAYLNAVVGTALIKKYPKLESEFVYGDYKVYDVRKMIAKSEQEIGKATAKYFFYSNIMNFFKTEITLANGEIRKRPLIETNGETGEIVWDKGRDFATVRKVLSMPQVNIVKKTEVQTGGFSKESILPKRNSDKLIARKKDWDPKKYGGFDSPTVAYSVLVVAKVEKGKSKKLKSVKELLGITIMERSSFEKNPIDFLEAKGYKEVKKDLIIKLPKYSLFELENGRKRMLASAGELQKGNELALPSKYVNFLYLASHYEKLKGSPEDNEQKQLFVEQHKHYLDEIIEQISEFSKRVILADANLDKVLSAYNKHRDKPIREQAENIIHLFTLTNLGAPAAFKYFDTTIDRKRYTSTKEVLDATLIHQSITGLYETRIDLSQLGGDGGEAAAKGGGGSEAAAKGGTLQLDDEYRLYSPLVKPDQNIQFWLEQFPQAWAETAGMGLAKQVPPQVIQLKASATPVSVRQYPLSKEAQEGIRPHVQRLIQQGILVPVQSPWNTPLLPVRKPGTNDYRPVQDLREVNKRVQDIHPTVPNPYNLLCALPPQRSWYTVLDLKDAFFCLRLHPTSQPLFAFEWRDPGTGRTGQLTWTRLPQGFKNSPTIFNEALHRDLANFRIQHPQVTLLQYVDDLLLAGATKQDCLEGTKALLLELSDLGYRASAKKAQICRREVTYLGYSLRDGQRWLTEARKKTVVQIPAPTTAKQVREFLGTAGFCRLWIPGFATLAAPLYPLTKPKGEFSWAPEHQKAFDAIKKALLSAPALALPDVTKPFTLYVDERKGVARGVLTQTLGPWRRPVAYLSKKLDPVASGWPVCLKAIAAVAILVKDADKLTLGQNITVIAPHALENIVRQPPDRWMTNARMTHYQSLLLTERVTFAPPAALNPATLLPEETDEPVTHDCHQLLIEETGVRKDLTDIPLTGEVLTWFTDGSSYVVEGKRMAGAAVVDGTRTIWASSLPEGTSAQKAELMALTQALRLAEGKSINIYTDSRYAFATAHVHGAIYKQRGWLTSAGREIKNKEEILSLLEALHLPKRLAIIHCPGHQKAKDPISRGNQMADRVAKQAAQGVNLLAGKRTADGSEFEKRTADGSEFESPKKKAKVE

SEQ ID NO: 343 - protein, 2087 aa, synthetic construct
MPAAKRVKLDGGDKKYSIGLDIGTNSVGWAVITDEYKVPSKKFKVLGNTDRHSIKKNLIGALLFDSGETAEATRLKRTARRRYTRRKNRICYLQEIFSNEMAKVDDSFFHRLEESFLVEEDKKHERHPIFGNIVDEVAYHEKYPTIYHLRKKLVDSTDKADLRLIYLALAHMIKFRGHFLIEGDLNPDNSDVDKLFIQLVQTYNQLFEENPINASGVDAKAILSARLSKSRRLENLIAQLPGEKKNGLFGNLIALSLGLTPNFKSNFDLAEDAKLQLSKDTYDDDLDNLLAQIGDQYADLFLAAKNLSDAILLSDILRVNTEITKAPLSASMIKRYDEHHQDLTLLKALVRQQLPEKYKEIFFDQSKNGYAGYIDGGASQEEFYKFIKPILEKMDGTEELLVKLNREDLLRKQRTFDNGSIPHQIHLGELHAILRRQEDFYPFLKDNREKIEKILTFRIPYYVGPLARGNSRFAWMTRKSEETITPWNFEEVVDKGASAQSFIERMTNFDKNLPNEKVLPKHSLLYEYFTVYNELTKVKYVTEGMRKPAFLSGEQKKAIVDLLFKTNRKVTVKQLKEDYFKKIECFDSVEISGVEDRFNASLGTYHDLLKIIKDKDFLDNEENEDILEDIVLTLTLFEDREMIEERLKTYAHLFDDKVMKQLKRRRYTGWGRLSRKLINGIRDKQSGKTILDFLKSDGFANRNFMQLIHDDSLTFKEDIQKAQVSGQGDSLHEHIANLAGSPAIKKGILQTVKVVDELVKVMGRHKPENIVIEMARENQTTQKGQKNSRERMKRIEEGIKELGSQILKEHPVENTQLQNEKLYLYYLQNGRDMYVDQELDINRLSDYDVDHIVPQSFLKDDSIDNKVLTRSDKARGKSDNVPSEEVVKKMKNYWRQLLNAKLITQRKFDNLTKAERGGLSELDKAGFIKRQLVETRQITKHVAQILDSRMNTKYDENDKLIREVKVITLKSKLVSDFRKDFQFYKVREINNYHHAHDAYLNAVVGTALIKKYPKLESEFVYGDYKVYDVRKMIAKSEQEIGKATAKYFFYSNIMNFFKTEITLANGEIRKRPLIETNGETGEIVWDKGRDFATVRKVLSMPQVNIVKKTEVQTGGFSKESILPKRNSDKLIARKKDWDPKKYGGFDSPTVAYSVLVVAKVEKGKSKKLKSVKELLGITIMERSSFEKNPIDFLEAKGYKEVKKDLIIKLPKYSLFELENGRKRMLASAGELQKGNELALPSKYVNFLYLASHYEKLKGSPEDNEQKQLFVEQHKHYLDEIIEQISEFSKRVILADANLDKVLSAYNKHRDKPIREQAENIIHLFTLTNLGAPAAFKYFDTTIDRKRYTSTKEVLDATLIHQSITGLYETRIDLSQLGGDGGEAAAKPAPGGTLQLDDEYRLYSPLVKPDQNIQFWLEQFPQAWAETAGMGLAKQVPPQVIQLKASATPVSVRQYPLSKEAQEGIRPHVQRLIQQGILVPVQSPWNTPLLPVRKPGTNDYRPVQDLREVNKRVQDIHPTVPNPYNLLCALPPQRSWYTVLDLKDAFFCLRLHPTSQPLFAFEWRDPGTGRTGQLTWTRLPQGFKNSPTIFNEALHRDLANFRIQHPQVTLLQYVDDLLLAGATKQDCLEGTKALLLELSDLGYRASAKKAQICRREVTYLGYSLRDGQRWLTEARKKTVVQIPAPTTAKQVREFLGTAGFCRLWIPGFATLAAPLYPLTKPKGEFSWAPEHQKAFDAIKKALLSAPALALPDVTKPFTLYVDERKGVARGVLTQTLGPWRRPVAYLSKKLDPVASGWPVCLKAIAAVAILVKDADKLTLGQNITVIAPHALENIVRQPPDRWMTNARMTHYQSLLLTERVTFAPPAALNPATLLPEETDEPVTHDCHQLLIEETGVRKDLTDIPLTGEVLTWFTDGSSYVVEGKRMAGAAVVDGTRTIWASSLPEGTSAQKAELMALTQALRLAEGKSINIYTDSRYAFATAHVHGAIYKQRGWLTSAGREIKNKEEILSLLEALHLPKRLAIIHCPGHQKAKDPISRGNQMADRVAKQAAQGVNLLAGKRTADGSEFEKRTADGSEFESPKKKAKVE

SEQ ID NO: 344 - protein, 2088 aa, synthetic construct; identical to SEQ ID NO: 131

SEQ ID NO: 345 - protein, 2085 aa, synthetic construct
MPAAKRVKLDGGDKKYSIGLDIGTNSVGWAVITDEYKVPSKKFKVLGNTDRHSIKKNLIGALLFDSGETAEATRLKRTARRRYTRRKNRICYLQEIFSNEMAKVDDSFFHRLEESFLVEEDKKHERHPIFGNIVDEVAYHEKYPTIYHLRKKLVDSTDKADLRLIYLALAHMIKFRGHFLIEGDLNPDNSDVDKLFIQLVQTYNQLFEENPINASGVDAKAILSARLSKSRRLENLIAQLPGEKKNGLFGNLIALSLGLTPNFKSNFDLAEDAKLQLSKDTYDDDLDNLLAQIGDQYADLFLAAKNLSDAILLSDILRVNTEITKAPLSASMIKRYDEHHQDLTLLKALVRQQLPEKYKEIFFDQSKNGYAGYIDGGASQEEFYKFIKPILEKMDGTEELLVKLNREDLLRKQRTFDNGSIPHQIHLGELHAILRRQEDFYPFLKDNREKIEKILTFRIPYYVGPLARGNSRFAWMTRKSEETITPWNFEEVVDKGASAQSFIERMTNFDKNLPNEKVLPKHSLLYEYFTVYNELTKVKYVTEGMRKPAFLSGEQKKAIVDLLFKTNRKVTVKQLKEDYFKKIECFDSVEISGVEDRFNASLGTYHDLLKIIKDKDFLDNEENEDILEDIVLTLTLFEDREMIEERLKTYAHLFDDKVMKQLKRRRYTGWGRLSRKLINGIRDKQSGKTILDFLKSDGFANRNFMQLIHDDSLTFKEDIQKAQVSGQGDSLHEHIANLAGSPAIKKGILQTVKVVDELVKVMGRHKPENIVIEMARENQTTQKGQKNSRERMKRIEEGIKELGSQILKEHPVENTQLQNEKLYLYYLQNGRDMYVDQELDINRLSDYDVDHIVPQSFLKDDSIDNKVLTRSDKARGKSDNVPSEEVVKKMKNYWRQLLNAKLITQRKFDNLTKAERGGLSELDKAGFIKRQLVETRQITKHVAQILDSRMNTKYDENDKLIREVKVITLKSKLVSDFRKDFQFYKVREINNYHHAHDAYLNAVVGTALIKKYPKLESEFVYGDYKVYDVRKMIAKSEQEIGKATAKYFFYSNIMNFFKTEITLANGEIRKRPLIETNGETGEIVWDKGRDFATVRKVLSMPQVNIVKKTEVQTGGFSKESILPKRNSDKLIARKKDWDPKKYGGFDSPTVAYSVLVVAKVEKGKSKKLKSVKELLGITIMERSSFEKNPIDFLEAKGYKEVKKDLIIKLPKYSLFELENGRKRMLASAGELQKGNELALPSKYVNFLYLASHYEKLKGSPEDNEQKQLFVEQHKHYLDEIIEQISEFSKRVILADANLDKVLSAYNKHRDKPIREQAENIIHLFTLTNLGAPAAFKYFDTTIDRKRYTSTKEVLDATLIHQSITGLYETRIDLSQLGGDGGGGSPAPGGTLQLDDEYRLYSPLVKPDQNIQFWLEQFPQAWAETAGMGLAKQVPPQVIQLKASATPVSVRQYPLSKEAQEGIRPHVQRLIQQGILVPVQSPWNTPLLPVRKPGTNDYRPVQDLREVNKRVQDIHPTVPNPYNLLCALPPQRSWYTVLDLKDAFFCLRLHPTSQPLFAFEWRDPGTGRTGQLTWTRLPQGFKNSPTIFNEALHRDLANFRIQHPQVTLLQYVDDLLLAGATKQDCLEGTKALLLELSDLGYRASAKKAQICRREVTYLGYSLRDGQRWLTEARKKTVVQIPAPTTAKQVREFLGTAGFCRLWIPGFATLAAPLYPLTKPKGEFSWAPEHQKAFDAIKKALLSAPALALPDVTKPFTLYVDERKGVARGVLTQTLGPWRRPVAYLSKKLDPVASGWPVCLKAIAAVAILVKDADKLTLGQNITVIAPHALENIVRQPPDRWMTNARMTHYQSLLLTERVTFAPPAALNPATLLPEETDEPVTHDCHQLLIEETGVRKDLTDIPLTGEVLTWFTDGSSYVVEGKRMAGAAVVDGTRTIWASSLPEGTSAQKAELMALTQALRLAEGKSINIYTDSRYAFATAHVHGAIYKQRGWLTSAGREIKNKEEILSLLEALHLPKRLAIIHCPGHQKAKDPISRGNQMADRVAKQAAQGVNLLAGKRTADGSEFEKRTADGSEFESPKKKAKVE

SEQ ID NO: 346 - protein, 2090 aa, synthetic construct
MPAAKRVKLDGGDKKYSIGLDIGTNSVGWAVITDEYKVPSKKFKVLGNTDRHSIKKNLIGALLFDSGETAEATRLKRTARRRYTRRKNRICYLQEIFSNEMAKVDDSFFHRLEESFLVEEDKKHERHPIFGNIVDEVAYHEKYPTIYHLRKKLVDSTDKADLRLIYLALAHMIKFRGHFLIEGDLNPDNSDVDKLFIQLVQTYNQLFEENPINASGVDAKAILSARLSKSRRLENLIAQLPGEKKNGLFGNLIALSLGLTPNFKSNFDLAEDAKLQLSKDTYDDDLDNLLAQIGDQYADLFLAAKNLSDAILLSDILRVNTEITKAPLSASMIKRYDEHHQDLTLLKALVRQQLPEKYKEIFFDQSKNGYAGYIDGGASQEEFYKFIKPILEKMDGTEELLVKLNREDLLRKQRTFDNGSIPHQIHLGELHAILRRQEDFYPFLKDNREKIEKILTFRIPYYVGPLARGNSRFAWMTRKSEETITPWNFEEVVDKGASAQSFIERMTNFDKNLPNEKVLPKHSLLYEYFTVYNELTKVKYVTEGMRKPAFLSGEQKKAIVDLLFKTNRKVTVKQLKEDYFKKIECFDSVEISGVEDRFNASLGTYHDLLKIIKDKDFLDNEENEDILEDIVLTLTLFEDREMIEERLKTYAHLFDDKVMKQLKRRRYTGWGRLSRKLINGIRDKQSGKTILDFLKSDGFANRNFMQLIHDDSLTFKEDIQKAQVSGQGDSLHEHIANLAGSPAIKKGILQTVKVVDELVKVMGRHKPENIVIEMARENQTTQKGQKNSRERMKRIEEGIKELGSQILKEHPVENTQLQNEKLYLYYLQNGRDMYVDQELDINRLSDYDVDHIVPQSFLKDDSIDNKVLTRSDKARGKSDNVPSEEVVKKMKNYWRQLLNAKLITQRKFDNLTKAERGGLSELDKAGFIKRQLVETRQITKHVAQILDSRMNTKYDENDKLIREVKVITLKSKLVSDFRKDFQFYKVREINNYHHAHDAYLNAVVGTALIKKYPKLESEFVYGDYKVYDVRKMIAKSEQEIGKATAKYFFYSNIMNFFKTEITLANGEIRKRPLIETNGETGEIVWDKGRDFATVRKVLSMPQVNIVKKTEVQTGGFSKESILPKRNSDKLIARKKDWDPKKYGGFDSPTVAYSVLVVAKVEKGKSKKLKSVKELLGITIMERSSFEKNPIDFLEAKGYKEVKKDLIIKLPKYSLFELENGRKRMLASAGELQKGNELALPSKYVNFLYLASHYEKLKGSPEDNEQKQLFVEQHKHYLDEIIEQISEFSKRVILADANLDKVLSAYNKHRDKPIREQAENIIHLFTLTNLGAPAAFKYFDTTIDRKRYTSTKEVLDATLIHQSITGLYETRIDLSQLGGDGGGGGPAPEAAAKGGTLQLDDEYRLYSPLVKPDQNIQFWLEQFPQAWAETAGMGLAKQVPPQVIQLKASATPVSVRQYPLSKEAQEGIRPHVQRLIQQGILVPVQSPWNTPLLPVRKPGTNDYRPVQDLREVNKRVQDIHPTVPNPYNLLCALPPQRSWYTVLDLKDAFFCLRLHPTSQPLFAFEWRDPGTGRTGQLTWTRLPQGFKNSPTIFNEALHRDLANFRIQHPQVTLLQYVDDLLLAGATKQDCLEGTKALLLELSDLGYRASAKKAQICRREVTYLGYSLRDGQRWLTEARKKTVVQIPAPTTAKQVREFLGTAGFCRLWIPGFATLAAPLYPLTKPKGEFSWAPEHQKAFDAIKKALLSAPALALPDVTKPFTLYVDERKGVARGVLTQTLGPWRRPVAYLSKKLDPVASGWPVCLKAIAAVAILVKDADKLTLGQNITVIAPHALENIVRQPPDRWMTNARMTHYQSLLLTERVTFAPPAALNPATLLPEETDEPVTHDCHQLLIEETGVRKDLTDIPLTGEVLTWFTDGSSYVVEGKRMAGAAVVDGTRTIWASSLPEGTSAQKAELMALTQALRLAEGKSINIYTDSRYAFATAHVHGAIYKQRGWLTSAGREIKNKEEILSLLEALHLPKRLAIIHCPGHQKAKDPISRGNQMADRVAKQAAQGVNLLAGKRTADGSEFEKRTADGSEFESPKKKAKVE

SEQ ID NO: 347 - protein, 2082 aa, synthetic construct; identical to SEQ ID NO: 177

SEQ ID NO: 348 - protein, 2090 aa, synthetic construct
MPAAKRVKLDGGDKKYSIGLDIGTNSVGWAVITDEYKVPSKKFKVLGNTDRHSIKKNLIGALLFDSGETAEATRLKRTARRRYTRRKNRICYLQEIFSNEMAKVDDSFFHRLEESFLVEEDKKHERHPIFGNIVDEVAYHEKYPTIYHLRKKLVDSTDKADLRLIYLALAHMIKFRGHFLIEGDLNPDNSDVDKLFIQLVQTYNQLFEENPINASGVDAKAILSARLSKSRRLENLIAQLPGEKKNGLFGNLIALSLGLTPNFKSNFDLAEDAKLQLSKDTYDDDLDNLLAQIGDQYADLFLAAKNLSDAILLSDILRVNTEITKAPLSASMIKRYDEHHQDLTLLKALVRQQLPEKYKEIFFDQSKNGYAGYIDGGASQEEFYKFIKPILEKMDGTEELLVKLNREDLLRKQRTFDNGSIPHQIHLGELHAILRRQEDFYPFLKDNREKIEKILTFRIPYYVGPLARGNSRFAWMTRKSEETITPWNFEEVVDKGASAQSFIERMTNFDKNLPNEKVLPKHSLLYEYFTVYNELTKVKYVTEGMRKPAFLSGEQKKAIVDLLFKTNRKVTVKQLKEDYFKKIECFDSVEISGVEDRFNASLGTYHDLLKIIKDKDFLDNEENEDILEDIVLTLTLFEDREMIEERLKTYAHLFDDKVMKQLKRRRYTGWGRLSRKLINGIRDKQSGKTILDFLKSDGFANRNFMQLIHDDSLTFKEDIQKAQVSGQGDSLHEHIANLAGSPAIKKGILQTVKVVDELVKVMGRHKPENIVIEMARENQTTQKGQKNSRERMKRIEEGIKELGSQILKEHPVENTQLQNEKLYLYYLQNGRDMYVDQELDINRLSDYDVDHIVPQSFLKDDSIDNKVLTRSDKARGKSDNVPSEEVVKKMKNYWRQLLNAKLITQRKFDNLTKAERGGLSELDKAGFIKRQLVETRQITKHVAQILDSRMNTKYDENDKLIREVKVITLKSKLVSDFRKDFQFYKVREINNYHHAHDAYLNAVVGTALIKKYPKLESEFVYGDYKVYDVRKMIAKSEQEIGKATAKYFFYSNIMNFFKTEITLANGEIRKRPLIETNGETGEIVWDKGRDFATVRKVLSMPQVNIVKKTEVQTGGFSKESILPKRNSDKLIARKKDWDPKKYGGFDSPTVAYSVLVVAKVEKGKSKKLKSVKELLGITIMERSSFEKNPIDFLEAKGYKEVKKDLIIKLPKYSLFELENGRKRMLASAGELQKGNELALPSKYVNFLYLASHYEKLKGSPEDNEQKQLFVEQHKHYLDEIIEQISEFSKRVILADANLDKVLSAYNKHRDKPIREQAENIIHLFTLTNLGAPAAFKYFDTTIDRKRYTSTKEVLDATLIHQSITGLYETRIDLSQLGGDGGEAAAKGGGPAPGGTLQLDDEYRLYSPLVKPDQNIQFWLEQFPQAWAETAGMGLAKQVPPQVIQLKASATPVSVRQYPLSKEAQEGIRPHVQRLIQQGILVPVQSPWNTPLLPVRKPGTNDYRPVQDLREVNKRVQDIHPTVPNPYNLLCALPPQRSWYTVLDLKDAFFCLRLHPTSQPLFAFEWRDPGTGRTGQLTWTRLPQGFKNSPTIFNEALHRDLANFRIQHPQVTLLQYVDDLLLAGATKQDCLEGTKALLLELSDLGYRASAKKAQICRREVTYLGYSLRDGQRWLTEARKKTVVQIPAPTTAKQVREFLGTAGFCRLWIPGFATLAAPLYPLTKPKGEFSWAPEHQKAFDAIKKALLSAPALALPDVTKPFTLYVDERKGVARGVLTQTLGPWRRPVAYLSKKLDPVASGWPVCLKAIAAVAILVKDADKLTLGQNITVIAPHALENIVRQPPDRWMTNARMTHYQSLLLTERVTFAPPAALNPATLLPEETDEPVTHDCHQLLIEETGVRKDLTDIPLTGEVLTWFTDGSSYVVEGKRMAGAAVVDGTRTIWASSLPEGTSAQKAELMALTQALRLAEGKSINIYTDSRYAFATAHVHGAIYKQRGWLTSAGREIKNKEEILSLLEALHLPKRLAIIHCPGHQKAKDPISRGNQMADRVAKQAAQGVNLLAGKRTADGSEFEKRTADGSEFESPKKKAKVE

SEQ ID NO: 349 - protein, 2090 aa, synthetic construct; identical to SEQ ID NO: 136

SEQ ID NO: 350 - protein, 2090 aa, synthetic construct; identical to SEQ ID NO: 115

SEQ ID NO: 351 - protein, 2099 aa, synthetic construct; identical to SEQ ID NO: 137

SEQ ID NO: 352 - protein, 2090 aa, synthetic construct
MPAAKRVKLDGGDKKYSIGLDIGTNSVGWAVITDEYKVPSKKFKVLGNTDRHSIKKNLIGALLFDSGETAEATRLKRTARRRYTRRKNRICYLQEIFSNEMAKVDDSFFHRLEESFLVEEDKKHERHPIFGNIVDEVAYHEKYPTIYHLRKKLVDSTDKADLRLIYLALAHMIKFRGHFLIEGDLNPDNSDVDKLFIQLVQTYNQLFEENPINASGVDAKAILSARLSKSRRLENLIAQLPGEKKNGLFGNLIALSLGLTPNFKSNFDLAEDAKLQLSKDTYDDDLDNLLAQIGDQYADLFLAAKNLSDAILLSDILRVNTEITKAPLSASMIKRYDEHHQDLTLLKALVRQQLPEKYKEIFFDQSKNGYAGYIDGGASQEEFYKFIKPILEKMDGTEELLVKLNREDLLRKQRTFDNGSIPHQIHLGELHAILRRQEDFYPFLKDNREKIEKILTFRIPYYVGPLARGNSRFAWMTRKSEETITPWNFEEVVDKGASAQSFIERMTNFDKNLPNEKVLPKHSLLYEYFTVYNELTKVKYVTEGMRKPAFLSGEQKKAIVDLLFKTNRKVTVKQLKEDYFKKIECFDSVEISGVEDRFNASLGTYHDLLKIIKDKDFLDNEENEDILEDIVLTLTLFEDREMIEERLKTYAHLFDDKVMKQLKRRRYTGWGRLSRKLINGIRDKQSGKTILDFLKSDGFANRNFMQLIHDDSLTFKEDIQKAQVSGQGDSLHEHIANLAGSPAIKKGILQTVKVVDELVKVMGRHKPENIVIEMARENQTTQKGQKNSRERMKRIEEGIKELGSQILKEHPVENTQLQNEKLYLYYLQNGRDMYVDQELDINRLSDYDVDHIVPQSFLKDDSIDNKVLTRSDKARGKSDNVPSEEVVKKMKNYWRQLLNAKLITQRKFDNLTKAERGGLSELDKAGFIKRQLVETRQITKHVAQILDSRMNTKYDENDKLIREVKVITLKSKLVSDFRKDFQFYKVREINNYHHAHDAYLNAVVGTALIKKYPKLESEFVYGDYKVYDVRKMIAKSEQEIGKATAKYFFYSNIMNFFKTEITLANGEIRKRPLIETNGETGEIVWDKGRDFATVRKVLSMPQVNIVKKTEVQTGGFSKESILPKRNSDKLIARKKDWDPKKYGGFDSPTVAYSVLVVAKVEKGKSKKLKSVKELLGITIMERSSFEKNPIDFLEAKGYKEVKKDLIIKLPKYSLFELENGRKRMLASAGELQKGNELALPSKYVNFLYLASHYEKLKGSPEDNEQKQLFVEQHKHYLDEIIEQISEFSKRVILADANLDKVLSAYNKHRDKPIREQAENIIHLFTLTNLGAPAAFKYFDTTIDRKRYTSTKEVLDATLIHQSITGLYETRIDLSQLGGDGGGGSEAAAKGGGGGTLQLDDEYRLYSPLVKPDQNIQFWLEQFPQAWAETAGMGLAKQVPPQVIQLKASATPVSVRQYPLSKEAQEGIRPHVQRLIQQGILVPVQSPWNTPLLPVRKPGTNDYRPVQDLREVNKRVQDIHPTVPNPYNLLCALPPQRSWYTVLDLKDAFFCLRLHPTSQPLFAFEWRDPGTGRTGQLTWTRLPQGFKNSPTIFNEALHRDLANFRIQHPQVTLLQYVDDLLLAGATKQDCLEGTKALLLELSDLGYRASAKKAQICRREVTYLGYSLRDGQRWLTEARKKTVVQIPAPTTAKQVREFLGTAGFCRLWIPGFATLAAPLYPLTKPKGEFSWAPEHQKAFDAIKKALLSAPALALPDVTKPFTLYVDERKGVARGVLTQTLGPWRRPVAYLSKKLDPVASGWPVCLKAIAAVAILVKDADKLTLGQNITVIAPHALENIVRQPPDRWMTNARMTHYQSLLLTERVTFAPPAALNPATLLPEETDEPVTHDCHQLLIEETGVRKDLTDIPLTGEVLTWFTDGSSYVVEGKRMAGAAVVDGTRTIWASSLPEGTSAQKAELMALTQALRLAEGKSINIYTDSRYAFATAHVHGAIYKQRGWLTSAGREIKNKEEILSLLEALHLPKRLAIIHCPGHQKAKDPISRGNQMADRVAKQAAQGVNLLAGKRTADGSEFEKRTADGSEFESPKKKAKVE

SEQ ID NO: 353 - protein, 2085 aa, synthetic construct; identical to SEQ ID NO: 183

SEQ ID NO: 354 - protein, 2090 aa, synthetic construct
MPAAKRVKLDGGDKKYSIGLDIGTNSVGWAVITDEYKVPSKKFKVLGNTDRHSIKKNLIGALLFDSGETAEATRLKRTARRRYTRRKNRICYLQEIFSNEMAKVDDSFFHRLEESFLVEEDKKHERHPIFGNIVDEVAYHEKYPTIYHLRKKLVDSTDKADLRLIYLALAHMIKFRGHFLIEGDLNPDNSDVDKLFIQLVQTYNQLFEENPINASGVDAKAILSARLSKSRRLENLIAQLPGEKKNGLFGNLIALSLGLTPNFKSNFDLAEDAKLQLSKDTYDDDLDNLLAQIGDQYADLFLAAKNLSDAILLSDILRVNTEITKAPLSASMIKRYDEHHQDLTLLKALVRQQLPEKYKEIFFDQSKNGYAGYIDGGASQEEFYKFIKPILEKMDGTEELLVKLNREDLLRKQRTFDNGSIPHQIHLGELHAILRRQEDFYPFLKDNREKIEKILTFRIPYYVGPLARGNSRFAWMTRKSEETITPWNFEEVVDKGASAQSFIERMTNFDKNLPNEKVLPKHSLLYEYFTVYNELTKVKYVTEGMRKPAFLSGEQKKAIVDLLFKTNRKVTVKQLKEDYFKKIECFDSVEISGVEDRFNASLGTYHDLLKIIKDKDFLDNEENEDILEDIVLTLTLFEDREMIEERLKTYAHLFDDKVMKQLKRRRYTGWGRLSRKLINGIRDKQSGKTILDFLKSDGFANRNFMQLIHDDSLTFKEDIQKAQVSGQGDSLHEHIANLAGSPAIKKGILQTVKVVDELVKVMGRHKPENIVIEMARENQTTQKGQKNSRERMKRIEEGIKELGSQILKEHPVENTQLQNEKLYLYYLQNGRDMYVDQELDINRLSDYDVDHIVPQSFLKDDSIDNKVLTRSDKARGKSDNVPSEEVVKKMKNYWRQLLNAKLITQRKFDNLTKAERGGLSELDKAGFIKRQLVETRQITKHVAQILDSRMNTKYDENDKLIREVKVITLKSKLVSDFRKDFQFYKVREINNYHHAHDAYLNAVVGTALIKKYPKLESEFVYGDYKVYDVRKMIAKSEQEIGKATAKYFFYSNIMNFFKTEITLANGEIRKRPLIETNGETGEIVWDKGRDFATVRKVLSMPQVNIVKKTEVQTGGFSKESILPKRNSDKLIARKKDWDPKKYGGFDSPTVAYSVLVVAKVEKGKSKKLKSVKELLGITIMERSSFEKNPIDFLEAKGYKEVKKDLIIKLPKYSLFELENGRKRMLASAGELQKGNELALPSKYVNFLYLASHYEKLKGSPEDNEQKQLFVEQHKHYLDEIIEQISEFSKRVILADANLDKVLSAYNKHRDKPIREQAENIIHLFTLTNLGAPAAFKYFDTTIDRKRYTSTKEVLDATLIHQSITGLYETRIDLSQLGGDGGEAAAKGGGGGSGGTLQLDDEYRLYSPLVKPDQNIQFWLEQFPQAWAETAGMGLAKQVPPQVIQLKASATPVSVRQYPLSKEAQEGIRPHVQRLIQQGILVPVQSPWNTPLLPVRKPGTNDYRPVQDLREVNKRVQDIHPTVPNPYNLLCALPPQRSWYTVLDLKDAFFCLRLHPTSQPLFAFEWRDPGTGRTGQLTWTRLPQGFKNSPTIFNEALHRDLANFRIQHPQVTLLQYVDDLLLAGATKQDCLEGTKALLLELSDLGYRASAKKAQICRREVTYLGYSLRDGQRWLTEARKKTVVQIPAPTTAKQVREFLGTAGFCRLWIPGFATLAAPLYPLTKPKGEFSWAPEHQKAFDAIKKALLSAPALALPDVTKPFTLYVDERKGVARGVLTQTLGPWRRPVAYLSKKLDPVASGWPVCLKAIAAVAILVKDADKLTLGQNITVIAPHALENIVRQPPDRWMTNARMTHYQSLLLTERVTFAPPAALNPATLLPEETDEPVTHDCHQLLIEETGVRKDLTDIPLTGEVLTWFTDGSSYVVEGKRMAGAAVVDGTRTIWASSLPEGTSAQKAELMALTQALRLAEGKSINIYTDSRYAFATAHVHGAIYKQRGWLTSAGREIKNKEEILSLLEALHLPKRLAIIHCPGHQKAKDPISRGNQMADRVAKQAAQGVNLLAGKRTADGSEFEKRTADGSEFESPKKKAKVE

SEQ ID NO: 355 - protein, 2099 aa, synthetic construct
MPAAKRVKLDGGDKKYSIGLDIGTNSVGWAVITDEYKVPSKKFKVLGNTDRHSIKKNLIGALLFDSGETAEATRLKRTARRRYTRRKNRICYLQEIFSNEMAKVDDSFFHRLEESFLVEEDKKHERHPIFGNIVDEVAYHEKYPTIYHLRKKLVDSTDKADLRLIYLALAHMIKFRGHFLIEGDLNPDNSDVDKLFIQLVQTYNQLFEENPINASGVDAKAILSARLSKSRRLENLIAQLPGEKKNGLFGNLIALSLGLTPNFKSNFDLAEDAKLQLSKDTYDDDLDNLLAQIGDQYADLFLAAKNLSDAILLSDILRVNTEITKAPLSASMIKRYDEHHQDLTLLKALVRQQLPEKYKEIFFDQSKNGYAGYIDGGASQEEFYKFIKPILEKMDGTEELLVKLNREDLLRKQRTFDNGSIPHQIHLGELHAILRRQEDFYPFLKDNREKIEKILTFRIPYYVGPLARGNSRFAWMTRKSEETITPWNFEEVVDKGASAQSFIERMTNFDKNLPNEKVLPKHSLLYEYFTVYNELTKVKYVTEGMRKPAFLSGEQKKAIVDLLFKTNRKVTVKQLKEDYFKKIECFDSVEISGVEDRFNASLGTYHDLLKIIKDKDFLDNEENEDILEDIVLTLTLFEDREMIEERLKTYAHLFDDKVMKQLKRRRYTGWGRLSRKLINGIRDKQSGKTILDFLKSDGFANRNFMQLIHDDSLTFKEDIQKAQVSGQGDSLHEHIANLAGSPAIKKGILQTVKVVDELVKVMGRHKPENIVIEMARENQTTQKGQKNSRERMKRIEEGIKELGSQILKEHPVENTQLQNEKLYLYYLQNGRDMYVDQELDINRLSDYDVDHIVPQSFLKDDSIDNKVLTRSDKARGKSDNVPSEEVVKKMKNYWRQLLNAKLITQRKFDNLTKAERGGLSELDKAGFIKRQLVETRQITKHVAQILDSRMNTKYDENDKLIREVKVITLKSKLVSDFRKDFQFYKVREINNYHHAHDAYLNAVVGTALIKKYPKLESEFVYGDYKVYDVRKMIAKSEQEIGKATAKYFFYSNIMNFFKTEITLANGEIRKRPLIETNGETGEIVWDKGRDFATVRKVLSMPQVNIVKKTEVQTGGFSKESILPKRNSDKLIARKKDWDPKKYGGFDSPTVAYSVLVVAKVEKGKSKKLKSVKELLGITIMERSSFEKNPIDFLEAKGYKEVKKDLIIKLPKYSLFELENGRKRMLASAGELQKGNELALPSKYVNFLYLASHYEKLKGSPEDNEQKQLFVEQHKHYLDEIIEQISEFSKRVILADANLDKVLSAYNKHRDKPIREQAENIIHLFTLTNLGAPAAFKYFDTTIDRKRYTSTKEVLDATLIHQSITGLYETRIDLSQLGGDGGGGGGSGGGGSGGGGSGGGGSGGTLQLDDEYRLYSPLVKPDQNIQFWLEQFPQAWAETAGMGLAKQVPPQVIQLKASATPVSVRQYPLSKEAQEGIRPHVQRLIQQGILVPVQSPWNTPLLPVRKPGTNDYRPVQDLREVNKRVQDIHPTVPNPYNLLCALPPQRSWYTVLDLKDAFFCLRLHPTSQPLFAFEWRDPGTGRTGQLTWTRLPQGFKNSPTIFNEALHRDLANFRIQHPQVTLLQYVDDLLLAGATKQDCLEGTKALLLELSDLGYRASAKKAQICRREVTYLGYSLRDGQRWLTEARKKTVVQIPAPTTAKQVREFLGTAGFCRLWIPGFATLAAPLYPLTKPKGEFSWAPEHQKAFDAIKKALLSAPALALPDVTKPFTLYVDERKGVARGVLTQTLGPWRRPVAYLSKKLDPVASGWPVCLKAIAAVAILVKDADKLTLGQNITVIAPHALENIVRQPPDRWMTNARMTHYQSLLLTERVTFAPPAALNPATLLPEETDEPVTHDCHQLLIEETGVRKDLTDIPLTGEVLTWFTDGSSYVVEGKRMAGAAVVDGTRTIWASSLPEGTSAQKAELMALTQALRLAEGKSINIYTDSRYAFATAHVHGAIYKQRGWLTSAGREIKNKEEILSLLEALHLPKRLAIIHCPGHQKAKDPISRGNQMADRVAKQAAQGVNLLAGKRTADGSEFEKRTADGSEFESPKKKAKVE

SEQ ID NO: 356 - protein, 2085 aa, synthetic construct; identical to SEQ ID NO: 125

SEQ ID NO: 357 - protein, 2091 aa, synthetic construct
MPAAKRVKLDGGDKKYSIGLDIGTNSVGWAVITDEYKVPSKKFKVLGNTDRHSIKKNLIGALLFDSGETAEATRLKRTARRRYTRRKNRICYLQEIFSNEMAKVDDSFFHRLEESFLVEEDKKHERHPIFGNIVDEVAYHEKYPTIYHLRKKLVDSTDKADLRLIYLALAHMIKFRGHFLIEGDLNPDNSDVDKLFIQLVQTYNQLFEENPINASGVDAKAILSARLSKSRRLENLIAQLPGEKKNGLFGNLIALSLGLTPNFKSNFDLAEDAKLQLSKDTYDDDLDNLLAQIGDQYADLFLAAKNLSDAILLSDILRVNTEITKAPLSASMIKRYDEHHQDLTLLKALVRQQLPEKYKEIFFDQSKNGYAGYIDGGASQEEFYKFIKPILEKMDGTEELLVKLNREDLLRKQRTFDNGSIPHQIHLGELHAILRRQEDFYPFLKDNREKIEKILTFRIPYYVGPLARGNSRFAWMTRKSEETITPWNFEEVVDKGASAQSFIERMTNFDKNLPNEKVLPKHSLLYEYFTVYNELTKVKYVTEGMRKPAFLSGEQKKAIVDLLFKTNRKVTVKQLKEDYFKKIECFDSVEISGVEDRFNASLGTYHDLLKIIKDKDFLDNEENEDILEDIVLTLTLFEDREMIEERLKTYAHLFDDKVMKQLKRRRYTGWGRLSRKLINGIRDKQSGKTILDFLKSDGFANRNFMQLIHDDSLTFKEDIQKAQVSGQGDSLHEHIANLAGSPAIKKGILQTVKVVDELVKVMGRHKPENIVIEMARENQTTQKGQKNSRERMKRIEEGIKELGSQILKEHPVENTQLQNEKLYLYYLQNGRDMYVDQELDINRLSDYDVDHIVPQSFLKDDSIDNKVLTRSDKARGKSDNVPSEEVVKKMKNYWRQLLNAKLITQRKFDNLTKAERGGLSELDKAGFIKRQLVETRQITKHVAQILDSRMNTKYDENDKLIREVKVITLKSKLVSDFRKDFQFYKVREINNYHHAHDAYLNAVVGTALIKKYPKLESEFVYGDYKVYDVRKMIAKSEQEIGKATAKYFFYSNIMNFFKTEITLANGEIRKRPLIETNGETGEIVWDKGRDFATVRKVLSMPQVNIVKKTEVQTGGFSKESILPKRNSDKLIARKKDWDPKKYGGFDSPTVAYSVLVVAKVEKGKSKKLKSVKELLGITIMERSSFEKNPIDFLEAKGYKEVKKDLIIKLPKYSLFELENGRKRMLASAGELQKGNELALPSKYVNFLYLASHYEKLKGSPEDNEQKQLFVEQHKHYLDEIIEQISEFSKRVILADANLDKVLSAYNKHRDKPIREQAENIIHLFTLTNLGAPAAFKYFDTTIDRKRYTSTKEVLDATLIHQSITGLYETRIDLSQLGGDGGGSSGSSGSSGSSGGTLQLDDEYRLYSPLVKPDQNIQFWLEQFPQAWAETAGMGLAKQVPPQVIQLKASATPVSVRQYPLSKEAQEGIRPHVQRLIQQGILVPVQSPWNTPLLPVRKPGTNDYRPVQDLREVNKRVQDIHPTVPNPYNLLCALPPQRSWYTVLDLKDAFFCLRLHPTSQPLFAFEWRDPGTGRTGQLTWTRLPQGFKNSPTIFNEALHRDLANFRIQHPQVTLLQYVDDLLLAGATKQDCLEGTKALLLELSDLGYRASAKKAQICRREVTYLGYSLRDGQRWLTEARKKTVVQIPAPTTAKQVREFLGTAGFCRLWIPGFATLAAPLYPLTKPKGEFSWAPEHQKAFDAIKKALLSAPALALPDVTKPFTLYVDERKGVARGVLTQTLGPWRRPVAYLSKKLDPVASGWPVCLKAIAAVAILVKDADKLTLGQNITVIAPHALENIVRQPPDRWMTNARMTHYQSLLLTERVTFAPPAALNPATLLPEETDEPVTHDCHQLLIEETGVRKDLTDIPLTGEVLTWFTDGSSYVVEGKRMAGAAVVDGTRTIWASSLPEGTSAQKAELMALTQALRLAEGKSINIYTDSRYAFATAHVHGAIYKQRGWLTSAGREIKNKEEILSLLEALHLPKRLAIIHCPGHQKAKDPISRGNQMADRVAKQAAQGVNLLAGKRTADGSEFEKRTADGSEFESPKKKAKVE

SEQ ID NO: 358 - protein, 2090 aa, synthetic construct
MPAAKRVKLDGGDKKYSIGLDIGTNSVGWAVITDEYKVPSKKFKVLGNTDRHSIKKNLIGALLFDSGETAEATRLKRTARRRYTRRKNRICYLQEIFSNEMAKVDDSFFHRLEESFLVEEDKKHERHPIFGNIVDEVAYHEKYPTIYHLRKKLVDSTDKADLRLIYLALAHMIKFRGHFLIEGDLNPDNSDVDKLFIQLVQTYNQLFEENPINASGVDAKAILSARLSKSRRLENLIAQLPGEKKNGLFGNLIALSLGLTPNFKSNFDLAEDAKLQLSKDTYDDDLDNLLAQIGDQYADLFLAAKNLSDAILLSDILRVNTEITKAPLSASMIKRYDEHHQDLTLLKALVRQQLPEKYKEIFFDQSKNGYAGYIDGGASQEEFYKFIKPILEKMDGTEELLVKLNREDLLRKQRTFDNGSIPHQIHLGELHAILRRQEDFYPFLKDNREKIEKILTFRIPYYVGPLARGNSRFAWMTRKSEETITPWNFEEVVDKGASAQSFIERMTNFDKNLPNEKVLPKHSLLYEYFTVYNELTKVKYVTEGMRKPAFLSGEQKKAIVDLLFKTNRKVTVKQLKEDYFKKIECFDSVEISGVEDRFNASLGTYHDLLKIIKDKDFLDNEENEDILEDIVLTLTLFEDREMIEERLKTYAHLFDDKVMKQLKRRRYTGWGRLSRKLINGIRDKQSGKTILDFLKSDGFANRNFMQLIHDDSLTFKEDIQKAQVSGQGDSLHEHIANLAGSPAIKKGILQTVKVVDELVKVMGRHKPENIVIEMARENQTTQKGQKNSRERMKRIEEGIKELGSQILKEHPVENTQLQNEKLYLYYLQNGRDMYVDQELDINRLSDYDVDHIVPQSFLKDDSIDNKVLTRSDKARGKSDNVPSEEVVKKMKNYWRQLLNAKLITQRKFDNLTKAERGGLSELDKAGFIKRQLVETRQITKHVAQILDSRMNTKYDENDKLIREVKVITLKSKLVSDFRKDFQFYKVREINNYHHAHDAYLNAVVGTALIKKYPKLESEFVYGDYKVYDVRKMIAKSEQEIGKATAKYFFYSNIMNFFKTEITLANGEIRKRPLIETNGETGEIVWDKGRDFATVRKVLSMPQVNIVKKTEVQTGGFSKESILPKRNSDKLIARKKDWDPKKYGGFDSPTVAYSVLVVAKVEKGKSKKLKSVKELLGITIMERSSFEKNPIDFLEAKGYKEVKKDLIIKLPKYSLFELENGRKRMLASAGELQKGNELALPSKYVNFLYLASHYEKLKGSPEDNEQKQLFVEQHKHYLDEIIEQISEFSKRVILADANLDKVLSAYNKHRDKPIREQAENIIHLFTLTNLGAPAAFKYFDTTIDRKRYTSTKEVLDATLIHQSITGLYETRIDLSQLGGDGGEAAAKPAPGGGGGTLQLDDEYRLYSPLVKPDQNIQFWLEQFPQAWAETAGMGLAKQVPPQVIQLKASATPVSVRQYPLSKEAQEGIRPHVQRLIQQGILVPVQSPWNTPLLPVRKPGTNDYRPVQDLREVNKRVQDIHPTVPNPYNLLCALPPQRSWYTVLDLKDAFFCLRLHPTSQPLFAFEWRDPGTGRTGQLTWTRLPQGFKNSPTIFNEALHRDLANFRIQHPQVTLLQYVDDLLLAGATKQDCLEGTKALLLELSDLGYRASAKKAQICRREVTYLGYSLRDGQRWLTEARKKTVVQIPAPTTAKQVREFLGTAGFCRLWIPGFATLAAPLYPLTKPKGEFSWAPEHQKAFDAIKKALLSAPALALPDVTKPFTLYVDERKGVARGVLTQTLGPWRRPVAYLSKKLDPVASGWPVCLKAIAAVAILVKDADKLTLGQNITVIAPHALENIVRQPPDRWMTNARMTHYQSLLLTERVTFAPPAALNPATLLPEETDEPVTHDCHQLLIEETGVRKDLTDIPLTGEVLTWFTDGSSYVVEGKRMAGAAVVDGTRTIWASSLPEGTSAQKAELMALTQALRLAEGKSINIYTDSRYAFATAHVHGAIYKQRGWLTSAGREIKNKEEILSLLEALHLPKRLAIIHCPGHQKAKDPISRGNQMADRVAKQAAQGVNLLAGKRTADGSEFEKRTADGSEFESPKKKAKVE

SEQ ID NO: 359 - protein, 2088 aa, synthetic construct; identical to SEQ ID NO: 175

SEQ ID NO: 360 - protein, 2087 aa, synthetic construct
MPAAKRVKLDGGDKKYSIGLDIGTNSVGWAVITDEYKVPSKKFKVLGNTDRHSIKKNLIGALLFDSGETAEATRLKRTARRRYTRRKNRICYLQEIFSNEMAKVDDSFFHRLEESFLVEEDKKHERHPIFGNIVDEVAYHEKYPTIYHLRKKLVDSTDKADLRLIYLALAHMIKFRGHFLIEGDLNPDNSDVDKLFIQLVQTYNQLFEENPINASGVDAKAILSARLSKSRRLENLIAQLPGEKKNGLFGNLIALSLGLTPNFKSNFDLAEDAKLQLSKDTYDDDLDNLLAQIGDQYADLFLAAKNLSDAILLSDILRVNTEITKAPLSASMIKRYDEHHQDLTLLKALVRQQLPEKYKEIFFDQSKNGYAGYIDGGASQEEFYKFIKPILEKMDGTEELLVKLNREDLLRKQRTFDNGSIPHQIHLGELHAILRRQEDFYPFLKDNREKIEKILTFRIPYYVGPLARGNSRFAWMTRKSEETITPWNFEEVVDKGASAQSFIERMTNFDKNLPNEKVLPKHSLLYEYFTVYNELTKVKYVTEGMRKPAFLSGEQKKAIVDLLFKTNRKVTVKQLKEDYFKKIECFDSVEISGVEDRFNASLGTYHDLLKIIKDKDFLDNEENEDILEDIVLTLTLFEDREMIEERLKTYAHLFDDKVMKQLKRRRYTGWGRLSRKLINGIRDKQSGKTILDFLKSDGFANRNFMQLIHDDSLTFKEDIQKAQVSGQGDSLHEHIANLAGSPAIKKGILQTVKVVDELVKVMGRHKPENIVIEMARENQTTQKGQKNSRERMKRIEEGIKELGSQILKEHPVENTQLQNEKLYLYYLQNGRDMYVDQELDINRLSDYDVDHIVPQSFLKDDSIDNKVLTRSDKARGKSDNVPSEEVVKKMKNYWRQLLNAKLITQRKFDNLTKAERGGLSELDKAGFIKRQLVETRQITKHVAQILDSRMNTKYDENDKLIREVKVITLKSKLVSDFRKDFQFYKVREINNYHHAHDAYLNAVVGTALIKKYPKLESEFVYGDYKVYDVRKMIAKSEQEIGKATAKYFFYSNIMNFFKTEITLANGEIRKRPLIETNGETGEIVWDKGRDFATVRKVLSMPQVNIVKKTEVQTGGFSKESILPKRNSDKLIARKKDWDPKKYGGFDSPTVAYSVLVVAKVEKGKSKKLKSVKELLGITIMERSSFEKNPIDFLEAKGYKEVKKDLIIKLPKYSLFELENGRKRMLASAGELQKGNELALPSKYVNFLYLASHYEKLKGSPEDNEQKQLFVEQHKHYLDEIIEQISEFSKRVILADANLDKVLSAYNKHRDKPIREQAENIIHLFTLTNLGAPAAFKYFDTTIDRKRYTSTKEVLDATLIHQSITGLYETRIDLSQLGGDGGEAAAKGSSGGTLQLDDEYRLYSPLVKPDQNIQFWLEQFPQAWAETAGMGLAKQVPPQVIQLKASATPVSVRQYPLSKEAQEGIRPHVQRLIQQGILVPVQSPWNTPLLPVRKPGTNDYRPVQDLREVNKRVQDIHPTVPNPYNLLCALPPQRSWYTVLDLKDAFFCLRLHPTSQPLFAFEWRDPGTGRTGQLTWTRLPQGFKNSPTIFNEALHRDLANFRIQHPQVTLLQYVDDLLLAGATKQDCLEGTKALLLELSDLGYRASAKKAQICRREVTYLGYSLRDGQRWLTEARKKTVVQIPAPTTAKQVREFLGTAGFCRLWIPGFATLAAPLYPLTKPKGEFSWAPEHQKAFDAIKKALLSAPALALPDVTKPFTLYVDERKGVARGVLTQTLGPWRRPVAYLSKKLDPVASGWPVCLKAIAAVAILVKDADKLTLGQNITVIAPHALENIVRQPPDRWMTNARMTHYQSLLLTERVTFAPPAALNPATLLPEETDEPVTHDCHQLLIEETGVRKDLTDIPLTGEVLTWFTDGSSYVVEGKRMAGAAVVDGTRTIWASSLPEGTSAQKAELMALTQALRLAEGKSINIYTDSRYAFATAHVHGAIYKQRGWLTSAGREIKNKEEILSLLEALHLPKRLAIIHCPGHQKAKDPISRGNQMADRVAKQAAQGVNLLAGKRTADGSEFEKRTADGSEFESPKKKAKVE

SEQ ID NO: 361 - protein, 2090 aa, synthetic construct
MPAAKRVKLDGGDKKYSIGLDIGTNSVGWAVITDEYKVPSKKFKVLGNTDRHSIKKNLIGALLFDSGETAEATRLKRTARRRYTRRKNRICYLQEIFSNEMAKVDDSFFHRLEESFLVEEDKKHERHPIFGNIVDEVAYHEKYPTIYHLRKKLVDSTDKADLRLIYLALAHMIKFRGHFLIEGDLNPDNSDVDKLFIQLVQTYNQLFEENPINASGVDAKAILSARLSKSRRLENLIAQLPGEKKNGLFGNLIALSLGLTPNFKSNFDLAEDAKLQLSKDTYDDDLDNLLAQIGDQYADLFLAAKNLSDAILLSDILRVNTEITKAPLSASMIKRYDEHHQDLTLLKALVRQQLPEKYKEIFFDQSKNGYAGYIDGGASQEEFYKFIKPILEKMDGTEELLVKLNREDLLRKQRTFDNGSIPHQIHLGELHAILRRQEDFYPFLKDNREKIEKILTFRIPYYVGPLARGNSRFAWMTRKSEETITPWNFEEVVDKGASAQSFIERMTNFDKNLPNEKVLPKHSLLYEYFTVYNELTKVKYVTEGMRKPAFLSGEQKKAIVDLLFKTNRKVTVKQLKEDYFKKIECFDSVEISGVEDRFNASLGTYHDLLKIIKDKDFLDNEENEDILEDIVLTLTLFEDREMIEERLKTYAHLFDDKVMKQLKRRRYTGWGRLSRKLINGIRDKQSGKTILDFLKSDGFANRNFMQLIHDDSLTFKEDIQKAQVSGQGDSLHEHIANLAGSPAIKKGILQTVKVVDELVKVMGRHKPENIVIEMARENQTTQKGQKNSRERMKRIEEGIKELGSQILKEHPVENTQLQNEKLYLYYLQNGRDMYVDQELDINRLSDYDVDHIVPQSFLKDDSIDNKVLTRSDKARGKSDNVPSEEVVKKMKNYWRQLLNAKLITQRKFDNLTKAERGGLSELDKAGFIKRQLVETRQITKHVAQILDSRMNTKYDENDKLIREVKVITLKSKLVSDFRKDFQFYKVREINNYHHAHDAYLNAVVGTALIKKYPKLESEFVYGDYKVYDVRKMIAKSEQEIGKATAKYFFYSNIMNFFKTEITLANGEIRKRPLIETNGETGEIVWDKGRDFATVRKVLSMPQVNIVKKTEVQTGGFSKESILPKRNSDKLIARKKDWDPKKYGGFDSPTVAYSVLVVAKVEKGKSKKLKSVKELLGITIMERSSFEKNPIDFLEAKGYKEVKKDLIIKLPKYSLFELENGRKRMLASAGELQKGNELALPSKYVNFLYLASHYEKLKGSPEDNEQKQLFVEQHKHYLDEIIEQISEFSKRVILADANLDKVLSAYNKHRDKPIREQAENIIHLFTLTNLGAPAAFKYFDTTIDRKRYTSTKEVLDATLIHQSITGLYETRIDLSQLGGDGGGSSEAAAKGGSGGTLQLDDEYRLYSPLVKPDQNIQFWLEQFPQAWAETAGMGLAKQVPPQVIQLKASATPVSVRQYPLSKEAQEGIRPHVQRLIQQGILVPVQSPWNTPLLPVRKPGTNDYRPVQDLREVNKRVQDIHPTVPNPYNLLCALPPQRSWYTVLDLKDAFFCLRLHPTSQPLFAFEWRDPGTGRTGQLTWTRLPQGFKNSPTIFNEALHRDLANFRIQHPQVTLLQYVDDLLLAGATKQDCLEGTKALLLELSDLGYRASAKKAQICRREVTYLGYSLRDGQRWLTEARKKTVVQIPAPTTAKQVREFLGTAGFCRLWIPGFATLAAPLYPLTKPKGEFSWAPEHQKAFDAIKKALLSAPALALPDVTKPFTLYVDERKGVARGVLTQTLGPWRRPVAYLSKKLDPVASGWPVCLKAIAAVAILVKDADKLTLGQNITVIAPHALENIVRQPPDRWMTNARMTHYQSLLLTERVTFAPPAALNPATLLPEETDEPVTHDCHQLLIEETGVRKDLTDIPLTGEVLTWFTDGSSYVVEGKRMAGAAVVDGTRTIWASSLPEGTSAQKAELMALTQALRLAEGKSINIYTDSRYAFATAHVHGAIYKQRGWLTSAGREIKNKEEILSLLEALHLPKRLAIIHCPGHQKAKDPISRGNQMADRVAKQAAQGVNLLAGKRTADGSEFEKRTADGSEFESPKKKAKVE

SEQ ID NO: 362 - protein, 2087 aa, synthetic construct; identical to SEQ ID NO: 114

SEQ ID NO: 363 - protein, 2090 aa, synthetic construct; identical to SEQ ID NO: 139

SEQ ID NO: 364 - protein, 2088 aa, synthetic construct; identical to SEQ ID NO: 181

SEQ ID NO: 365 - protein, 2090 aa, synthetic construct; identical to SEQ ID NO: 133

SEQ ID NO: 366 - protein, 2084 aa, synthetic construct; identical to SEQ ID NO: 163

SEQ ID NO: 367 - protein, 2084 aa, synthetic construct; identical to SEQ ID NO: 166

SEQ ID NO: 368 - protein, 2090 aa, synthetic construct; identical to SEQ ID NO: 170

SEQ ID NO: 369 - protein, 2085 aa, synthetic construct; identical to SEQ ID NO: 165

SEQ ID NO: 370 - protein, 2091 aa, synthetic construct; identical to SEQ ID NO: 153

SEQ ID NO: 371 - protein, 2088 aa, synthetic construct
MPAAKRVKLDGGDKKYSIGLDIGTNSVGWAVITDEYKVPSKKFKVLGNTDRHSIKKNLIGALLFDSGETAEATRLKRTARRRYTRRKNRICYLQEIFSNEMAKVDDSFFHRLEESFLVEEDKKHERHPIFGNIVDEVAYHEKYPTIYHLRKKLVDSTDKADLRLIYLALAHMIKFRGHFLIEGDLNPDNSDVDKLFIQLVQTYNQLFEENPINASGVDAKAILSARLSKSRRLENLIAQLPGEKKNGLFGNLIALSLGLTPNFKSNFDLAEDAKLQLSKDTYDDDLDNLLAQIGDQYADLFLAAKNLSDAILLSDILRVNTEITKAPLSASMIKRYDEHHQDLTLLKALVRQQLPEKYKEIFFDQSKNGYAGYIDGGASQEEFYKFIKPILEKMDGTEELLVKLNREDLLRKQRTFDNGSIPHQIHLGELHAILRRQEDFYPFLKDNREKIEKILTFRIPYYVGPLARGNSRFAWMTRKSEETITPWNFEEVVDKGASAQSFIERMTNFDKNLPNEKVLPKHSLLYEYFTVYNELTKVKYVTEGMRKPAFLSGEQKKAIVDLLFKTNRKVTVKQLKEDYFKKIECFDSVEISGVEDRFNASLGTYHDLLKIIKDKDFLDNEENEDILEDIVLTLTLFEDREMIEERLKTYAHLFDDKVMKQLKRRRYTGWGRLSRKLINGIRDKQSGKTILDFLKSDGFANRNFMQLIHDDSLTFKEDIQKAQVSGQGDSLHEHIANLAGSPAIKKGILQTVKVVDELVKVMGRHKPENIVIEMARENQTTQKGQKNSRERMKRIEEGIKELGSQILKEHPVENTQLQNEKLYLYYLQNGRDMYVDQELDINRLSDYDVDHIVPQSFLKDDSIDNKVLTRSDKARGKSDNVPSEEVVKKMKNYWRQLLNAKLITQRKFDNLTKAERGGLSELDKAGFIKRQLVETRQITKHVAQILDSRMNTKYDENDKLIREVKVITLKSKLVSDFRKDFQFYKVREINNYHHAHDAYLNAVVGTALIKKYPKLESEFVYGDYKVYDVRKMIAKSEQEIGKATAKYFFYSNIMNFFKTEITLANGEIRKRPLIETNGETGEIVWDKGRDFATVRKVLSMPQVNIVKKTEVQTGGFSKESILPKRNSDKLIARKKDWDPKKYGGFDSPTVAYSVLVVAKVEKGKSKKLKSVKELLGITIMERSSFEKNPIDFLEAKGYKEVKKDLIIKLPKYSLFELENGRKRMLASAGELQKGNELALPSKYVNFLYLASHYEKLKGSPEDNEQKQLFVEQHKHYLDEIIEQISEFSKRVILADANLDKVLSAYNKHRDKPIREQAENIIHLFTLTNLGAPAAFKYFDTTIDRKRYTSTKEVLDATLIHQSITGLYETRIDLSQLGGDGGPAPGGGGSSGGTLQLDDEYRLYSPLVKPDQNIQFWLEQFPQAWAETAGMGLAKQVPPQVIQLKASATPVSVRQYPLSKEAQEGIRPHVQRLIQQGILVPVQSPWNTPLLPVRKPGTNDYRPVQDLREVNKRVQDIHPTVPNPYNLLCALPPQRSWYTVLDLKDAFFCLRLHPTSQPLFAFEWRDPGTGRTGQLTWTRLPQGFKNSPTIFNEALHRDLANFRIQHPQVTLLQYVDDLLLAGATKQDCLEGTKALLLELSDLGYRASAKKAQICRREVTYLGYSLRDGQRWLTEARKKTVVQIPAPTTAKQVREFLGTAGFCRLWIPGFATLAAPLYPLTKPKGEFSWAPEHQKAFDAIKKALLSAPALALPDVTKPFTLYVDERKGVARGVLTQTLGPWRRPVAYLSKKLDPVASGWPVCLKAIAAVAILVKDADKLTLGQNITVIAPHALENIVRQPPDRWMTNARMTHYQSLLLTERVTFAPPAALNPATLLPEETDEPVTHDCHQLLIEETGVRKDLTDIPLTGEVLTWFTDGSSYVVEGKRMAGAAVVDGTRTIWASSLPEGTSAQKAELMALTQALRLAEGKSINIYTDSRYAFATAHVHGAIYKQRGWLTSAGREIKNKEEILSLLEALHLPKRLAIIHCPGHQKAKDPISRGNQMADRVAKQAAQGVNLLAGKRTADGSEFEKRTADGSEFESPKKKAKVE

SEQ ID NO: 372 - protein, 2090 aa, synthetic construct; identical to SEQ ID NO: 172

SEQ ID NO: 373 - protein, 2088 aa, synthetic construct
MPAAKRVKLDGGDKKYSIGLDIGTNSVGWAVITDEYKVPSKKFKVLGNTDRHSIKKNLIGALLFDSGETAEATRLKRTARRRYTRRKNRICYLQEIFSNEMAKVDDSFFHRLEESFLVEEDKKHERHPIFGNIVDEVAYHEKYPTIYHLRKKLVDSTDKADLRLIYLALAHMIKFRGHFLIEGDLNPDNSDVDKLFIQLVQTYNQLFEENPINASGVDAKAILSARLSKSRRLENLIAQLPGEKKNGLFGNLIALSLGLTPNFKSNFDLAEDAKLQLSKDTYDDDLDNLLAQIGDQYADLFLAAKNLSDAILLSDILRVNTEITKAPLSASMIKRYDEHHQDLTLLKALVRQQLPEKYKEIFFDQSKNGYAGYIDGGASQEEFYKFIKPILEKMDGTEELLVKLNREDLLRKQRTFDNGSIPHQIHLGELHAILRRQEDFYPFLKDNREKIEKILTFRIPYYVGPLARGNSRFAWMTRKSEETITPWNFEEVVDKGASAQSFIERMTNFDKNLPNEKVLPKHSLLYEYFTVYNELTKVKYVTEGMRKPAFLSGEQKKAIVDLLFKTNRKVTVKQLKEDYFKKIECFDSVEISGVEDRFNASLGTYHDLLKIIKDKDFLDNEENEDILEDIVLTLTLFEDREMIEERLKTYAHLFDDKVMKQLKRRRYTGWGRLSRKLINGIRDKQSGKTILDFLKSDGFANRNFMQLIHDDSLTFKEDIQKAQVSGQGDSLHEHIANLAGSPAIKKGILQTVKVVDELVKVMGRHKPENIVIEMARENQTTQKGQKNSRERMKRIEEGIKELGSQILKEHPVENTQLQNEKLYLYYLQNGRDMYVDQELDINRLSDYDVDHIVPQSFLKDDSIDNKVLTRSDKARGKSDNVPSEEVVKKMKNYWRQLLNAKLITQRKFDNLTKAERGGLSELDKAGFIKRQLVETRQITKHVAQILDSRMNTKYDENDKLIREVKVITLKSKLVSDFRKDFQFYKVREINNYHHAHDAYLNAVVGTALIKKYPKLESEFVYGDYKVYDVRKMIAKSEQEIGKATAKYFFYSNIMNFFKTEITLANGEIRKRPLIETNGETGEIVWDKGRDFATVRKVLSMPQVNIVKKTEVQTGGFSKESILPKRNSDKLIARKKDWDPKKYGGFDSPTVAYSVLVVAKVEKGKSKKLKSVKELLGITIMERSSFEKNPIDFLEAKGYKEVKKDLIIKLPKYSLFELENGRKRMLASAGELQKGNELALPSKYVNFLYLASHYEKLKGSPEDNEQKQLFVEQHKHYLDEIIEQISEFSKRVILADANLDKVLSAYNKHRDKPIREQAENIIHLFTLTNLGAPAAFKYFDTTIDRKRYTSTKEVLDATLIHQSITGLYETRIDLSQLGGDGGGGSGGGPAPGGTLQLDDEYRLYSPLVKPDQNIQFWLEQFPQAWAETAGMGLAKQVPPQVIQLKASATPVSVRQYPLSKEAQEGIRPHVQRLIQQGILVPVQSPWNTPLLPVRKPGTNDYRPVQDLREVNKRVQDIHPTVPNPYNLLCALPPQRSWYTVLDLKDAFFCLRLHPTSQPLFAFEWRDPGTGRTGQLTWTRLPQGFKNSPTIFNEALHRDLANFRIQHPQVTLLQYVDDLLLAGATKQDCLEGTKALLLELSDLGYRASAKKAQICRREVTYLGYSLRDGQRWLTEARKKTVVQIPAPTTAKQVREFLGTAGFCRLWIPGFATLAAPLYPLTKPKGEFSWAPEHQKAFDAIKKALLSAPALALPDVTKPFTLYVDERKGVARGVLTQTLGPWRRPVAYLSKKLDPVASGWPVCLKAIAAVAILVKDADKLTLGQNITVIAPHALENIVRQPPDRWMTNARMTHYQSLLLTERVTFAPPAALNPATLLPEETDEPVTHDCHQLLIEETGVRKDLTDIPLTGEVLTWFTDGSSYVVEGKRMAGAAVVDGTRTIWASSLPEGTSAQKAELMALTQALRLAEGKSINIYTDSRYAFATAHVHGAIYKQRGWLTSAGREIKNKEEILSLLEALHLPKRLAIIHCPGHQKAKDPISRGNQMADRVAKQAAQGVNLLAGKRTADGSEFEKRTADGSEFESPKKKAKVE

SEQ ID NO: 374 - protein, 2094 aa, synthetic construct; identical to SEQ ID NO: 118

SEQ ID NO: 375 - protein, 2087 aa, synthetic construct
MPAAKRVKLDGGDKKYSIGLDIGTNSVGWAVITDEYKVPSKKFKVLGNTDRHSIKKNLIGALLFDSGETAEATRLKRTARRRYTRRKNRICYLQEIFSNEMAKVDDSFFHRLEESFLVEEDKKHERHPIFGNIVDEVAYHEKYPTIYHLRKKLVDSTDKADLRLIYLALAHMIKFRGHFLIEGDLNPDNSDVDKLFIQLVQTYNQLFEENPINASGVDAKAILSARLSKSRRLENLIAQLPGEKKNGLFGNLIALSLGLTPNFKSNFDLAEDAKLQLSKDTYDDDLDNLLAQIGDQYADLFLAAKNLSDAILLSDILRVNTEITKAPLSASMIKRYDEHHQDLTLLKALVRQQLPEKYKEIFFDQSKNGYAGYIDGGASQEEFYKFIKPILEKMDGTEELLVKLNREDLLRKQRTFDNGSIPHQIHLGELHAILRRQEDFYPFLKDNREKIEKILTFRIPYYVGPLARGNSRFAWMTRKSEETITPWNFEEVVDKGASAQSFIERMTNFDKNLPNEKVLPKHSLLYEYFTVYNELTKVKYVTEGMRKPAFLSGEQKKAIVDLLFKTNRKVTVKQLKEDYFKKIECFDSVEISGVEDRFNASLGTYHDLLKIIKDKDFLDNEENEDILEDIVLTLTLFEDREMIEERLKTYAHLFDDKVMKQLKRRRYTGWGRLSRKLINGIRDKQSGKTILDFLKSDGFANRNFMQLIHDDSLTFKEDIQKAQVSGQGDSLHEHIANLAGSPAIKKGILQTVKVVDELVKVMGRHKPENIVIEMARENQTTQKGQKNSRERMKRIEEGIKELGSQILKEHPVENTQLQNEKLYLYYLQNGRDMYVDQELDINRLSDYDVDHIVPQSFLKDDSIDNKVLTRSDKARGKSDNVPSEEVVKKMKNYWRQLLNAKLITQRKFDNLTKAERGGLSELDKAGFIKRQLVETRQITKHVAQILDSRMNTKYDENDKLIREVKVITLKSKLVSDFRKDFQFYKVREINNYHHAHDAYLNAVVGTALIKKYPKLESEFVYGDYKVYDVRKMIAKSEQEIGKATAKYFFYSNIMNFFKTEITLANGEIRKRPLIETNGETGEIVWDKGRDFATVRKVLSMPQVNIVKKTEVQTGGFSKESILPKRNSDKLIARKKDWDPKKYGGFDSPTVAYSVLVVAKVEKGKSKKLKSVKELLGITIMERSSFEKNPIDFLEAKGYKEVKKDLIIKLPKYSLFELENGRKRMLASAGELQKGNELALPSKYVNFLYLASHYEKLKGSPEDNEQKQLFVEQHKHYLDEIIEQISEFSKRVILADANLDKVLSAYNKHRDKPIREQAENIIHLFTLTNLGAPAAFKYFDTTIDRKRYTSTKEVLDATLIHQSITGLYETRIDLSQLGGDGGPAPEAAAKGGTLQLDDEYRLYSPLVKPDQNIQFWLEQFPQAWAETAGMGLAKQVPPQVIQLKASATPVSVRQYPLSKEAQEGIRPHVQRLIQQGILVPVQSPWNTPLLPVRKPGTNDYRPVQDLREVNKRVQDIHPTVPNPYNLLCALPPQRSWYTVLDLKDAFFCLRLHPTSQPLFAFEWRDPGTGRTGQLTWTRLPQGFKNSPTIFNEALHRDLANFRIQHPQVTLLQYVDDLLLAGATKQDCLEGTKALLLELSDLGYRASAKKAQICRREVTYLGYSLRDGQRWLTEARKKTVVQIPAPTTAKQVREFLGTAGFCRLWIPGFATLAAPLYPLTKPKGEFSWAPEHQKAFDAIKKALLSAPALALPDVTKPFTLYVDERKGVARGVLTQTLGPWRRPVAYLSKKLDPVASGWPVCLKAIAAVAILVKDADKLTLGQNITVIAPHALENIVRQPPDRWMTNARMTHYQSLLLTERVTFAPPAALNPATLLPEETDEPVTHDCHQLLIEETGVRKDLTDIPLTGEVLTWFTDGSSYVVEGKRMAGAAVVDGTRTIWASSLPEGTSAQKAELMALTQALRLAEGKSINIYTDSRYAFATAHVHGAIYKQRGWLTSAGREIKNKEEILSLLEALHLPKRLAIIHCPGHQKAKDPISRGNQMADRVAKQAAQGVNLLAGKRTADGSEFEKRTADGSEFESPKKKAKVE

SEQ ID NO: 376 - protein, 2090 aa, synthetic construct; identical to SEQ ID NO: 154

SEQ ID NO: 377 - protein, 2091 aa, synthetic construct; identical to SEQ ID NO: 145

SEQ ID NO: 378 - protein, 2089 aa, synthetic construct
MPAAKRVKLDGGDKKYSIGLDIGTNSVGWAVITDEYKVPSKKFKVLGNTDRHSIKKNLIGALLFDSGETAEATRLKRTARRRYTRRKNRICYLQEIFSNEMAKVDDSFFHRLEESFLVEEDKKHERHPIFGNIVDEVAYHEKYPTIYHLRKKLVDSTDKADLRLIYLALAHMIKFRGHFLIEGDLNPDNSDVDKLFIQLVQTYNQLFEENPINASGVDAKAILSARLSKSRRLENLIAQLPGEKKNGLFGNLIALSLGLTPNFKSNFDLAEDAKLQLSKDTYDDDLDNLLAQIGDQYADLFLAAKNLSDAILLSDILRVNTEITKAPLSASMIKRYDEHHQDLTLLKALVRQQLPEKYKEIFFDQSKNGYAGYIDGGASQEEFYKFIKPILEKMDGTEELLVKLNREDLLRKQRTFDNGSIPHQIHLGELHAILRRQEDFYPFLKDNREKIEKILTFRIPYYVGPLARGNSRFAWMTRKSEETITPWNFEEVVDKGASAQSFIERMTNFDKNLPNEKVLPKHSLLYEYFTVYNELTKVKYVTEGMRKPAFLSGEQKKAIVDLLFKTNRKVTVKQLKEDYFKKIECFDSVEISGVEDRFNASLGTYHDLLKIIKDKDFLDNEENEDILEDIVLTLTLFEDREMIEERLKTYAHLFDDKVMKQLKRRRYTGWGRLSRKLINGIRDKQSGKTILDFLKSDGFANRNFMQLIHDDSLTFKEDIQKAQVSGQGDSLHEHIANLAGSPAIKKGILQTVKVVDELVKVMGRHKPENIVIEMARENQTTQKGQKNSRERMKRIEEGIKELGSQILKEHPVENTQLQNEKLYLYYLQNGRDMYVDQELDINRLSDYDVDHIVPQSFLKDDSIDNKVLTRSDKARGKSDNVPSEEVVKKMKNYWRQLLNAKLITQRKFDNLTKAERGGLSELDKAGFIKRQLVETRQITKHVAQILDSRMNTKYDENDKLIREVKVITLKSKLVSDFRKDFQFYKVREINNYHHAHDAYLNAVVGTALIKKYPKLESEFVYGDYKVYDVRKMIAKSEQEIGKATAKYFFYSNIMNFFKTEITLANGEIRKRPLIETNGETGEIVWDKGRDFATVRKVLSMPQVNIVKKTEVQTGGFSKESILPKRNSDKLIARKKDWDPKKYGGFDSPTVAYSVLVVAKVEKGKSKKLKSVKELLGITIMERSSFEKNPIDFLEAKGYKEVKKDLIIKLPKYSLFELENGRKRMLASAGELQKGNELALPSKYVNFLYLASHYEKLKGSPEDNEQKQLFVEQHKHYLDEIIEQISEFSKRVILADANLDKVLSAYNKHRDKPIREQAENIIHLFTLTNLGAPAAFKYFDTTIDRKRYTSTKEVLDATLIHQSITGLYETRIDLSQLGGDGGGGGGSGGGGSGGTLQLDDEYRLYSPLVKPDQNIQFWLEQFPQAWAETAGMGLAKQVPPQVIQLKASATPVSVRQYPLSKEAQEGIRPHVQRLIQQGILVPVQSPWNTPLLPVRKPGTNDYRPVQDLREVNKRVQDIHPTVPNPYNLLCALPPQRSWYTVLDLKDAFFCLRLHPTSQPLFAFEWRDPGTGRTGQLTWTRLPQGFKNSPTIFNEALHRDLANFRIQHPQVTLLQYVDDLLLAGATKQDCLEGTKALLLELSDLGYRASAKKAQICRREVTYLGYSLRDGQRWLTEARKKTVVQIPAPTTAKQVREFLGTAGFCRLWIPGFATLAAPLYPLTKPKGEFSWAPEHQKAFDAIKKALLSAPALALPDVTKPFTLYVDERKGVARGVLTQTLGPWRRPVAYLSKKLDPVASGWPVCLKAIAAVAILVKDADKLTLGQNITVIAPHALENIVRQPPDRWMTNARMTHYQSLLLTERVTFAPPAALNPATLLPEETDEPVTHDCHQLLIEETGVRKDLTDIPLTGEVLTWFTDGSSYVVEGKRMAGAAVVDGTRTIWASSLPEGTSAQKAELMALTQALRLAEGKSINIYTDSRYAFATAHVHGAIYKQRGWLTSAGREIKNKEEILSLLEALHLPKRLAIIHCPGHQKAKDPISRGNQMADRVAKQAAQGVNLLAGKRTADGSEFEKRTADGSEFESPKKKAKVE

SEQ ID NO: 379 - protein, 2088 aa, synthetic construct
MPAAKRVKLDGGDKKYSIGLDIGTNSVGWAVITDEYKVPSKKFKVLGNTDRHSIKKNLIGALLFDSGETAEATRLKRTARRRYTRRKNRICYLQEIFSNEMAKVDDSFFHRLEESFLVEEDKKHERHPIFGNIVDEVAYHEKYPTIYHLRKKLVDSTDKADLRLIYLALAHMIKFRGHFLIEGDLNPDNSDVDKLFIQLVQTYNQLFEENPINASGVDAKAILSARLSKSRRLENLIAQLPGEKKNGLFGNLIALSLGLTPNFKSNFDLAEDAKLQLSKDTYDDDLDNLLAQIGDQYADLFLAAKNLSDAILLSDILRVNTEITKAPLSASMIKRYDEHHQDLTLLKALVRQQLPEKYKEIFFDQSKNGYAGYIDGGASQEEFYKFIKPILEKMDGTEELLVKLNREDLLRKQRTFDNGSIPHQIHLGELHAILRRQEDFYPFLKDNREKIEKILTFRIPYYVGPLARGNSRFAWMTRKSEETITPWNFEEVVDKGASAQSFIERMTNFDKNLPNEKVLPKHSLLYEYFTVYNELTKVKYVTEGMRKPAFLSGEQKKAIVDLLFKTNRKVTVKQLKEDYFKKIECFDSVEISGVEDRFNASLGTYHDLLKIIKDKDFLDNEENEDILEDIVLTLTLFEDREMIEERLKTYAHLFDDKVMKQLKRRRYTGWGRLSRKLINGIRDKQSGKTILDFLKSDGFANRNFMQLIHDDSLTFKEDIQKAQVSGQGDSLHEHIANLAGSPAIKKGILQTVKVVDELVKVMGRHKPENIVIEMARENQTTQKGQKNSRERMKRIEEGIKELGSQILKEHPVENTQLQNEKLYLYYLQNGRDMYVDQELDINRLSDYDVDHIVPQSFLKDDSIDNKVLTRSDKARGKSDNVPSEEVVKKMKNYWRQLLNAKLITQRKFDNLTKAERGGLSELDKAGFIKRQLVETRQITKHVAQILDSRMNTKYDENDKLIREVKVITLKSKLVSDFRKDFQFYKVREINNYHHAHDAYLNAVVGTALIKKYPKLESEFVYGDYKVYDVRKMIAKSEQEIGKATAKYFFYSNIMNFFKTEITLANGEIRKRPLIETNGETGEIVWDKGRDFATVRKVLSMPQVNIVKKTEVQTGGFSKESILPKRNSDKLIARKKDWDPKKYGGFDSPTVAYSVLVVAKVEKGKSKKLKSVKELLGITIMERSSFEKNPIDFLEAKGYKEVKKDLIIKLPKYSLFELENGRKRMLASAGELQKGNELALPSKYVNFLYLASHYEKLKGSPEDNEQKQLFVEQHKHYLDEIIEQISEFSKRVILADANLDKVLSAYNKHRDKPIREQAENIIHLFTLTNLGAPAAFKYFDTTIDRKRYTSTKEVLDATLIHQSITGLYETRIDLSQLGGDGGGSSPAPGGGGGTLQLDDEYRLYSPLVKPDQNIQFWLEQFPQAWAETAGMGLAKQVPPQVIQLKASATPVSVRQYPLSKEAQEGIRPHVQRLIQQGILVPVQSPWNTPLLPVRKPGTNDYRPVQDLREVNKRVQDIHPTVPNPYNLLCALPPQRSWYTVLDLKDAFFCLRLHPTSQPLFAFEWRDPGTGRTGQLTWTRLPQGFKNSPTIFNEALHRDLANFRIQHPQVTLLQYVDDLLLAGATKQDCLEGTKALLLELSDLGYRASAKKAQICRREVTYLGYSLRDGQRWLTEARKKTVVQIPAPTTAKQVREFLGTAGFCRLWIPGFATLAAPLYPLTKPKGEFSWAPEHQKAFDAIKKALLSAPALALPDVTKPFTLYVDERKGVARGVLTQTLGPWRRPVAYLSKKLDPVASGWPVCLKAIAAVAILVKDADKLTLGQNITVIAPHALENIVRQPPDRWMTNARMTHYQSLLLTERVTFAPPAALNPATLLPEETDEPVTHDCHQLLIEETGVRKDLTDIPLTGEVLTWFTDGSSYVVEGKRMAGAAVVDGTRTIWASSLPEGTSAQKAELMALTQALRLAEGKSINIYTDSRYAFATAHVHGAIYKQRGWLTSAGREIKNKEEILSLLEALHLPKRLAIIHCPGHQKAKDPISRGNQMADRVAKQAAQGVNLLAGKRTADGSEFEKRTADGSEFESPKKKAKVE

SEQ ID NO: 380 - protein, 2087 aa, synthetic construct; identical to SEQ ID NO: 185

SEQ ID NO: 381 - protein, 2086 aa, synthetic construct; identical to SEQ ID NO: 152

SEQ ID NO: 382 - protein, 2088 aa, synthetic construct
MPAAKRVKLDGGDKKYSIGLDIGTNSVGWAVITDEYKVPSKKFKVLGNTDRHSIKKNLIGALLFDSGETAEATRLKRTARRRYTRRKNRICYLQEIFSNEMAKVDDSFFHRLEESFLVEEDKKHERHPIFGNIVDEVAYHEKYPTIYHLRKKLVDSTDKADLRLIYLALAHMIKFRGHFLIEGDLNPDNSDVDKLFIQLVQTYNQLFEENPINASGVDAKAILSARLSKSRRLENLIAQLPGEKKNGLFGNLIALSLGLTPNFKSNFDLAEDAKLQLSKDTYDDDLDNLLAQIGDQYADLFLAAKNLSDAILLSDILRVNTEITKAPLSASMIKRYDEHHQDLTLLKALVRQQLPEKYKEIFFDQSKNGYAGYIDGGASQEEFYKFIKPILEKMDGTEELLVKLNREDLLRKQRTFDNGSIPHQIHLGELHAILRRQEDFYPFLKDNREKIEKILTFRIPYYVGPLARGNSRFAWMTRKSEETITPWNFEEVVDKGASAQSFIERMTNFDKNLPNEKVLPKHSLLYEYFTVYNELTKVKYVTEGMRKPAFLSGEQKKAIVDLLFKTNRKVTVKQLKEDYFKKIECFDSVEISGVEDRFNASLGTYHDLLKIIKDKDFLDNEENEDILEDIVLTLTLFEDREMIEERLKTYAHLFDDKVMKQLKRRRYTGWGRLSRKLINGIRDKQSGKTILDFLKSDGFANRNFMQLIHDDSLTFKEDIQKAQVSGQGDSLHEHIANLAGSPAIKKGILQTVKVVDELVKVMGRHKPENIVIEMARENQTTQKGQKNSRERMKRIEEGIKELGSQILKEHPVENTQLQNEKLYLYYLQNGRDMYVDQELDINRLSDYDVDHIVPQSFLKDDSIDNKVLTRSDKARGKSDNVPSEEVVKKMKNYWRQLLNAKLITQRKFDNLTKAERGGLSELDKAGFIKRQLVETRQITKHVAQILDSRMNTKYDENDKLIREVKVITLKSKLVSDFRKDFQFYKVREINNYHHAHDAYLNAVVGTALIKKYPKLESEFVYGDYKVYDVRKMIAKSEQEIGKATAKYFFYSNIMNFFKTEITLANGEIRKRPLIETNGETGEIVWDKGRDFATVRKVLSMPQVNIVKKTEVQTGGFSKESILPKRNSDKLIARKKDWDPKKYGGFDSPTVAYSVLVVAKVEKGKSKKLKSVKELLGITIMERSSFEKNPIDFLEAKGYKEVKKDLIIKLPKYSLFELENGRKRMLASAGELQKGNELALPSKYVNFLYLASHYEKLKGSPEDNEQKQLFVEQHKHYLDEIIEQISEFSKRVILADANLDKVLSAYNKHRDKPIREQAENIIHLFTLTNLGAPAAFKYFDTTIDRKRYTSTKEVLDATLIHQSITGLYETRIDLSQLGGDGGPAPAPAPAPGGTLQLDDEYRLYSPLVKPDQNIQFWLEQFPQAWAETAGMGLAKQVPPQVIQLKASATPVSVRQYPLSKEAQEGIRPHVQRLIQQGILVPVQSPWNTPLLPVRKPGTNDYRPVQDLREVNKRVQDIHPTVPNPYNLLCALPPQRSWYTVLDLKDAFFCLRLHPTSQPLFAFEWRDPGTGRTGQLTWTRLPQGFKNSPTIFNEALHRDLANFRIQHPQVTLLQYVDDLLLAGATKQDCLEGTKALLLELSDLGYRASAKKAQICRREVTYLGYSLRDGQRWLTEARKKTVVQIPAPTTAKQVREFLGTAGFCRLWIPGFATLAAPLYPLTKPKGEFSWAPEHQKAFDAIKKALLSAPALALPDVTKPFTLYVDERKGVARGVLTQTLGPWRRPVAYLSKKLDPVASGWPVCLKAIAAVAILVKDADKLTLGQNITVIAPHALENIVRQPPDRWMTNARMTHYQSLLLTERVTFAPPAALNPATLLPEETDEPVTHDCHQLLIEETGVRKDLTDIPLTGEVLTWFTDGSSYVVEGKRMAGAAVVDGTRTIWASSLPEGTSAQKAELMALTQALRLAEGKSINIYTDSRYAFATAHVHGAIYKQRGWLTSAGREIKNKEEILSLLEALHLPKRLAIIHCPGHQKAKDPISRGNQMADRVAKQAAQGVNLLAGKRTADGSEFEKRTADGSEFESPKKKAKVE

SEQ ID NO: 383 - protein, 2085 aa, synthetic construct; identical to SEQ ID NO: 178

SEQ ID NO: 384 - protein, 2088 aa, synthetic construct; identical to SEQ ID NO: 144

SEQ ID NO: 385 - protein, 2090 aa, synthetic construct
MPAAKRVKLDGGDKKYSIGLDIGTNSVGWAVITDEYKVPSKKFKVLGNTDRHSIKKNLIGALLFDSGETAEATRLKRTARRRYTRRKNRICYLQEIFSNEMAKVDDSFFHRLEESFLVEEDKKHERHPIFGNIVDEVAYHEKYPTIYHLRKKLVDSTDKADLRLIYLALAHMIKFRGHFLIEGDLNPDNSDVDKLFIQLVQTYNQLFEENPINASGVDAKAILSARLSKSRRLENLIAQLPGEKKNGLFGNLIALSLGLTPNFKSNFDLAEDAKLQLSKDTYDDDLDNLLAQIGDQYADLFLAAKNLSDAILLSDILRVNTEITKAPLSASMIKRYDEHHQDLTLLKALVRQQLPEKYKEIFFDQSKNGYAGYIDGGASQEEFYKFIKPILEKMDGTEELLVKLNREDLLRKQRTFDNGSIPHQIHLGELHAILRRQEDFYPFLKDNREKIEKILTFRIPYYVGPLARGNSRFAWMTRKSEETITPWNFEEVVDKGASAQSFIERMTNFDKNLPNEKVLPKHSLLYEYFTVYNELTKVKYVTEGMRKPAFLSGEQKKAIVDLLFKTNRKVTVKQLKEDYFKKIECFDSVEISGVEDRFNASLGTYHDLLKIIKDKDFLDNEENEDILEDIVLTLTLFEDREMIEERLKTYAHLFDDKVMKQLKRRRYTGWGRLSRKLINGIRDKQSGKTILDFLKSDGFANRNFMQLIHDDSLTFKEDIQKAQVSGQGDSLHEHIANLAGSPAIKKGILQTVKVVDELVKVMGRHKPENIVIEMARENQTTQKGQKNSRERMKRIEEGIKELGSQILKEHPVENTQLQNEKLYLYYLQNGRDMYVDQELDINRLSDYDVDHIVPQSFLKDDSIDNKVLTRSDKARGKSDNVPSEEVVKKMKNYWRQLLNAKLITQRKFDNLTKAERGGLSELDKAGFIKRQLVETRQITKHVAQILDSRMNTKYDENDKLIREVKVITLKSKLVSDFRKDFQFYKVREINNYHHAHDAYLNAVVGTALIKKYPKLESEFVYGDYKVYDVRKMIAKSEQEIGKATAKYFFYSNIMNFFKTEITLANGEIRKRPLIETNGETGEIVWDKGRDFATVRKVLSMPQVNIVKKTEVQTGGFSKESILPKRNSDKLIARKKDWDPKKYGGFDSPTVAYSVLVVAKVEKGKSKKLKSVKELLGITIMERSSFEKNPIDFLEAKGYKEVKKDLIIKLPKYSLFELENGRKRMLASAGELQKGNELALPSKYVNFLYLASHYEKLKGSPEDNEQKQLFVEQHKHYLDEIIEQISEFSKRVILADANLDKVLSAYNKHRDKPIREQAENIIHLFTLTNLGAPAAFKYFDTTIDRKRYTSTKEVLDATLIHQSITGLYETRIDLSQLGGDGGPAPGSSEAAAKGGTLQLDDEYRLYSPLVKPDQNIQFWLEQFPQAWAETAGMGLAKQVPPQVIQLKASATPVSVRQYPLSKEAQEGIRPHVQRLIQQGILVPVQSPWNTPLLPVRKPGTNDYRPVQDLREVNKRVQDIHPTVPNPYNLLCALPPQRSWYTVLDLKDAFFCLRLHPTSQPLFAFEWRDPGTGRTGQLTWTRLPQGFKNSPTIFNEALHRDLANFRIQHPQVTLLQYVDDLLLAGATKQDCLEGTKALLLELSDLGYRASAKKAQICRREVTYLGYSLRDGQRWLTEARKKTVVQIPAPTTAKQVREFLGTAGFCRLWIPGFATLAAPLYPLTKPKGEFSWAPEHQKAFDAIKKALLSAPALALPDVTKPFTLYVDERKGVARGVLTQTLGPWRRPVAYLSKKLDPVASGWPVCLKAIAAVAILVKDADKLTLGQNITVIAPHALENIVRQPPDRWMTNARMTHYQSLLLTERVTFAPPAALNPATLLPEETDEPVTHDCHQLLIEETGVRKDLTDIPLTGEVLTWFTDGSSYVVEGKRMAGAAVVDGTRTIWASSLPEGTSAQKAELMALTQALRLAEGKSINIYTDSRYAFATAHVHGAIYKQRGWLTSAGREIKNKEEILSLLEALHLPKRLAIIHCPGHQKAKDPISRGNQMADRVAKQAAQGVNLLAGKRTADGSEFEKRTADGSEFESPKKKAKVE

SEQ ID NO: 386 - protein, 2085 aa, synthetic construct; identical to SEQ ID NO: 123

SEQ ID NO: 387 - protein, 2088 aa, synthetic construct; identical to SEQ ID NO: 155

SEQ ID NO: 388 - protein, 2088 aa, synthetic construct; identical to SEQ ID NO: 134

SEQ ID NO: 389 - protein, 2088 aa, synthetic construct; identical to SEQ ID NO: 171

SEQ ID NO: 390 - protein, 2090 aa, synthetic construct
MPAAKRVKLDGGDKKYSIGLDIGTNSVGWAVITDEYKVPSKKFKVLGNTDRHSIKKNLIGALLFDSGETAEATRLKRTARRRYTRRKNRICYLQEIFSNEMAKVDDSFFHRLEESFLVEEDKKHERHPIFGNIVDEVAYHEKYPTIYHLRKKLVDSTDKADLRLIYLALAHMIKFRGHFLIEGDLNPDNSDVDKLFIQLVQTYNQLFEENPINASGVDAKAILSARLSKSRRLENLIAQLPGEKKNGLFGNLIALSLGLTPNFKSNFDLAEDAKLQLSKDTYDDDLDNLLAQIGDQYADLFLAAKNLSDAILLSDILRVNTEITKAPLSASMIKRYDEHHQDLTLLKALVRQQLPEKYKEIFFDQSKNGYAGYIDGGASQEEFYKFIKPILEKMDGTEELLVKLNREDLLRKQRTFDNGSIPHQIHLGELHAILRRQEDFYPFLKDNREKIEKILTFRIPYYVGPLARGNSRFAWMTRKSEETITPWNFEEVVDKGASAQSFIERMTNFDKNLPNEKVLPKHSLLYEYFTVYNELTKVKYVTEGMRKPAFLSGEQKKAIVDLLFKTNRKVTVKQLKEDYFKKIECFDSVEISGVEDRFNASLGTYHDLLKIIKDKDFLDNEENEDILEDIVLTLTLFEDREMIEERLKTYAHLFDDKVMKQLKRRRYTGWGRLSRKLINGIRDKQSGKTILDFLKSDGFANRNFMQLIHDDSLTFKEDIQKAQVSGQGDSLHEHIANLAGSPAIKKGILQTVKVVDELVKVMGRHKPENIVIEMARENQTTQKGQKNSRERMKRIEEGIKELGSQILKEHPVENTQLQNEKLYLYYLQNGRDMYVDQELDINRLSDYDVDHIVPQSFLKDDSIDNKVLTRSDKARGKSDNVPSEEVVKKMKNYWRQLLNAKLITQRKFDNLTKAERGGLSELDKAGFIKRQLVETRQITKHVAQILDSRMNTKYDENDKLIREVKVITLKSKLVSDFRKDFQFYKVREINNYHHAHDAYLNAVVGTALIKKYPKLESEFVYGDYKVYDVRKMIAKSEQEIGKATAKYFFYSNIMNFFKTEITLANGEIRKRPLIETNGETGEIVWDKGRDFATVRKVLSMPQVNIVKKTEVQTGGFSKESILPKRNSDKLIARKKDWDPKKYGGFDSPTVAYSVLVVAKVEKGKSKKLKSVKELLGITIMERSSFEKNPIDFLEAKGYKEVKKDLIIKLPKYSLFELENGRKRMLASAGELQKGNELALPSKYVNFLYLASHYEKLKGSPEDNEQKQLFVEQHKHYLDEIIEQISEFSKRVILADANLDKVLSAYNKHRDKPIREQAENIIHLFTLTNLGAPAAFKYFDTTIDRKRYTSTKEVLDATLIHQSITGLYETRIDLSQLGGDGGEAAAKGSSPAPGGTLQLDDEYRLYSPLVKPDQNIQFWLEQFPQAWAETAGMGLAKQVPPQVIQLKASATPVSVRQYPLSKEAQEGIRPHVQRLIQQGILVPVQSPWNTPLLPVRKPGTNDYRPVQDLREVNKRVQDIHPTVPNPYNLLCALPPQRSWYTVLDLKDAFFCLRLHPTSQPLFAFEWRDPGTGRTGQLTWTRLPQGFKNSPTIFNEALHRDLANFRIQHPQVTLLQYVDDLLLAGATKQDCLEGTKALLLELSDLGYRASAKKAQICRREVTYLGYSLRDGQRWLTEARKKTVVQIPAPTTAKQVREFLGTAGFCRLWIPGFATLAAPLYPLTKPKGEFSWAPEHQKAFDAIKKALLSAPALALPDVTKPFTLYVDERKGVARGVLTQTLGPWRRPVAYLSKKLDPVASGWPVCLKAIAAVAILVKDADKLTLGQNITVIAPHALENIVRQPPDRWMTNARMTHYQSLLLTERVTFAPPAALNPATLLPEETDEPVTHDCHQLLIEETGVRKDLTDIPLTGEVLTWFTDGSSYVVEGKRMAGAAVVDGTRTIWASSLPEGTSAQKAELMALTQALRLAEGKSINIYTDSRYAFATAHVHGAIYKQRGWLTSAGREIKNKEEILSLLEALHLPKRLAIIHCPGHQKAKDPISRGNQMADRVAKQAAQGVNLLAGKRTADGSEFEKRTADGSEFESPKKKAKVE

SEQ ID NO: 391 - protein, 2094 aa, synthetic construct; identical to SEQ ID NO: 159

SEQ ID NO: 392 - protein, 2084 aa, synthetic construct; identical to SEQ ID NO: 147

SEQ ID NO: 393 - protein, 2085 aa, synthetic construct; identical to SEQ ID NO: 174

SEQ ID NO: 394 - protein, 2087 aa, synthetic construct
MPAAKRVKLDGGDKKYSIGLDIGTNSVGWAVITDEYKVPSKKFKVLGNTDRHSIKKNLIGALLFDSGETAEATRLKRTARRRYTRRKNRICYLQEIFSNEMAKVDDSFFHRLEESFLVEEDKKHERHPIFGNIVDEVAYHEKYPTIYHLRKKLVDSTDKADLRLIYLALAHMIKFRGHFLIEGDLNPDNSDVDKLFIQLVQTYNQLFEENPINASGVDAKAILSARLSKSRRLENLIAQLPGEKKNGLFGNLIALSLGLTPNFKSNFDLAEDAKLQLSKDTYDDDLDNLLAQIGDQYADLFLAAKNLSDAILLSDILRVNTEITKAPLSASMIKRYDEHHQDLTLLKALVRQQLPEKYKEIFFDQSKNGYAGYIDGGASQEEFYKFIKPILEKMDGTEELLVKLNREDLLRKQRTFDNGSIPHQIHLGELHAILRRQEDFYPFLKDNREKIEKILTFRIPYYVGPLARGNSRFAWMTRKSEETITPWNFEEVVDKGASAQSFIERMTNFDKNLPNEKVLPKHSLLYEYFTVYNELTKVKYVTEGMRKPAFLSGEQKKAIVDLLFKTNRKVTVKQLKEDYFKKIECFDSVEISGVEDRFNASLGTYHDLLKIIKDKDFLDNEENEDILEDIVLTLTLFEDREMIEERLKTYAHLFDDKVMKQLKRRRYTGWGRLSRKLINGIRDKQSGKTILDFLKSDGFANRNFMQLIHDDSLTFKEDIQKAQVSGQGDSLHEHIANLAGSPAIKKGILQTVKVVDELVKVMGRHKPENIVIEMARENQTTQKGQKNSRERMKRIEEGIKELGSQILKEHPVENTQLQNEKLYLYYLQNGRDMYVDQELDINRLSDYDVDHIVPQSFLKDDSIDNKVLTRSDKARGKSDNVPSEEVVKKMKNYWRQLLNAKLITQRKFDNLTKAERGGLSELDKAGFIKRQLVETRQITKHVAQILDSRMNTKYDENDKLIREVKVITLKSKLVSDFRKDFQFYKVREINNYHHAHDAYLNAVVGTALIKKYPKLESEFVYGDYKVYDVRKMIAKSEQEIGKATAKYFFYSNIMNFFKTEITLANGEIRKRPLIETNGETGEIVWDKGRDFATVRKVLSMPQVNIVKKTEVQTGGFSKESILPKRNSDKLIARKKDWDPKKYGGFDSPTVAYSVLVVAKVEKGKSKKLKSVKELLGITIMERSSFEKNPIDFLEAKGYKEVKKDLIIKLPKYSLFELENGRKRMLASAGELQKGNELALPSKYVNFLYLASHYEKLKGSPEDNEQKQLFVEQHKHYLDEIIEQISEFSKRVILADANLDKVLSAYNKHRDKPIREQAENIIHLFTLTNLGAPAAFKYFDTTIDRKRYTSTKEVLDATLIHQSITGLYETRIDLSQLGGDGGGGSEAAAKGGTLQLDDEYRLYSPLVKPDQNIQFWLEQFPQAWAETAGMGLAKQVPPQVIQLKASATPVSVRQYPLSKEAQEGIRPHVQRLIQQGILVPVQSPWNTPLLPVRKPGTNDYRPVQDLREVNKRVQDIHPTVPNPYNLLCALPPQRSWYTVLDLKDAFFCLRLHPTSQPLFAFEWRDPGTGRTGQLTWTRLPQGFKNSPTIFNEALHRDLANFRIQHPQVTLLQYVDDLLLAGATKQDCLEGTKALLLELSDLGYRASAKKAQICRREVTYLGYSLRDGQRWLTEARKKTVVQIPAPTTAKQVREFLGTAGFCRLWIPGFATLAAPLYPLTKPKGEFSWAPEHQKAFDAIKKALLSAPALALPDVTKPFTLYVDERKGVARGVLTQTLGPWRRPVAYLSKKLDPVASGWPVCLKAIAAVAILVKDADKLTLGQNITVIAPHALENIVRQPPDRWMTNARMTHYQSLLLTERVTFAPPAALNPATLLPEETDEPVTHDCHQLLIEETGVRKDLTDIPLTGEVLTWFTDGSSYVVEGKRMAGAAVVDGTRTIWASSLPEGTSAQKAELMALTQALRLAEGKSINIYTDSRYAFATAHVHGAIYKQRGWLTSAGREIKNKEEILSLLEALHLPKRLAIIHCPGHQKAKDPISRGNQMADRVAKQAAQGVNLLAGKRTADGSEFEKRTADGSEFESPKKKAKVE

SEQ ID NO: 395 - protein, 2088 aa, synthetic construct; identical to SEQ ID NO: 180

SEQ ID NO: 396 - protein, 2097 aa, synthetic construct; identical to SEQ ID NO: 113

SEQ ID NO: 397 - protein, 2085 aa, synthetic construct; identical to SEQ ID NO: 184

SEQ ID NO: 398 - protein, 2090 aa, synthetic construct; identical to SEQ ID NO: 119

SEQ ID NO: 399 - protein, 2089 aa, synthetic construct
MPAAKRVKLDGGDKKYSIGLDIGTNSVGWAVITDEYKVPSKKFKVLGNTDRHSIKKNLIGALLFDSGETAEATRLKRTARRRYTRRKNRICYLQEIFSNEMAKVDDSFFHRLEESFLVEEDKKHERHPIFGNIVDEVAYHEKYPTIYHLRKKLVDSTDKADLRLIYLALAHMIKFRGHFLIEGDLNPDNSDVDKLFIQLVQTYNQLFEENPINASGVDAKAILSARLSKSRRLENLIAQLPGEKKNGLFGNLIALSLGLTPNFKSNFDLAEDAKLQLSKDTYDDDLDNLLAQIGDQYADLFLAAKNLSDAILLSDILRVNTEITKAPLSASMIKRYDEHHQDLTLLKALVRQQLPEKYKEIFFDQSKNGYAGYIDGGASQEEFYKFIKPILEKMDGTEELLVKLNREDLLRKQRTFDNGSIPHQIHLGELHAILRRQEDFYPFLKDNREKIEKILTFRIPYYVGPLARGNSRFAWMTRKSEETITPWNFEEVVDKGASAQSFIERMTNFDKNLPNEKVLPKHSLLYEYFTVYNELTKVKYVTEGMRKPAFLSGEQKKAIVDLLFKTNRKVTVKQLKEDYFKKIECFDSVEISGVEDRFNASLGTYHDLLKIIKDKDFLDNEENEDILEDIVLTLTLFEDREMIEERLKTYAHLFDDKVMKQLKRRRYTGWGRLSRKLINGIRDKQSGKTILDFLKSDGFANRNFMQLIHDDSLTFKEDIQKAQVSGQGDSLHEHIANLAGSPAIKKGILQTVKVVDELVKVMGRHKPENIVIEMARENQTTQKGQKNSRERMKRIEEGIKELGSQILKEHPVENTQLQNEKLYLYYLQNGRDMYVDQELDINRLSDYDVDHIVPQSFLKDDSIDNKVLTRSDKARGKSDNVPSEEVVKKMKNYWRQLLNAKLITQRKFDNLTKAERGGLSELDKAGFIKRQLVETRQITKHVAQILDSRMNTKYDENDKLIREVKVITLKSKLVSDFRKDFQFYKVREINNYHHAHDAYLNAVVGTALIKKYPKLESEFVYGDYKVYDVRKMIAKSEQEIGKATAKYFFYSNIMNFFKTEITLANGEIRKRPLIETNGETGEIVWDKGRDFATVRKVLSMPQVNIVKKTEVQTGGFSKESILPKRNSDKLIARKKDWDPKKYGGFDSPTVAYSVLVVAKVEKGKSKKLKSVKELLGITIMERSSFEKNPIDFLEAKGYKEVKKDLIIKLPKYSLFELENGRKRMLASAGELQKGNELALPSKYVNFLYLASHYEKLKGSPEDNEQKQLFVEQHKHYLDEIIEQISEFSKRVILADANLDKVLSAYNKHRDKPIREQAENIIHLFTLTNLGAPAAFKYFDTTIDRKRYTSTKEVLDATLIHQSITGLYETRIDLSQLGGDGGEAAAKEAAAKGGTLQLDDEYRLYSPLVKPDQNIQFWLEQFPQAWAETAGMGLAKQVPPQVIQLKASATPVSVRQYPLSKEAQEGIRPHVQRLIQQGILVPVQSPWNTPLLPVRKPGTNDYRPVQDLREVNKRVQDIHPTVPNPYNLLCALPPQRSWYTVLDLKDAFFCLRLHPTSQPLFAFEWRDPGTGRTGQLTWTRLPQGFKNSPTIFNEALHRDLANFRIQHPQVTLLQYVDDLLLAGATKQDCLEGTKALLLELSDLGYRASAKKAQICRREVTYLGYSLRDGQRWLTEARKKTVVQIPAPTTAKQVREFLGTAGFCRLWIPGFATLAAPLYPLTKPKGEFSWAPEHQKAFDAIKKALLSAPALALPDVTKPFTLYVDERKGVARGVLTQTLGPWRRPVAYLSKKLDPVASGWPVCLKAIAAVAILVKDADKLTLGQNITVIAPHALENIVRQPPDRWMTNARMTHYQSLLLTERVTFAPPAALNPATLLPEETDEPVTHDCHQLLIEETGVRKDLTDIPLTGEVLTWFTDGSSYVVEGKRMAGAAVVDGTRTIWASSLPEGTSAQKAELMALTQALRLAEGKSINIYTDSRYAFATAHVHGAIYKQRGWLTSAGREIKNKEEILSLLEALHLPKRLAIIHCPGHQKAKDPISRGNQMADRVAKQAAQGVNLLAGKRTADGSEFEKRTADGSEFESPKKKAKVE

SEQ ID NO: 400 - protein, 2088 aa, synthetic construct; identical to SEQ ID NO: 129

SEQ ID NO: 401 - protein, 2088 aa, synthetic construct
MPAAKRVKLDGGDKKYSIGLDIGTNSVGWAVITDEYKVPSKKFKVLGNTDRHSIKKNLIGALLFDSGETAEATRLKRTARRRYTRRKNRICYLQEIFSNEMAKVDDSFFHRLEESFLVEEDKKHERHPIFGNIVDEVAYHEKYPTIYHLRKKLVDSTDKADLRLIYLALAHMIKFRGHFLIEGDLNPDNSDVDKLFIQLVQTYNQLFEENPINASGVDAKAILSARLSKSRRLENLIAQLPGEKKNGLFGNLIALSLGLTPNFKSNFDLAEDAKLQLSKDTYDDDLDNLLAQIGDQYADLFLAAKNLSDAILLSDILRVNTEITKAPLSASMIKRYDEHHQDLTLLKALVRQQLPEKYKEIFFDQSKNGYAGYIDGGASQEEFYKFIKPILEKMDGTEELLVKLNREDLLRKQRTFDNGSIPHQIHLGELHAILRRQEDFYPFLKDNREKIEKILTFRIPYYVGPLARGNSRFAWMTRKSEETITPWNFEEVVDKGASAQSFIERMTNFDKNLPNEKVLPKHSLLYEYFTVYNELTKVKYVTEGMRKPAFLSGEQKKAIVDLLFKTNRKVTVKQLKEDYFKKIECFDSVEISGVEDRFNASLGTYHDLLKIIKDKDFLDNEENEDILEDIVLTLTLFEDREMIEERLKTYAHLFDDKVMKQLKRRRYTGWGRLSRKLINGIRDKQSGKTILDFLKSDGFANRNFMQLIHDDSLTFKEDIQKAQVSGQGDSLHEHIANLAGSPAIKKGILQTVKVVDELVKVMGRHKPENIVIEMARENQTTQKGQKNSRERMKRIEEGIKELGSQILKEHPVENTQLQNEKLYLYYLQNGRDMYVDQELDINRLSDYDVDHIVPQSFLKDDSIDNKVLTRSDKARGKSDNVPSEEVVKKMKNYWRQLLNAKLITQRKFDNLTKAERGGLSELDKAGFIKRQLVETRQITKHVAQILDSRMNTKYDENDKLIREVKVITLKSKLVSDFRKDFQFYKVREINNYHHAHDAYLNAVVGTALIKKYPKLESEFVYGDYKVYDVRKMIAKSEQEIGKATAKYFFYSNIMNFFKTEITLANGEIRKRPLIETNGETGEIVWDKGRDFATVRKVLSMPQVNIVKKTEVQTGGFSKESILPKRNSDKLIARKKDWDPKKYGGFDSPTVAYSVLVVAKVEKGKSKKLKSVKELLGITIMERSSFEKNPIDFLEAKGYKEVKKDLIIKLPKYSLFELENGRKRMLASAGELQKGNELALPSKYVNFLYLASHYEKLKGSPEDNEQKQLFVEQHKHYLDEIIEQISEFSKRVILADANLDKVLSAYNKHRDKPIREQAENIIHLFTLTNLGAPAAFKYFDTTIDRKRYTSTKEVLDATLIHQSITGLYETRIDLSQLGGDGGGSSGGSPAPGGTLQLDDEYRLYSPLVKPDQNIQFWLEQFPQAWAETAGMGLAKQVPPQVIQLKASATPVSVRQYPLSKEAQEGIRPHVQRLIQQGILVPVQSPWNTPLLPVRKPGTNDYRPVQDLREVNKRVQDIHPTVPNPYNLLCALPPQRSWYTVLDLKDAFFCLRLHPTSQPLFAFEWRDPGTGRTGQLTWTRLPQGFKNSPTIFNEALHRDLANFRIQHPQVTLLQYVDDLLLAGATKQDCLEGTKALLLELSDLGYRASAKKAQICRREVTYLGYSLRDGQRWLTEARKKTVVQIPAPTTAKQVREFLGTAGFCRLWIPGFATLAAPLYPLTKPKGEFSWAPEHQKAFDAIKKALLSAPALALPDVTKPFTLYVDERKGVARGVLTQTLGPWRRPVAYLSKKLDPVASGWPVCLKAIAAVAILVKDADKLTLGQNITVIAPHALENIVRQPPDRWMTNARMTHYQSLLLTERVTFAPPAALNPATLLPEETDEPVTHDCHQLLIEETGVRKDLTDIPLTGEVLTWFTDGSSYVVEGKRMAGAAVVDGTRTIWASSLPEGTSAQKAELMALTQALRLAEGKSINIYTDSRYAFATAHVHGAIYKQRGWLTSAGREIKNKEEILSLLEALHLPKRLAIIHCPGHQKAKDPISRGNQMADRVAKQAAQGVNLLAGKRTADGSEFEKRTADGSEFESPKKKAKVE

SEQ ID NO: 402 - protein, 2088 aa, synthetic construct
MPAAKRVKLDGGDKKYSIGLDIGTNSVGWAVITDEYKVPSKKFKVLGNTDRHSIKKNLIGALLFDSGETAEATRLKRTARRRYTRRKNRICYLQEIFSNEMAKVDDSFFHRLEESFLVEEDKKHERHPIFGNIVDEVAYHEKYPTIYHLRKKLVDSTDKADLRLIYLALAHMIKFRGHFLIEGDLNPDNSDVDKLFIQLVQTYNQLFEENPINASGVDAKAILSARLSKSRRLENLIAQLPGEKKNGLFGNLIALSLGLTPNFKSNFDLAEDAKLQLSKDTYDDDLDNLLAQIGDQYADLFLAAKNLSDAILLSDILRVNTEITKAPLSASMIKRYDEHHQDLTLLKALVRQQLPEKYKEIFFDQSKNGYAGYIDGGASQEEFYKFIKPILEKMDGTEELLVKLNREDLLRKQRTFDNGSIPHQIHLGELHAILRRQEDFYPFLKDNREKIEKILTFRIPYYVGPLARGNSRFAWMTRKSEETITPWNFEEVVDKGASAQSFIERMTNFDKNLPNEKVLPKHSLLYEYFTVYNELTKVKYVTEGMRKPAFLSGEQKKAIVDLLFKTNRKVTVKQLKEDYFKKIECFDSVEISGVEDRFNASLGTYHDLLKIIKDKDFLDNEENEDILEDIVLTLTLFEDREMIEERLKTYAHLFDDKVMKQLKRRRYTGWGRLSRKLINGIRDKQSGKTILDFLKSDGFANRNFMQLIHDDSLTFKEDIQKAQVSGQGDSLHEHIANLAGSPAIKKGILQTVKVVDELVKVMGRHKPENIVIEMARENQTTQKGQKNSRERMKRIEEGIKELGSQILKEHPVENTQLQNEKLYLYYLQNGRDMYVDQELDINRLSDYDVDHIVPQSFLKDDSIDNKVLTRSDKARGKSDNVPSEEVVKKMKNYWRQLLNAKLITQRKFDNLTKAERGGLSELDKAGFIKRQLVETRQITKHVAQILDSRMNTKYDENDKLIREVKVITLKSKLVSDFRKDFQFYKVREINNYHHAHDAYLNAVVGTALIKKYPKLESEFVYGDYKVYDVRKMIAKSEQEIGKATAKYFFYSNIMNFFKTEITLANGEIRKRPLIETNGETGEIVWDKGRDFATVRKVLSMPQVNIVKKTEVQTGGFSKESILPKRNSDKLIARKKDWDPKKYGGFDSPTVAYSVLVVAKVEKGKSKKLKSVKELLGITIMERSSFEKNPIDFLEAKGYKEVKKDLIIKLPKYSLFELENGRKRMLASAGELQKGNELALPSKYVNFLYLASHYEKLKGSPEDNEQKQLFVEQHKHYLDEIIEQISEFSKRVILADANLDKVLSAYNKHRDKPIREQAENIIHLFTLTNLGAPAAFKYFDTTIDRKRYTSTKEVLDATLIHQSITGLYETRIDLSQLGGDGGGGGGGSPAPGGTLQLDDEYRLYSPLVKPDQNIQFWLEQFPQAWAETAGMGLAKQVPPQVIQLKASATPVSVRQYPLSKEAQEGIRPHVQRLIQQGILVPVQSPWNTPLLPVRKPGTNDYRPVQDLREVNKRVQDIHPTVPNPYNLLCALPPQRSWYTVLDLKDAFFCLRLHPTSQPLFAFEWRDPGTGRTGQLTWTRLPQGFKNSPTIFNEALHRDLANFRIQHPQVTLLQYVDDLLLAGATKQDCLEGTKALLLELSDLGYRASAKKAQICRREVTYLGYSLRDGQRWLTEARKKTVVQIPAPTTAKQVREFLGTAGFCRLWIPGFATLAAPLYPLTKPKGEFSWAPEHQKAFDAIKKALLSAPALALPDVTKPFTLYVDERKGVARGVLTQTLGPWRRPVAYLSKKLDPVASGWPVCLKAIAAVAILVKDADKLTLGQNITVIAPHALENIVRQPPDRWMTNARMTHYQSLLLTERVTFAPPAALNPATLLPEETDEPVTHDCHQLLIEETGVRKDLTDIPLTGEVLTWFTDGSSYVVEGKRMAGAAVVDGTRTIWASSLPEGTSAQKAELMALTQALRLAEGKSINIYTDSRYAFATAHVHGAIYKQRGWLTSAGREIKNKEEILSLLEALHLPKRLAIIHCPGHQKAKDPISRGNQMADRVAKQAAQGVNLLAGKRTADGSEFEKRTADGSEFESPKKKAKVE

SEQ ID NO: 403 - protein, 2088 aa, synthetic construct; identical to SEQ ID NO: 130

SEQ ID NO: 404 - protein, 2094 aa, synthetic construct; identical to SEQ ID NO: 161

SEQ ID NO: 405 - protein, 2085 aa, synthetic construct
MPAAKRVKLDGGDKKYSIGLDIGTNSVGWAVITDEYKVPSKKFKVLGNTDRHSIKKNLIGALLFDSGETAEATRLKRTARRRYTRRKNRICYLQEIFSNEMAKVDDSFFHRLEESFLVEEDKKHERHPIFGNIVDEVAYHEKYPTIYHLRKKLVDSTDKADLRLIYLALAHMIKFRGHFLIEGDLNPDNSDVDKLFIQLVQTYNQLFEENPINASGVDAKAILSARLSKSRRLENLIAQLPGEKKNGLFGNLIALSLGLTPNFKSNFDLAEDAKLQLSKDTYDDDLDNLLAQIGDQYADLFLAAKNLSDAILLSDILRVNTEITKAPLSASMIKRYDEHHQDLTLLKALVRQQLPEKYKEIFFDQSKNGYAGYIDGGASQEEFYKFIKPILEKMDGTEELLVKLNREDLLRKQRTFDNGSIPHQIHLGELHAILRRQEDFYPFLKDNREKIEKILTFRIPYYVGPLARGNSRFAWMTRKSEETITPWNFEEVVDKGASAQSFIERMTNFDKNLPNEKVLPKHSLLYEYFTVYNELTKVKYVTEGMRKPAFLSGEQKKAIVDLLFKTNRKVTVKQLKEDYFKKIECFDSVEISGVEDRFNASLGTYHDLLKIIKDKDFLDNEENEDILEDIVLTLTLFEDREMIEERLKTYAHLFDDKVMKQLKRRRYTGWGRLSRKLINGIRDKQSGKTILDFLKSDGFANRNFMQLIHDDSLTFKEDIQKAQVSGQGDSLHEHIANLAGSPAIKKGILQTVKVVDELVKVMGRHKPENIVIEMARENQTTQKGQKNSRERMKRIEEGIKELGSQILKEHPVENTQLQNEKLYLYYLQNGRDMYVDQELDINRLSDYDVDHIVPQSFLKDDSIDNKVLTRSDKARGKSDNVPSEEVVKKMKNYWRQLLNAKLITQRKFDNLTKAERGGLSELDKAGFIKRQLVETRQITKHVAQILDSRMNTKYDENDKLIREVKVITLKSKLVSDFRKDFQFYKVREINNYHHAHDAYLNAVVGTALIKKYPKLESEFVYGDYKVYDVRKMIAKSEQEIGKATAKYFFYSNIMNFFKTEITLANGEIRKRPLIETNGETGEIVWDKGRDFATVRKVLSMPQVNIVKKTEVQTGGFSKESILPKRNSDKLIARKKDWDPKKYGGFDSPTVAYSVLVVAKVEKGKSKKLKSVKELLGITIMERSSFEKNPIDFLEAKGYKEVKKDLIIKLPKYSLFELENGRKRMLASAGELQKGNELALPSKYVNFLYLASHYEKLKGSPEDNEQKQLFVEQHKHYLDEIIEQISEFSKRVILADANLDKVLSAYNKHRDKPIREQAENIIHLFTLTNLGAPAAFKYFDTTIDRKRYTSTKEVLDATLIHQSITGLYETRIDLSQLGGDGGGGGGSSGGTLQLDDEYRLYSPLVKPDQNIQFWLEQFPQAWAETAGMGLAKQVPPQVIQLKASATPVSVRQYPLSKEAQEGIRPHVQRLIQQGILVPVQSPWNTPLLPVRKPGTNDYRPVQDLREVNKRVQDIHPTVPNPYNLLCALPPQRSWYTVLDLKDAFFCLRLHPTSQPLFAFEWRDPGTGRTGQLTWTRLPQGFKNSPTIFNEALHRDLANFRIQHPQVTLLQYVDDLLLAGATKQDCLEGTKALLLELSDLGYRASAKKAQICRREVTYLGYSLRDGQRWLTEARKKTVVQIPAPTTAKQVREFLGTAGFCRLWIPGFATLAAPLYPLTKPKGEFSWAPEHQKAFDAIKKALLSAPALALPDVTKPFTLYVDERKGVARGVLTQTLGPWRRPVAYLSKKLDPVASGWPVCLKAIAAVAILVKDADKLTLGQNITVIAPHALENIVRQPPDRWMTNARMTHYQSLLLTERVTFAPPAALNPATLLPEETDEPVTHDCHQLLIEETGVRKDLTDIPLTGEVLTWFTDGSSYVVEGKRMAGAAVVDGTRTIWASSLPEGTSAQKAELMALTQALRLAEGKSINIYTDSRYAFATAHVHGAIYKQRGWLTSAGREIKNKEEILSLLEALHLPKRLAIIHCPGHQKAKDPISRGNQMADRVAKQAAQGVNLLAGKRTADGSEFEKRTADGSEFESPKKKAKVE

SEQ ID NO: 406 - protein, 2088 aa, synthetic construct; identical to SEQ ID NO: 182

SEQ ID NO: 407 - protein, 2211 aa, synthetic construct
MPAAKRVKLDGGDKKYSIGLDIGTNSVGWAVITDEYKVPSKKFKVLGNTDRHSIKKNLIGALLFDSGETAEATRLKRTARRRYTRRKNRICYLQEIFSNEMAKVDDSFFHRLEESFLVEEDKKHERHPIFGNIVDEVAYHEKYPTIYHLRKKLVDSTDKADLRLIYLALAHMIKFRGHFLIEGDLNPDNSDVDKLFIQLVQTYNQLFEENPINASGVDAKAILSARLSKSRRLENLIAQLPGEKKNGLFGNLIALSLGLTPNFKSNFDLAEDAKLQLSKDTYDDDLDNLLAQIGDQYADLFLAAKNLSDAILLSDILRVNTEITKAPLSASMIKRYDEHHQDLTLLKALVRQQLPEKYKEIFFDQSKNGYAGYIDGGASQEEFYKFIKPILEKMDGTEELLVKLNREDLLRKQRTFDNGSIPHQIHLGELHAILRRQEDFYPFLKDNREKIEKILTFRIPYYVGPLARGNSRFAWMTRKSEETITPWNFEEVVDKGASAQSFIERMTNFDKNLPNEKVLPKHSLLYEYFTVYNELTKVKYVTEGMRKPAFLSGEQKKAIVDLLFKTNRKVTVKQLKEDYFKKIECFDSVEISGVEDRFNASLGTYHDLLKIIKDKDFLDNEENEDILEDIVLTLTLFEDREMIEERLKTYAHLFDDKVMKQLKRRRYTGWGRLSRKLINGIRDKQSGKTILDFLKSDGFANRNFMQLIHDDSLTFKEDIQKAQVSGQGDSLHEHIANLAGSPAIKKGILQTVKVVDELVKVMGRHKPENIVIEMARENQTTQKGQKNSRERMKRIEEGIKELGSQILKEHPVENTQLQNEKLYLYYLQNGRDMYVDQELDINRLSDYDVDHIVPQSFLKDDSIDNKVLTRSDKARGKSDNVPSEEVVKKMKNYWRQLLNAKLITQRKFDNLTKAERGGLSELDKAGFIKRQLVETRQITKHVAQILDSRMNTKYDENDKLIREVKVITLKSKLVSDFRKDFQFYKVREINNYHHAHDAYLNAVVGTALIKKYPKLESEFVYGDYKVYDVRKMIAKSEQEIGKATAKYFFYSNIMNFFKTEITLANGEIRKRPLIETNGETGEIVWDKGRDFATVRKVLSMPQVNIVKKTEVQTGGFSKESILPKRNSDKLIARKKDWDPKKYGGFDSPTVAYSVLVVAKVEKGKSKKLKSVKELLGITIMERSSFEKNPIDFLEAKGYKEVKKDLIIKLPKYSLFELENGRKRMLASAGELQKGNELALPSKYVNFLYLASHYEKLKGSPEDNEQKQLFVEQHKHYLDEIIEQISEFSKRVILADANLDKVLSAYNKHRDKPIREQAENIIHLFTLTNLGAPAAFKYFDTTIDRKRYTSTKEVLDATLIHQSITGLYETRIDLSQLGGDGGAEAAAKEAAAKEAAAKEAAAKALEAEAAAKEAAAKEAAAKEAAAKAGGMDPLQLLQPLEAEIKGTKLKAHWNSGATITCVPEAFLEDERPIQTMLIKTIHGEKQQDVYYLTFKVQGRKVEAEVLASPYDYILLNPSDVPWLMKKPLQLTVLVPLHEYQERLLQQTALPKEQKELLQKLFLKYDALWQHWENQVGHRRIKPHNIATGTLAPRPQKQYPINPKAKPSIQIVIDDLLKQGVLIQQNSTMNTPVYPVPKPDGKWRMVLDYREVNKTIPLIAAQNQHSAGILSSIYRGKYKTTLDLTNGFWAHPITPESYWLTAFTWQGKQYCWTRLPQGFLNSPALFTADVVDLLKEIPNVQAYVDDIYISHDDPQEHLEQLEKIFSILLNAGYVVSLKKSEIAQREVEFLGFNITKEGRGLTDTFKQKLLNITPPKDLKQLQSILGLLNFARNFIPNYSELVKPLYTIVANANGKFISWTEDNSNQLQHIISVLNQADNLEERNPETRLIIKVNSSPSAGYIRYYNEGSKRPIMYVNYIFSKAEAKFTQTEKLLTTMHKGLIKAMDLAMGQEILVYSPIVSMTKIQRTPLPERKALPVRWITWMTYLEDPRIQFHYDKSLPELQQIPNVTEDVIAKTKHPSEFAMVFYTDGSAIKHPDVNKSHSAGMGIAQVQFIPEYKIVHQWSIPLGDHTAQLAEIAAVEFACKKALKISGPVLIVTDSFYVAESANKELPYWKSNGFLNNKKKPLRHVSKWKSIAECLQLKPDIIIMHEKGHQQPMTTLHTEGNNLADKLATQGSYVVHAGKRTADGSEFEKRTADGSEFESPKKKAKVE

SEQ ID NO: 408 - protein, 2198 aa, synthetic construct
MPAAKRVKLDGGDKKYSIGLDIGTNSVGWAVITDEYKVPSKKFKVLGNTDRHSIKKNLIGALLFDSGETAEATRLKRTARRRYTRRKNRICYLQEIFSNEMAKVDDSFFHRLEESFLVEEDKKHERHPIFGNIVDEVAYHEKYPTIYHLRKKLVDSTDKADLRLIYLALAHMIKFRGHFLIEGDLNPDNSDVDKLFIQLVQTYNQLFEENPINASGVDAKAILSARLSKSRRLENLIAQLPGEKKNGLFGNLIALSLGLTPNFKSNFDLAEDAKLQLSKDTYDDDLDNLLAQIGDQYADLFLAAKNLSDAILLSDILRVNTEITKAPLSASMIKRYDEHHQDLTLLKALVRQQLPEKYKEIFFDQSKNGYAGYIDGGASQEEFYKFIKPILEKMDGTEELLVKLNREDLLRKQRTFDNGSIPHQIHLGELHAILRRQEDFYPFLKDNREKIEKILTFRIPYYVGPLARGNSRFAWMTRKSEETITPWNFEEVVDKGASAQSFIERMTNFDKNLPNEKVLPKHSLLYEYFTVYNELTKVKYVTEGMRKPAFLSGEQKKAIVDLLFKTNRKVTVKQLKEDYFKKIECFDSVEISGVEDRFNASLGTYHDLLKIIKDKDFLDNEENEDILEDIVLTLTLFEDREMIEERLKTYAHLFDDKVMKQLKRRRYTGWGRLSRKLINGIRDKQSGKTILDFLKSDGFANRNFMQLIHDDSLTFKEDIQKAQVSGQGDSLHEHIANLAGSPAIKKGILQTVKVVDELVKVMGRHKPENIVIEMARENQTTQKGQKNSRERMKRIEEGIKELGSQILKEHPVENTQLQNEKLYLYYLQNGRDMYVDQELDINRLSDYDVDHIVPQSFLKDDSIDNKVLTRSDKARGKSDNVPSEEVVKKMKNYWRQLLNAKLITQRKFDNLTKAERGGLSELDKAGFIKRQLVETRQITKHVAQILDSRMNTKYDENDKLIREVKVITLKSKLVSDFRKDFQFYKVREINNYHHAHDAYLNAVVGTALIKKYPKLESEFVYGDYKVYDVRKMIAKSEQEIGKATAKYFFYSNIMNFFKTEITLANGEIRKRPLIETNGETGEIVWDKGRDFATVRKVLSMPQVNIVKKTEVQTGGFSKESILPKRNSDKLIARKKDWDPKKYGGFDSPTVAYSVLVVAKVEKGKSKKLKSVKELLGITIMERSSFEKNPIDFLEAKGYKEVKKDLIIKLPKYSLFELENGRKRMLASAGELQKGNELALPSKYVNFLYLASHYEKLKGSPEDNEQKQLFVEQHKHYLDEIIEQISEFSKRVILADANLDKVLSAYNKHRDKPIREQAENIIHLFTLTNLGAPAAFKYFDTTIDRKRYTSTKEVLDATLIHQSITGLYETRIDLSQLGGDGGSGGSSGGSSGSETPGTSESATPESSGGSSGGSSGGMDPLQLLQPLEAEIKGTKLKAHWNSGATITCVPEAFLEDERPIQTMLIKTIHGEKQQDVYYLTFKVQGRKVEAEVLASPYDYILLNPSDVPWLMKKPLQLTVLVPLHEYQERLLQQTALPKEQKELLQKLFLKYDALWQHWENQVGHRRIKPHNIATGTLAPRPQKQYPINPKAKPSIQIVIDDLLKQGVLIQQNSTMNTPVYPVPKPDGKWRMVLDYREVNKTIPLIAAQNQHSAGILSSIYRGKYKTTLDLTNGFWAHPITPESYWLTAFTWQGKQYCWTRLPQGFLNSPALFTADVVDLLKEIPNVQAYVDDIYISHDDPQEHLEQLEKIFSILLNAGYVVSLKKSEIAQREVEFLGFNITKEGRGLTDTFKQKLLNITPPKDLKQLQSILGLLNFARNFIPNYSELVKPLYTIVANANGKFISWTEDNSNQLQHIISVLNQADNLEERNPETRLIIKVNSSPSAGYIRYYNEGSKRPIMYVNYIFSKAEAKFTQTEKLLTTMHKGLIKAMDLAMGQEILVYSPIVSMTKIQRTPLPERKALPVRWITWMTYLEDPRIQFHYDKSLPELQQIPNVTEDVIAKTKHPSEFAMVFYTDGSAIKHPDVNKSHSAGMGIAQVQFIPEYKIVHQWSIPLGDHTAQLAEIAAVEFACKKALKISGPVLIVTDSFYVAESANKELPYWKSNGFLNNKKKPLRHVSKWKSIAECLQLKPDIIIMHEKGHQQPMTTLHTEGNNLADKLATQGSYVVHAGKRTADGSEFEKRTADGSEFESPKKKAKVE

SEQ ID NO: 409 - protein, 2176 aa, synthetic construct
MPAAKRVKLDGGDKKYSIGLDIGTNSVGWAVITDEYKVPSKKFKVLGNTDRHSIKKNLIGALLFDSGETAEATRLKRTARRRYTRRKNRICYLQEIFSNEMAKVDDSFFHRLEESFLVEEDKKHERHPIFGNIVDEVAYHEKYPTIYHLRKKLVDSTDKADLRLIYLALAHMIKFRGHFLIEGDLNPDNSDVDKLFIQLVQTYNQLFEENPINASGVDAKAILSARLSKSRRLENLIAQLPGEKKNGLFGNLIALSLGLTPNFKSNFDLAEDAKLQLSKDTYDDDLDNLLAQIGDQYADLFLAAKNLSDAILLSDILRVNTEITKAPLSASMIKRYDEHHQDLTLLKALVRQQLPEKYKEIFFDQSKNGYAGYIDGGASQEEFYKFIKPILEKMDGTEELLVKLNREDLLRKQRTFDNGSIPHQIHLGELHAILRRQEDFYPFLKDNREKIEKILTFRIPYYVGPLARGNSRFAWMTRKSEETITPWNFEEVVDKGASAQSFIERMTNFDKNLPNEKVLPKHSLLYEYFTVYNELTKVKYVTEGMRKPAFLSGEQKKAIVDLLFKTNRKVTVKQLKEDYFKKIECFDSVEISGVEDRFNASLGTYHDLLKIIKDKDFLDNEENEDILEDIVLTLTLFEDREMIEERLKTYAHLFDDKVMKQLKRRRYTGWGRLSRKLINGIRDKQSGKTILDFLKSDGFANRNFMQLIHDDSLTFKEDIQKAQVSGQGDSLHEHIANLAGSPAIKKGILQTVKVVDELVKVMGRHKPENIVIEMARENQTTQKGQKNSRERMKRIEEGIKELGSQILKEHPVENTQLQNEKLYLYYLQNGRDMYVDQELDINRLSDYDVDHIVPQSFLKDDSIDNKVLTRSDKARGKSDNVPSEEVVKKMKNYWRQLLNAKLITQRKFDNLTKAERGGLSELDKAGFIKRQLVETRQITKHVAQILDSRMNTKYDENDKLIREVKVITLKSKLVSDFRKDFQFYKVREINNYHHAHDAYLNAVVGTALIKKYPKLESEFVYGDYKVYDVRKMIAKSEQEIGKATAKYFFYSNIMNFFKTEITLANGEIRKRPLIETNGETGEIVWDKGRDFATVRKVLSMPQVNIVKKTEVQTGGFSKESILPKRNSDKLIARKKDWDPKKYGGFDSPTVAYSVLVVAKVEKGKSKKLKSVKELLGITIMERSSFEKNPIDFLEAKGYKEVKKDLIIKLPKYSLFELENGRKRMLASAGELQKGNELALPSKYVNFLYLASHYEKLKGSPEDNEQKQLFVEQHKHYLDEIIEQISEFSKRVILADANLDKVLSAYNKHRDKPIREQAENIIHLFTLTNLGAPAAFKYFDTTIDRKRYTSTKEVLDATLIHQSITGLYETRIDLSQLGGDGGGSSEAAAKPAPGGMDPLQLLQPLEAEIKGTKLKAHWNSGATITCVPEAFLEDERPIQTMLIKTIHGEKQQDVYYLTFKVQGRKVEAEVLASPYDYILLNPSDVPWLMKKPLQLTVLVPLHEYQERLLQQTALPKEQKELLQKLFLKYDALWQHWENQVGHRRIKPHNIATGTLAPRPQKQYPINPKAKPSIQIVIDDLLKQGVLIQQNSTMNTPVYPVPKPDGKWRMVLDYREVNKTIPLIAAQNQHSAGILSSIYRGKYKTTLDLTNGFWAHPITPESYWLTAFTWQGKQYCWTRLPQGFLNSPALFTADVVDLLKEIPNVQAYVDDIYISHDDPQEHLEQLEKIFSILLNAGYVVSLKKSEIAQREVEFLGFNITKEGRGLTDTFKQKLLNITPPKDLKQLQSILGLLNFARNFIPNYSELVKPLYTIVANANGKFISWTEDNSNQLQHIISVLNQADNLEERNPETRLIIKVNSSPSAGYIRYYNEGSKRPIMYVNYIFSKAEAKFTQTEKLLTTMHKGLIKAMDLAMGQEILVYSPIVSMTKIQRTPLPERKALPVRWITWMTYLEDPRIQFHYDKSLPELQQIPNVTEDVIAKTKHPSEFAMVFYTDGSAIKHPDVNKSHSAGMGIAQVQFIPEYKIVHQWSIPLGDHTAQLAEIAAVEFACKKALKISGPVLIVTDSFYVAESANKELPYWKSNGFLNNKKKPLRHVSKWKSIAECLQLKPDIIIMHEKGHQQPMTTLHTEGNNLADKLATQGSYVVHAGKRTADGSEFEKRTADGSEFESPKKKAKVE

SEQ ID NO: 410 - protein, 2181 aa, synthetic construct
MPAAKRVKLDGGDKKYSIGLDIGTNSVGWAVITDEYKVPSKKFKVLGNTDRHSIKKNLIGALLFDSGETAEATRLKRTARRRYTRRKNRICYLQEIFSNEMAKVDDSFFHRLEESFLVEEDKKHERHPIFGNIVDEVAYHEKYPTIYHLRKKLVDSTDKADLRLIYLALAHMIKFRGHFLIEGDLNPDNSDVDKLFIQLVQTYNQLFEENPINASGVDAKAILSARLSKSRRLENLIAQLPGEKKNGLFGNLIALSLGLTPNFKSNFDLAEDAKLQLSKDTYDDDLDNLLAQIGDQYADLFLAAKNLSDAILLSDILRVNTEITKAPLSASMIKRYDEHHQDLTLLKALVRQQLPEKYKEIFFDQSKNGYAGYIDGGASQEEFYKFIKPILEKMDGTEELLVKLNREDLLRKQRTFDNGSIPHQIHLGELHAILRRQEDFYPFLKDNREKIEKILTFRIPYYVGPLARGNSRFAWMTRKSEETITPWNFEEVVDKGASAQSFIERMTNFDKNLPNEKVLPKHSLLYEYFTVYNELTKVKYVTEGMRKPAFLSGEQKKAIVDLLFKTNRKVTVKQLKEDYFKKIECFDSVEISGVEDRFNASLGTYHDLLKIIKDKDFLDNEENEDILEDIVLTLTLFEDREMIEERLKTYAHLFDDKVMKQLKRRRYTGWGRLSRKLINGIRDKQSGKTILDFLKSDGFANRNFMQLIHDDSLTFKEDIQKAQVSGQGDSLHEHIANLAGSPAIKKGILQTVKVVDELVKVMGRHKPENIVIEMARENQTTQKGQKNSRERMKRIEEGIKELGSQILKEHPVENTQLQNEKLYLYYLQNGRDMYVDQELDINRLSDYDVDHIVPQSFLKDDSIDNKVLTRSDKARGKSDNVPSEEVVKKMKNYWRQLLNAKLITQRKFDNLTKAERGGLSELDKAGFIKRQLVETRQITKHVAQILDSRMNTKYDENDKLIREVKVITLKSKLVSDFRKDFQFYKVREINNYHHAHDAYLNAVVGTALIKKYPKLESEFVYGDYKVYDVRKMIAKSEQEIGKATAKYFFYSNIMNFFKTEITLANGEIRKRPLIETNGETGEIVWDKGRDFATVRKVLSMPQVNIVKKTEVQTGGFSKESILPKRNSDKLIARKKDWDPKKYGGFDSPTVAYSVLVVAKVEKGKSKKLKSVKELLGITIMERSSFEKNPIDFLEAKGYKEVKKDLIIKLPKYSLFELENGRKRMLASAGELQKGNELALPSKYVNFLYLASHYEKLKGSPEDNEQKQLFVEQHKHYLDEIIEQISEFSKRVILADANLDKVLSAYNKHRDKPIREQAENIIHLFTLTNLGAPAAFKYFDTTIDRKRYTSTKEVLDATLIHQSITGLYETRIDLSQLGGDGGSGSETPGTSESATPESGGMDPLQLLQPLEAEIKGTKLKAHWNSGATITCVPEAFLEDERPIQTMLIKTIHGEKQQDVYYLTFKVQGRKVEAEVLASPYDYILLNPSDVPWLMKKPLQLTVLVPLHEYQERLLQQTALPKEQKELLQKLFLKYDALWQHWENQVGHRRIKPHNIATGTLAPRPQKQYPINPKAKPSIQIVIDDLLKQGVLIQQNSTMNTPVYPVPKPDGKWRMVLDYREVNKTIPLIAAQNQHSAGILSSIYRGKYKTTLDLTNGFWAHPITPESYWLTAFTWQGKQYCWTRLPQGFLNSPALFTADVVDLLKEIPNVQAYVDDIYISHDDPQEHLEQLEKIFSILLNAGYVVSLKKSEIAQREVEFLGFNITKEGRGLTDTFKQKLLNITPPKDLKQLQSILGLLNFARNFIPNYSELVKPLYTIVANANGKFISWTEDNSNQLQHIISVLNQADNLEERNPETRLIIKVNSSPSAGYIRYYNEGSKRPIMYVNYIFSKAEAKFTQTEKLLTTMHKGLIKAMDLAMGQEILVYSPIVSMTKIQRTPLPERKALPVRWITWMTYLEDPRIQFHYDKSLPELQQIPNVTEDVIAKTKHPSEFAMVFYTDGSAIKHPDVNKSHSAGMGIAQVQFIPEYKIVHQWSIPLGDHTAQLAEIAAVEFACKKALKISGPVLIVTDSFYVAESANKELPYWKSNGFLNNKKKPLRHVSKWKSIAECLQLKPDIIIMHEKGHQQPMTTLHTEGNNLADKLATQGSYVVHAGKRTADGSEFEKRTADGSEFESPKKKAKVE

SEQ ID NO: 411 - protein, 2178 aa, synthetic construct
MPAAKRVKLDGGDKKYSIGLDIGTNSVGWAVITDEYKVPSKKFKVLGNTDRHSIKKNLIGALLFDSGETAEATRLKRTARRRYTRRKNRICYLQEIFSNEMAKVDDSFFHRLEESFLVEEDKKHERHPIFGNIVDEVAYHEKYPTIYHLRKKLVDSTDKADLRLIYLALAHMIKFRGHFLIEGDLNPDNSDVDKLFIQLVQTYNQLFEENPINASGVDAKAILSARLSKSRRLENLIAQLPGEKKNGLFGNLIALSLGLTPNFKSNFDLAEDAKLQLSKDTYDDDLDNLLAQIGDQYADLFLAAKNLSDAILLSDILRVNTEITKAPLSASMIKRYDEHHQDLTLLKALVRQQLPEKYKEIFFDQSKNGYAGYIDGGASQEEFYKFIKPILEKMDGTEELLVKLNREDLLRKQRTFDNGSIPHQIHLGELHAILRRQEDFYPFLKDNREKIEKILTFRIPYYVGPLARGNSRFAWMTRKSEETITPWNFEEVVDKGASAQSFIERMTNFDKNLPNEKVLPKHSLLYEYFTVYNELTKVKYVTEGMRKPAFLSGEQKKAIVDLLFKTNRKVTVKQLKEDYFKKIECFDSVEISGVEDRFNASLGTYHDLLKIIKDKDFLDNEENEDILEDIVLTLTLFEDREMIEERLKTYAHLFDDKVMKQLKRRRYTGWGRLSRKLINGIRDKQSGKTILDFLKSDGFANRNFMQLIHDDSLTFKEDIQKAQVSGQGDSLHEHIANLAGSPAIKKGILQTVKVVDELVKVMGRHKPENIVIEMARENQTTQKGQKNSRERMKRIEEGIKELGSQILKEHPVENTQLQNEKLYLYYLQNGRDMYVDQELDINRLSDYDVDHIVPQSFLKDDSIDNKVLTRSDKARGKSDNVPSEEVVKKMKNYWRQLLNAKLITQRKFDNLTKAERGGLSELDKAGFIKRQLVETRQITKHVAQILDSRMNTKYDENDKLIREVKVITLKSKLVSDFRKDFQFYKVREINNYHHAHDAYLNAVVGTALIKKYPKLESEFVYGDYKVYDVRKMIAKSEQEIGKATAKYFFYSNIMNFFKTEITLANGEIRKRPLIETNGETGEIVWDKGRDFATVRKVLSMPQVNIVKKTEVQTGGFSKESILPKRNSDKLIARKKDWDPKKYGGFDSPTVAYSVLVVAKVEKGKSKKLKSVKELLGITIMERSSFEKNPIDFLEAKGYKEVKKDLIIKLPKYSLFELENGRKRMLASAGELQKGNELALPSKYVNFLYLASHYEKLKGSPEDNEQKQLFVEQHKHYLDEIIEQISEFSKRVILADANLDKVLSAYNKHRDKPIREQAENIIHLFTLTNLGAPAAFKYFDTTIDRKRYTSTKEVLDATLIHQSITGLYETRIDLSQLGGDGGPAPAPAPAPAPAPGGMDPLQLLQPLEAEIKGTKLKAHWNSGATITCVPEAFLEDERPIQTMLIKTIHGEKQQDVYYLTFKVQGRKVEAEVLASPYDYILLNPSDVPWLMKKPLQLTVLVPLHEYQERLLQQTALPKEQKELLQKLFLKYDALWQHWENQVGHRRIKPHNIATGTLAPRPQKQYPINPKAKPSIQIVIDDLLKQGVLIQQNSTMNTPVYPVPKPDGKWRMVLDYREVNKTIPLIAAQNQHSAGILSSIYRGKYKTTLDLTNGFWAHPITPESYWLTAFTWQGKQYCWTRLPQGFLNSPALFTADVVDLLKEIPNVQAYVDDIYISHDDPQEHLEQLEKIFSILLNAGYVVSLKKSEIAQREVEFLGFNITKEGRGLTDTFKQKLLNITPPKDLKQLQSILGLLNFARNFIPNYSELVKPLYTIVANANGKFISWTEDNSNQLQHIISVLNQADNLEERNPETRLIIKVNSSPSAGYIRYYNEGSKRPIMYVNYIFSKAEAKFTQTEKLLTTMHKGLIKAMDLAMGQEILVYSPIVSMTKIQRTPLPERKALPVRWITWMTYLEDPRIQFHYDKSLPELQQIPNVTEDVIAKTKHPSEFAMVFYTDGSAIKHPDVNKSHSAGMGIAQVQFIPEYKIVHQWSIPLGDHTAQLAEIAAVEFACKKALKISGPVLIVTDSFYVAESANKELPYWKSNGFLNNKKKPLRHVSKWKSIAECLQLKPDIIIMHEKGHQQPMTTLHTEGNNLADKLATQGSYVVHAGKRTADGSEFEKRTADGSEFESPKKKAKVE

SEQ ID NO: 412 - protein, 2176 aa, synthetic construct
MPAAKRVKLDGGDKKYSIGLDIGTNSVGWAVITDEYKVPSKKFKVLGNTDRHSIKKNLIGALLFDSGETAEATRLKRTARRRYTRRKNRICYLQEIFSNEMAKVDDSFFHRLEESFLVEEDKKHERHPIFGNIVDEVAYHEKYPTIYHLRKKLVDSTDKADLRLIYLALAHMIKFRGHFLIEGDLNPDNSDVDKLFIQLVQTYNQLFEENPINASGVDAKAILSARLSKSRRLENLIAQLPGEKKNGLFGNLIALSLGLTPNFKSNFDLAEDAKLQLSKDTYDDDLDNLLAQIGDQYADLFLAAKNLSDAILLSDILRVNTEITKAPLSASMIKRYDEHHQDLTLLKALVRQQLPEKYKEIFFDQSKNGYAGYIDGGASQEEFYKFIKPILEKMDGTEELLVKLNREDLLRKQRTFDNGSIPHQIHLGELHAILRRQEDFYPFLKDNREKIEKILTFRIPYYVGPLARGNSRFAWMTRKSEETITPWNFEEVVDKGASAQSFIERMTNFDKNLPNEKVLPKHSLLYEYFTVYNELTKVKYVTEGMRKPAFLSGEQKKAIVDLLFKTNRKVTVKQLKEDYFKKIECFDSVEISGVEDRFNASLGTYHDLLKIIKDKDFLDNEENEDILEDIVLTLTLFEDREMIEERLKTYAHLFDDKVMKQLKRRRYTGWGRLSRKLINGIRDKQSGKTILDFLKSDGFANRNFMQLIHDDSLTFKEDIQKAQVSGQGDSLHEHIANLAGSPAIKKGILQTVKVVDELVKVMGRHKPENIVIEMARENQTTQKGQKNSRERMKRIEEGIKELGSQILKEHPVENTQLQNEKLYLYYLQNGRDMYVDQELDINRLSDYDVDHIVPQSFLKDDSIDNKVLTRSDKARGKSDNVPSEEVVKKMKNYWRQLLNAKLITQRKFDNLTKAERGGLSELDKAGFIKRQLVETRQITKHVAQILDSRMNTKYDENDKLIREVKVITLKSKLVSDFRKDFQFYKVREINNYHHAHDAYLNAVVGTALIKKYPKLESEFVYGDYKVYDVRKMIAKSEQEIGKATAKYFFYSNIMNFFKTEITLANGEIRKRPLIETNGETGEIVWDKGRDFATVRKVLSMPQVNIVKKTEVQTGGFSKESILPKRNSDKLIARKKDWDPKKYGGFDSPTVAYSVLVVAKVEKGKSKKLKSVKELLGITIMERSSFEKNPIDFLEAKGYKEVKKDLIIKLPKYSLFELENGRKRMLASAGELQKGNELALPSKYVNFLYLASHYEKLKGSPEDNEQKQLFVEQHKHYLDEIIEQISEFSKRVILADANLDKVLSAYNKHRDKPIREQAENIIHLFTLTNLGAPAAFKYFDTTIDRKRYTSTKEVLDATLIHQSITGLYETRIDLSQLGGDGGPAPEAAAKGSSGGMDPLQLLQPLEAEIKGTKLKAHWNSGATITCVPEAFLEDERPIQTMLIKTIHGEKQQDVYYLTFKVQGRKVEAEVLASPYDYILLNPSDVPWLMKKPLQLTVLVPLHEYQERLLQQTALPKEQKELLQKLFLKYDALWQHWENQVGHRRIKPHNIATGTLAPRPQKQYPINPKAKPSIQIVIDDLLKQGVLIQQNSTMNTPVYPVPKPDGKWRMVLDYREVNKTIPLIAAQNQHSAGILSSIYRGKYKTTLDLTNGFWAHPITPESYWLTAFTWQGKQYCWTRLPQGFLNSPALFTADVVDLLKEIPNVQAYVDDIYISHDDPQEHLEQLEKIFSILLNAGYVVSLKKSEIAQREVEFLGFNITKEGRGLTDTFKQKLLNITPPKDLKQLQSILGLLNFARNFIPNYSELVKPLYTIVANANGKFISWTEDNSNQLQHIISVLNQADNLEERNPETRLIIKVNSSPSAGYIRYYNEGSKRPIMYVNYIFSKAEAKFTQTEKLLTTMHKGLIKAMDLAMGQEILVYSPIVSMTKIQRTPLPERKALPVRWITWMTYLEDPRIQFHYDKSLPELQQIPNVTEDVIAKTKHPSEFAMVFYTDGSAIKHPDVNKSHSAGMGIAQVQFIPEYKIVHQWSIPLGDHTAQLAEIAAVEFACKKALKISGPVLIVTDSFYVAESANKELPYWKSNGFLNNKKKPLRHVSKWKSIAECLQLKPDIIIMHEKGHQQPMTTLHTEGNNLADKLATQGSYVVHAGKRTADGSEFEKRTADGSEFESPKKKAKVE

SEQ ID NO: 413 - protein, 2180 aa, synthetic construct
MPAAKRVKLDGGDKKYSIGLDIGTNSVGWAVITDEYKVPSKKFKVLGNTDRHSIKKNLIGALLFDSGETAEATRLKRTARRRYTRRKNRICYLQEIFSNEMAKVDDSFFHRLEESFLVEEDKKHERHPIFGNIVDEVAYHEKYPTIYHLRKKLVDSTDKADLRLIYLALAHMIKFRGHFLIEGDLNPDNSDVDKLFIQLVQTYNQLFEENPINASGVDAKAILSARLSKSRRLENLIAQLPGEKKNGLFGNLIALSLGLTPNFKSNFDLAEDAKLQLSKDTYDDDLDNLLAQIGDQYADLFLAAKNLSDAILLSDILRVNTEITKAPLSASMIKRYDEHHQDLTLLKALVRQQLPEKYKEIFFDQSKNGYAGYIDGGASQEEFYKFIKPILEKMDGTEELLVKLNREDLLRKQRTFDNGSIPHQIHLGELHAILRRQEDFYPFLKDNREKIEKILTFRIPYYVGPLARGNSRFAWMTRKSEETITPWNFEEVVDKGASAQSFIERMTNFDKNLPNEKVLPKHSLLYEYFTVYNELTKVKYVTEGMRKPAFLSGEQKKAIVDLLFKTNRKVTVKQLKEDYFKKIECFDSVEISGVEDRFNASLGTYHDLLKIIKDKDFLDNEENEDILEDIVLTLTLFEDREMIEERLKTYAHLFDDKVMKQLKRRRYTGWGRLSRKLINGIRDKQSGKTILDFLKSDGFANRNFMQLIHDDSLTFKEDIQKAQVSGQGDSLHEHIANLAGSPAIKKGILQTVKVVDELVKVMGRHKPENIVIEMARENQTTQKGQKNSRERMKRIEEGIKELGSQILKEHPVENTQLQNEKLYLYYLQNGRDMYVDQELDINRLSDYDVDHIVPQSFLKDDSIDNKVLTRSDKARGKSDNVPSEEVVKKMKNYWRQLLNAKLITQRKFDNLTKAERGGLSELDKAGFIKRQLVETRQITKHVAQILDSRMNTKYDENDKLIREVKVITLKSKLVSDFRKDFQFYKVREINNYHHAHDAYLNAVVGTALIKKYPKLESEFVYGDYKVYDVRKMIAKSEQEIGKATAKYFFYSNIMNFFKTEITLANGEIRKRPLIETNGETGEIVWDKGRDFATVRKVLSMPQVNIVKKTEVQTGGFSKESILPKRNSDKLIARKKDWDPKKYGGFDSPTVAYSVLVVAKVEKGKSKKLKSVKELLGITIMERSSFEKNPIDFLEAKGYKEVKKDLIIKLPKYSLFELENGRKRMLASAGELQKGNELALPSKYVNFLYLASHYEKLKGSPEDNEQKQLFVEQHKHYLDEIIEQISEFSKRVILADANLDKVLSAYNKHRDKPIREQAENIIHLFTLTNLGAPAAFKYFDTTIDRKRYTSTKEVLDATLIHQSITGLYETRIDLSQLGGDGGEAAAKEAAAKEAAAKGGMDPLQLLQPLEAEIKGTKLKAHWNSGATITCVPEAFLEDERPIQTMLIKTIHGEKQQDVYYLTFKVQGRKVEAEVLASPYDYILLNPSDVPWLMKKPLQLTVLVPLHEYQERLLQQTALPKEQKELLQKLFLKYDALWQHWENQVGHRRIKPHNIATGTLAPRPQKQYPINPKAKPSIQIVIDDLLKQGVLIQQNSTMNTPVYPVPKPDGKWRMVLDYREVNKTIPLIAAQNQHSAGILSSIYRGKYKTTLDLTNGFWAHPITPESYWLTAFTWQGKQYCWTRLPQGFLNSPALFTADVVDLLKEIPNVQAYVDDIYISHDDPQEHLEQLEKIFSILLNAGYVVSLKKSEIAQREVEFLGFNITKEGRGLTDTFKQKLLNITPPKDLKQLQSILGLLNFARNFIPNYSELVKPLYTIVANANGKFISWTEDNSNQLQHIISVLNQADNLEERNPETRLIIKVNSSPSAGYIRYYNEGSKRPIMYVNYIFSKAEAKFTQTEKLLTTMHKGLIKAMDLAMGQEILVYSPIVSMTKIQRTPLPERKALPVRWITWMTYLEDPRIQFHYDKSLPELQQIPNVTEDVIAKTKHPSEFAMVFYTDGSAIKHPDVNKSHSAGMGIAQVQFIPEYKIVHQWSIPLGDHTAQLAEIAAVEFACKKALKISGPVLIVTDSFYVAESANKELPYWKSNGFLNNKKKPLRHVSKWKSIAECLQLKPDIIIMHEKGHQQPMTTLHTEGNNLADKLATQGSYVVHAGKRTADGSEFEKRTADGSEFESPKKKAKVE

SEQ ID NO: 414 - protein, 2176 aa, synthetic construct
MPAAKRVKLDGGDKKYSIGLDIGTNSVGWAVITDEYKVPSKKFKVLGNTDRHSIKKNLIGALLFDSGETAEATRLKRTARRRYTRRKNRICYLQEIFSNEMAKVDDSFFHRLEESFLVEEDKKHERHPIFGNIVDEVAYHEKYPTIYHLRKKLVDSTDKADLRLIYLALAHMIKFRGHFLIEGDLNPDNSDVDKLFIQLVQTYNQLFEENPINASGVDAKAILSARLSKSRRLENLIAQLPGEKKNGLFGNLIALSLGLTPNFKSNFDLAEDAKLQLSKDTYDDDLDNLLAQIGDQYADLFLAAKNLSDAILLSDILRVNTEITKAPLSASMIKRYDEHHQDLTLLKALVRQQLPEKYKEIFFDQSKNGYAGYIDGGASQEEFYKFIKPILEKMDGTEELLVKLNREDLLRKQRTFDNGSIPHQIHLGELHAILRRQEDFYPFLKDNREKIEKILTFRIPYYVGPLARGNSRFAWMTRKSEETITPWNFEEVVDKGASAQSFIERMTNFDKNLPNEKVLPKHSLLYEYFTVYNELTKVKYVTEGMRKPAFLSGEQKKAIVDLLFKTNRKVTVKQLKEDYFKKIECFDSVEISGVEDRFNASLGTYHDLLKIIKDKDFLDNEENEDILEDIVLTLTLFEDREMIEERLKTYAHLFDDKVMKQLKRRRYTGWGRLSRKLINGIRDKQSGKTILDFLKSDGFANRNFMQLIHDDSLTFKEDIQKAQVSGQGDSLHEHIANLAGSPAIKKGILQTVKVVDELVKVMGRHKPENIVIEMARENQTTQKGQKNSRERMKRIEEGIKELGSQILKEHPVENTQLQNEKLYLYYLQNGRDMYVDQELDINRLSDYDVDHIVPQSFLKDDSIDNKVLTRSDKARGKSDNVPSEEVVKKMKNYWRQLLNAKLITQRKFDNLTKAERGGLSELDKAGFIKRQLVETRQITKHVAQILDSRMNTKYDENDKLIREVKVITLKSKLVSDFRKDFQFYKVREINNYHHAHDAYLNAVVGTALIKKYPKLESEFVYGDYKVYDVRKMIAKSEQEIGKATAKYFFYSNIMNFFKTEITLANGEIRKRPLIETNGETGEIVWDKGRDFATVRKVLSMPQVNIVKKTEVQTGGFSKESILPKRNSDKLIARKKDWDPKKYGGFDSPTVAYSVLVVAKVEKGKSKKLKSVKELLGITIMERSSFEKNPIDFLEAKGYKEVKKDLIIKLPKYSLFELENGRKRMLASAGELQKGNELALPSKYVNFLYLASHYEKLKGSPEDNEQKQLFVEQHKHYLDEIIEQISEFSKRVILADANLDKVLSAYNKHRDKPIREQAENIIHLFTLTNLGAPAAFKYFDTTIDRKRYTSTKEVLDATLIHQSITGLYETRIDLSQLGGDGGEAAAKGSSPAPGGMDPLQLLQPLEAEIKGTKLKAHWNSGATITCVPEAFLEDERPIQTMLIKTIHGEKQQDVYYLTFKVQGRKVEAEVLASPYDYILLNPSDVPWLMKKPLQLTVLVPLHEYQERLLQQTALPKEQKELLQKLFLKYDALWQHWENQVGHRRIKPHNIATGTLAPRPQKQYPINPKAKPSIQIVIDDLLKQGVLIQQNSTMNTPVYPVPKPDGKWRMVLDYREVNKTIPLIAAQNQHSAGILSSIYRGKYKTTLDLTNGFWAHPITPESYWLTAFTWQGKQYCWTRLPQGFLNSPALFTADVVDLLKEIPNVQAYVDDIYISHDDPQEHLEQLEKIFSILLNAGYVVSLKKSEIAQREVEFLGFNITKEGRGLTDTFKQKLLNITPPKDLKQLQSILGLLNFARNFIPNYSELVKPLYTIVANANGKFISWTEDNSNQLQHIISVLNQADNLEERNPETRLIIKVNSSPSAGYIRYYNEGSKRPIMYVNYIFSKAEAKFTQTEKLLTTMHKGLIKAMDLAMGQEILVYSPIVSMTKIQRTPLPERKALPVRWITWMTYLEDPRIQFHYDKSLPELQQIPNVTEDVIAKTKHPSEFAMVFYTDGSAIKHPDVNKSHSAGMGIAQVQFIPEYKIVHQWSIPLGDHTAQLAEIAAVEFACKKALKISGPVLIVTDSFYVAESANKELPYWKSNGFLNNKKKPLRHVSKWKSIAECLQLKPDIIIMHEKGHQQPMTTLHTEGNNLADKLATQGSYVVHAGKRTADGSEFEKRTADGSEFESPKKKAKVE

SEQ ID NO: 415 - protein, 2174 aa, synthetic construct
MPAAKRVKLDGGDKKYSIGLDIGTNSVGWAVITDEYKVPSKKFKVLGNTDRHSIKKNLIGALLFDSGETAEATRLKRTARRRYTRRKNRICYLQEIFSNEMAKVDDSFFHRLEESFLVEEDKKHERHPIFGNIVDEVAYHEKYPTIYHLRKKLVDSTDKADLRLIYLALAHMIKFRGHFLIEGDLNPDNSDVDKLFIQLVQTYNQLFEENPINASGVDAKAILSARLSKSRRLENLIAQLPGEKKNGLFGNLIALSLGLTPNFKSNFDLAEDAKLQLSKDTYDDDLDNLLAQIGDQYADLFLAAKNLSDAILLSDILRVNTEITKAPLSASMIKRYDEHHQDLTLLKALVRQQLPEKYKEIFFDQSKNGYAGYIDGGASQEEFYKFIKPILEKMDGTEELLVKLNREDLLRKQRTFDNGSIPHQIHLGELHAILRRQEDFYPFLKDNREKIEKILTFRIPYYVGPLARGNSRFAWMTRKSEETITPWNFEEVVDKGASAQSFIERMTNFDKNLPNEKVLPKHSLLYEYFTVYNELTKVKYVTEGMRKPAFLSGEQKKAIVDLLFKTNRKVTVKQLKEDYFKKIECFDSVEISGVEDRFNASLGTYHDLLKIIKDKDFLDNEENEDILEDIVLTLTLFEDREMIEERLKTYAHLFDDKVMKQLKRRRYTGWGRLSRKLINGIRDKQSGKTILDFLKSDGFANRNFMQLIHDDSLTFKEDIQKAQVSGQGDSLHEHIANLAGSPAIKKGILQTVKVVDELVKVMGRHKPENIVIEMARENQTTQKGQKNSRERMKRIEEGIKELGSQILKEHPVENTQLQNEKLYLYYLQNGRDMYVDQELDINRLSDYDVDHIVPQSFLKDDSIDNKVLTRSDKARGKSDNVPSEEVVKKMKNYWRQLLNAKLITQRKFDNLTKAERGGLSELDKAGFIKRQLVETRQITKHVAQILDSRMNTKYDENDKLIREVKVITLKSKLVSDFRKDFQFYKVREINNYHHAHDAYLNAVVGTALIKKYPKLESEFVYGDYKVYDVRKMIAKSEQEIGKATAKYFFYSNIMNFFKTEITLANGEIRKRPLIETNGETGEIVWDKGRDFATVRKVLSMPQVNIVKKTEVQTGGFSKESILPKRNSDKLIARKKDWDPKKYGGFDSPTVAYSVLVVAKVEKGKSKKLKSVKELLGITIMERSSFEKNPIDFLEAKGYKEVKKDLIIKLPKYSLFELENGRKRMLASAGELQKGNELALPSKYVNFLYLASHYEKLKGSPEDNEQKQLFVEQHKHYLDEIIEQISEFSKRVILADANLDKVLSAYNKHRDKPIREQAENIIHLFTLTNLGAPAAFKYFDTTIDRKRYTSTKEVLDATLIHQSITGLYETRIDLSQLGGDGGGGGPAPGSSGGMDPLQLLQPLEAEIKGTKLKAHWNSGATITCVPEAFLEDERPIQTMLIKTIHGEKQQDVYYLTFKVQGRKVEAEVLASPYDYILLNPSDVPWLMKKPLQLTVLVPLHEYQERLLQQTALPKEQKELLQKLFLKYDALWQHWENQVGHRRIKPHNIATGTLAPRPQKQYPINPKAKPSIQIVIDDLLKQGVLIQQNSTMNTPVYPVPKPDGKWRMVLDYREVNKTIPLIAAQNQHSAGILSSIYRGKYKTTLDLTNGFWAHPITPESYWLTAFTWQGKQYCWTRLPQGFLNSPALFTADVVDLLKEIPNVQAYVDDIYISHDDPQEHLEQLEKIFSILLNAGYVVSLKKSEIAQREVEFLGFNITKEGRGLTDTFKQKLLNITPPKDLKQLQSILGLLNFARNFIPNYSELVKPLYTIVANANGKFISWTEDNSNQLQHIISVLNQADNLEERNPETRLIIKVNSSPSAGYIRYYNEGSKRPIMYVNYIFSKAEAKFTQTEKLLTTMHKGLIKAMDLAMGQEILVYSPIVSMTKIQRTPLPERKALPVRWITWMTYLEDPRIQFHYDKSLPELQQIPNVTEDVIAKTKHPSEFAMVFYTDGSAIKHPDVNKSHSAGMGIAQVQFIPEYKIVHQWSIPLGDHTAQLAEIAAVEFACKKALKISGPVLIVTDSFYVAESANKELPYWKSNGFLNNKKKPLRHVSKWKSIAECLQLKPDIIIMHEKGHQQPMTTLHTEGNNLADKLATQGSYVVHAGKRTADGSEFEKRTADGSEFESPKKKAKVE

SEQ ID NO: 416 - protein, 2173 aa, synthetic construct
MPAAKRVKLDGGDKKYSIGLDIGTNSVGWAVITDEYKVPSKKFKVLGNTDRHSIKKNLIGALLFDSGETAEATRLKRTARRRYTRRKNRICYLQEIFSNEMAKVDDSFFHRLEESFLVEEDKKHERHPIFGNIVDEVAYHEKYPTIYHLRKKLVDSTDKADLRLIYLALAHMIKFRGHFLIEGDLNPDNSDVDKLFIQLVQTYNQLFEENPINASGVDAKAILSARLSKSRRLENLIAQLPGEKKNGLFGNLIALSLGLTPNFKSNFDLAEDAKLQLSKDTYDDDLDNLLAQIGDQYADLFLAAKNLSDAILLSDILRVNTEITKAPLSASMIKRYDEHHQDLTLLKALVRQQLPEKYKEIFFDQSKNGYAGYIDGGASQEEFYKFIKPILEKMDGTEELLVKLNREDLLRKQRTFDNGSIPHQIHLGELHAILRRQEDFYPFLKDNREKIEKILTFRIPYYVGPLARGNSRFAWMTRKSEETITPWNFEEVVDKGASAQSFIERMTNFDKNLPNEKVLPKHSLLYEYFTVYNELTKVKYVTEGMRKPAFLSGEQKKAIVDLLFKTNRKVTVKQLKEDYFKKIECFDSVEISGVEDRFNASLGTYHDLLKIIKDKDFLDNEENEDILEDIVLTLTLFEDREMIEERLKTYAHLFDDKVMKQLKRRRYTGWGRLSRKLINGIRDKQSGKTILDFLKSDGFANRNFMQLIHDDSLTFKEDIQKAQVSGQGDSLHEHIANLAGSPAIKKGILQTVKVVDELVKVMGRHKPENIVIEMARENQTTQKGQKNSRERMKRIEEGIKELGSQILKEHPVENTQLQNEKLYLYYLQNGRDMYVDQELDINRLSDYDVDHIVPQSFLKDDSIDNKVLTRSDKARGKSDNVPSEEVVKKMKNYWRQLLNAKLITQRKFDNLTKAERGGLSELDKAGFIKRQLVETRQITKHVAQILDSRMNTKYDENDKLIREVKVITLKSKLVSDFRKDFQFYKVREINNYHHAHDAYLNAVVGTALIKKYPKLESEFVYGDYKVYDVRKMIAKSEQEIGKATAKYFFYSNIMNFFKTEITLANGEIRKRPLIETNGETGEIVWDKGRDFATVRKVLSMPQVNIVKKTEVQTGGFSKESILPKRNSDKLIARKKDWDPKKYGGFDSPTVAYSVLVVAKVEKGKSKKLKSVKELLGITIMERSSFEKNPIDFLEAKGYKEVKKDLIIKLPKYSLFELENGRKRMLASAGELQKGNELALPSKYVNFLYLASHYEKLKGSPEDNEQKQLFVEQHKHYLDEIIEQISEFSKRVILADANLDKVLSAYNKHRDKPIREQAENIIHLFTLTNLGAPAAFKYFDTTIDRKRYTSTKEVLDATLIHQSITGLYETRIDLSQLGGDGGGGGEAAAKGGMDPLQLLQPLEAEIKGTKLKAHWNSGATITCVPEAFLEDERPIQTMLIKTIHGEKQQDVYYLTFKVQGRKVEAEVLASPYDYILLNPSDVPWLMKKPLQLTVLVPLHEYQERLLQQTALPKEQKELLQKLFLKYDALWQHWENQVGHRRIKPHNIATGTLAPRPQKQYPINPKAKPSIQIVIDDLLKQGVLIQQNSTMNTPVYPVPKPDGKWRMVLDYREVNKTIPLIAAQNQHSAGILSSIYRGKYKTTLDLTNGFWAHPITPESYWLTAFTWQGKQYCWTRLPQGFLNSPALFTADVVDLLKEIPNVQAYVDDIYISHDDPQEHLEQLEKIFSILLNAGYVVSLKKSEIAQREVEFLGFNITKEGRGLTDTFKQKLLNITPPKDLKQLQSILGLLNFARNFIPNYSELVKPLYTIVANANGKFISWTEDNSNQLQHIISVLNQADNLEERNPETRLIIKVNSSPSAGYIRYYNEGSKRPIMYVNYIFSKAEAKFTQTEKLLTTMHKGLIKAMDLAMGQEILVYSPIVSMTKIQRTPLPERKALPVRWITWMTYLEDPRIQFHYDKSLPELQQIPNVTEDVIAKTKHPSEFAMVFYTDGSAIKHPDVNKSHSAGMGIAQVQFIPEYKIVHQWSIPLGDHTAQLAEIAAVEFACKKALKISGPVLIVTDSFYVAESANKELPYWKSNGFLNNKKKPLRHVSKWKSIAECLQLKPDIIIMHEKGHQQPMTTLHTEGNNLADKLATQGSYVVHAGKRTADGSEFEKRTADGSEFESPKKKAKVE

SEQ ID NO: 417 - protein, 2176 aa, synthetic construct
MPAAKRVKLDGGDKKYSIGLDIGTNSVGWAVITDEYKVPSKKFKVLGNTDRHSIKKNLIGALLFDSGETAEATRLKRTARRRYTRRKNRICYLQEIFSNEMAKVDDSFFHRLEESFLVEEDKKHERHPIFGNIVDEVAYHEKYPTIYHLRKKLVDSTDKADLRLIYLALAHMIKFRGHFLIEGDLNPDNSDVDKLFIQLVQTYNQLFEENPINASGVDAKAILSARLSKSRRLENLIAQLPGEKKNGLFGNLIALSLGLTPNFKSNFDLAEDAKLQLSKDTYDDDLDNLLAQIGDQYADLFLAAKNLSDAILLSDILRVNTEITKAPLSASMIKRYDEHHQDLTLLKALVRQQLPEKYKEIFFDQSKNGYAGYIDGGASQEEFYKFIKPILEKMDGTEELLVKLNREDLLRKQRTFDNGSIPHQIHLGELHAILRRQEDFYPFLKDNREKIEKILTFRIPYYVGPLARGNSRFAWMTRKSEETITPWNFEEVVDKGASAQSFIERMTNFDKNLPNEKVLPKHSLLYEYFTVYNELTKVKYVTEGMRKPAFLSGEQKKAIVDLLFKTNRKVTVKQLKEDYFKKIECFDSVEISGVEDRFNASLGTYHDLLKIIKDKDFLDNEENEDILEDIVLTLTLFEDREMIEERLKTYAHLFDDKVMKQLKRRRYTGWGRLSRKLINGIRDKQSGKTILDFLKSDGFANRNFMQLIHDDSLTFKEDIQKAQVSGQGDSLHEHIANLAGSPAIKKGILQTVKVVDELVKVMGRHKPENIVIEMARENQTTQKGQKNSRERMKRIEEGIKELGSQILKEHPVENTQLQNEKLYLYYLQNGRDMYVDQELDINRLSDYDVDHIVPQSFLKDDSIDNKVLTRSDKARGKSDNVPSEEVVKKMKNYWRQLLNAKLITQRKFDNLTKAERGGLSELDKAGFIKRQLVETRQITKHVAQILDSRMNTKYDENDKLIREVKVITLKSKLVSDFRKDFQFYKVREINNYHHAHDAYLNAVVGTALIKKYPKLESEFVYGDYKVYDVRKMIAKSEQEIGKATAKYFFYSNIMNFFKTEITLANGEIRKRPLIETNGETGEIVWDKGRDFATVRKVLSMPQVNIVKKTEVQTGGFSKESILPKRNSDKLIARKKDWDPKKYGGFDSPTVAYSVLVVAKVEKGKSKKLKSVKELLGITIMERSSFEKNPIDFLEAKGYKEVKKDLIIKLPKYSLFELENGRKRMLASAGELQKGNELALPSKYVNFLYLASHYEKLKGSPEDNEQKQLFVEQHKHYLDEIIEQISEFSKRVILADANLDKVLSAYNKHRDKPIREQAENIIHLFTLTNLGAPAAFKYFDTTIDRKRYTSTKEVLDATLIHQSITGLYETRIDLSQLGGDGGGGSEAAAKPAPGGMDPLQLLQPLEAEIKGTKLKAHWNSGATITCVPEAFLEDERPIQTMLIKTIHGEKQQDVYYLTFKVQGRKVEAEVLASPYDYILLNPSDVPWLMKKPLQLTVLVPLHEYQERLLQQTALPKEQKELLQKLFLKYDALWQHWENQVGHRRIKPHNIATGTLAPRPQKQYPINPKAKPSIQIVIDDLLKQGVLIQQNSTMNTPVYPVPKPDGKWRMVLDYREVNKTIPLIAAQNQHSAGILSSIYRGKYKTTLDLTNGFWAHPITPESYWLTAFTWQGKQYCWTRLPQGFLNSPALFTADVVDLLKEIPNVQAYVDDIYISHDDPQEHLEQLEKIFSILLNAGYVVSLKKSEIAQREVEFLGFNITKEGRGLTDTFKQKLLNITPPKDLKQLQSILGLLNFARNFIPNYSELVKPLYTIVANANGKFISWTEDNSNQLQHIISVLNQADNLEERNPETRLIIKVNSSPSAGYIRYYNEGSKRPIMYVNYIFSKAEAKFTQTEKLLTTMHKGLIKAMDLAMGQEILVYSPIVSMTKIQRTPLPERKALPVRWITWMTYLEDPRIQFHYDKSLPELQQIPNVTEDVIAKTKHPSEFAMVFYTDGSAIKHPDVNKSHSAGMGIAQVQFIPEYKIVHQWSIPLGDHTAQLAEIAAVEFACKKALKISGPVLIVTDSFYVAESANKELPYWKSNGFLNNKKKPLRHVSKWKSIAECLQLKPDIIIMHEKGHQQPMTTLHTEGNNLADKLATQGSYVVHAGKRTADGSEFEKRTADGSEFESPKKKAKVE

SEQ ID NO: 418 - protein, 2177 aa, synthetic construct
MPAAKRVKLDGGDKKYSIGLDIGTNSVGWAVITDEYKVPSKKFKVLGNTDRHSIKKNLIGALLFDSGETAEATRLKRTARRRYTRRKNRICYLQEIFSNEMAKVDDSFFHRLEESFLVEEDKKHERHPIFGNIVDEVAYHEKYPTIYHLRKKLVDSTDKADLRLIYLALAHMIKFRGHFLIEGDLNPDNSDVDKLFIQLVQTYNQLFEENPINASGVDAKAILSARLSKSRRLENLIAQLPGEKKNGLFGNLIALSLGLTPNFKSNFDLAEDAKLQLSKDTYDDDLDNLLAQIGDQYADLFLAAKNLSDAILLSDILRVNTEITKAPLSASMIKRYDEHHQDLTLLKALVRQQLPEKYKEIFFDQSKNGYAGYIDGGASQEEFYKFIKPILEKMDGTEELLVKLNREDLLRKQRTFDNGSIPHQIHLGELHAILRRQEDFYPFLKDNREKIEKILTFRIPYYVGPLARGNSRFAWMTRKSEETITPWNFEEVVDKGASAQSFIERMTNFDKNLPNEKVLPKHSLLYEYFTVYNELTKVKYVTEGMRKPAFLSGEQKKAIVDLLFKTNRKVTVKQLKEDYFKKIECFDSVEISGVEDRFNASLGTYHDLLKIIKDKDFLDNEENEDILEDIVLTLTLFEDREMIEERLKTYAHLFDDKVMKQLKRRRYTGWGRLSRKLINGIRDKQSGKTILDFLKSDGFANRNFMQLIHDDSLTFKEDIQKAQVSGQGDSLHEHIANLAGSPAIKKGILQTVKVVDELVKVMGRHKPENIVIEMARENQTTQKGQKNSRERMKRIEEGIKELGSQILKEHPVENTQLQNEKLYLYYLQNGRDMYVDQELDINRLSDYDVDHIVPQSFLKDDSIDNKVLTRSDKARGKSDNVPSEEVVKKMKNYWRQLLNAKLITQRKFDNLTKAERGGLSELDKAGFIKRQLVETRQITKHVAQILDSRMNTKYDENDKLIREVKVITLKSKLVSDFRKDFQFYKVREINNYHHAHDAYLNAVVGTALIKKYPKLESEFVYGDYKVYDVRKMIAKSEQEIGKATAKYFFYSNIMNFFKTEITLANGEIRKRPLIETNGETGEIVWDKGRDFATVRKVLSMPQVNIVKKTEVQTGGFSKESILPKRNSDKLIARKKDWDPKKYGGFDSPTVAYSVLVVAKVEKGKSKKLKSVKELLGITIMERSSFEKNPIDFLEAKGYKEVKKDLIIKLPKYSLFELENGRKRMLASAGELQKGNELALPSKYVNFLYLASHYEKLKGSPEDNEQKQLFVEQHKHYLDEIIEQISEFSKRVILADANLDKVLSAYNKHRDKPIREQAENIIHLFTLTNLGAPAAFKYFDTTIDRKRYTSTKEVLDATLIHQSITGLYETRIDLSQLGGDGGGSSGSSGSSGSSGGMDPLQLLQPLEAEIKGTKLKAHWNSGATITCVPEAFLEDERPIQTMLIKTIHGEKQQDVYYLTFKVQGRKVEAEVLASPYDYILLNPSDVPWLMKKPLQLTVLVPLHEYQERLLQQTALPKEQKELLQKLFLKYDALWQHWENQVGHRRIKPHNIATGTLAPRPQKQYPINPKAKPSIQIVIDDLLKQGVLIQQNSTMNTPVYPVPKPDGKWRMVLDYREVNKTIPLIAAQNQHSAGILSSIYRGKYKTTLDLTNGFWAHPITPESYWLTAFTWQGKQYCWTRLPQGFLNSPALFTADVVDLLKEIPNVQAYVDDIYISHDDPQEHLEQLEKIFSILLNAGYVVSLKKSEIAQREVEFLGFNITKEGRGLTDTFKQKLLNITPPKDLKQLQSILGLLNFARNFIPNYSELVKPLYTIVANANGKFISWTEDNSNQLQHIISVLNQADNLEERNPETRLIIKVNSSPSAGYIRYYNEGSKRPIMYVNYIFSKAEAKFTQTEKLLTTMHKGLIKAMDLAMGQEILVYSPIVSMTKIQRTPLPERKALPVRWITWMTYLEDPRIQFHYDKSLPELQQIPNVTEDVIAKTKHPSEFAMVFYTDGSAIKHPDVNKSHSAGMGIAQVQFIPEYKIVHQWSIPLGDHTAQLAEIAAVEFACKKALKISGPVLIVTDSFYVAESANKELPYWKSNGFLNNKKKPLRHVSKWKSIAECLQLKPDIIIMHEKGHQQPMTTLHTEGNNLADKLATQGSYVVHAGKRTADGSEFEKRTADGSEFESPKKKAKVE

SEQ ID NO: 419 - protein, 2174 aa, synthetic construct
MPAAKRVKLDGGDKKYSIGLDIGTNSVGWAVITDEYKVPSKKFKVLGNTDRHSIKKNLIGALLFDSGETAEATRLKRTARRRYTRRKNRICYLQEIFSNEMAKVDDSFFHRLEESFLVEEDKKHERHPIFGNIVDEVAYHEKYPTIYHLRKKLVDSTDKADLRLIYLALAHMIKFRGHFLIEGDLNPDNSDVDKLFIQLVQTYNQLFEENPINASGVDAKAILSARLSKSRRLENLIAQLPGEKKNGLFGNLIALSLGLTPNFKSNFDLAEDAKLQLSKDTYDDDLDNLLAQIGDQYADLFLAAKNLSDAILLSDILRVNTEITKAPLSASMIKRYDEHHQDLTLLKALVRQQLPEKYKEIFFDQSKNGYAGYIDGGASQEEFYKFIKPILEKMDGTEELLVKLNREDLLRKQRTFDNGSIPHQIHLGELHAILRRQEDFYPFLKDNREKIEKILTFRIPYYVGPLARGNSRFAWMTRKSEETITPWNFEEVVDKGASAQSFIERMTNFDKNLPNEKVLPKHSLLYEYFTVYNELTKVKYVTEGMRKPAFLSGEQKKAIVDLLFKTNRKVTVKQLKEDYFKKIECFDSVEISGVEDRFNASLGTYHDLLKIIKDKDFLDNEENEDILEDIVLTLTLFEDREMIEERLKTYAHLFDDKVMKQLKRRRYTGWGRLSRKLINGIRDKQSGKTILDFLKSDGFANRNFMQLIHDDSLTFKEDIQKAQVSGQGDSLHEHIANLAGSPAIKKGILQTVKVVDELVKVMGRHKPENIVIEMARENQTTQKGQKNSRERMKRIEEGIKELGSQILKEHPVENTQLQNEKLYLYYLQNGRDMYVDQELDINRLSDYDVDHIVPQSFLKDDSIDNKVLTRSDKARGKSDNVPSEEVVKKMKNYWRQLLNAKLITQRKFDNLTKAERGGLSELDKAGFIKRQLVETRQITKHVAQILDSRMNTKYDENDKLIREVKVITLKSKLVSDFRKDFQFYKVREINNYHHAHDAYLNAVVGTALIKKYPKLESEFVYGDYKVYDVRKMIAKSEQEIGKATAKYFFYSNIMNFFKTEITLANGEIRKRPLIETNGETGEIVWDKGRDFATVRKVLSMPQVNIVKKTEVQTGGFSKESILPKRNSDKLIARKKDWDPKKYGGFDSPTVAYSVLVVAKVEKGKSKKLKSVKELLGITIMERSSFEKNPIDFLEAKGYKEVKKDLIIKLPKYSLFELENGRKRMLASAGELQKGNELALPSKYVNFLYLASHYEKLKGSPEDNEQKQLFVEQHKHYLDEIIEQISEFSKRVILADANLDKVLSAYNKHRDKPIREQAENIIHLFTLTNLGAPAAFKYFDTTIDRKRYTSTKEVLDATLIHQSITGLYETRIDLSQLGGDGGGGGGSSPAPGGMDPLQLLQPLEAEIKGTKLKAHWNSGATITCVPEAFLEDERPIQTMLIKTIHGEKQQDVYYLTFKVQGRKVEAEVLASPYDYILLNPSDVPWLMKKPLQLTVLVPLHEYQERLLQQTALPKEQKELLQKLFLKYDALWQHWENQVGHRRIKPHNIATGTLAPRPQKQYPINPKAKPSIQIVIDDLLKQGVLIQQNSTMNTPVYPVPKPDGKWRMVLDYREVNKTIPLIAAQNQHSAGILSSIYRGKYKTTLDLTNGFWAHPITPESYWLTAFTWQGKQYCWTRLPQGFLNSPALFTADVVDLLKEIPNVQAYVDDIYISHDDPQEHLEQLEKIFSILLNAGYVVSLKKSEIAQREVEFLGFNITKEGRGLTDTFKQKLLNITPPKDLKQLQSILGLLNFARNFIPNYSELVKPLYTIVANANGKFISWTEDNSNQLQHIISVLNQADNLEERNPETRLIIKVNSSPSAGYIRYYNEGSKRPIMYVNYIFSKAEAKFTQTEKLLTTMHKGLIKAMDLAMGQEILVYSPIVSMTKIQRTPLPERKALPVRWITWMTYLEDPRIQFHYDKSLPELQQIPNVTEDVIAKTKHPSEFAMVFYTDGSAIKHPDVNKSHSAGMGIAQVQFIPEYKIVHQWSIPLGDHTAQLAEIAAVEFACKKALKISGPVLIVTDSFYVAESANKELPYWKSNGFLNNKKKPLRHVSKWKSIAECLQLKPDIIIMHEKGHQQPMTTLHTEGNNLADKLATQGSYVVHAGKRTADGSEFEKRTADGSEFESPKKKAKVE

SEQ ID NO: 420 - protein, 2176 aa, synthetic construct
MPAAKRVKLDGGDKKYSIGLDIGTNSVGWAVITDEYKVPSKKFKVLGNTDRHSIKKNLIGALLFDSGETAEATRLKRTARRRYTRRKNRICYLQEIFSNEMAKVDDSFFHRLEESFLVEEDKKHERHPIFGNIVDEVAYHEKYPTIYHLRKKLVDSTDKADLRLIYLALAHMIKFRGHFLIEGDLNPDNSDVDKLFIQLVQTYNQLFEENPINASGVDAKAILSARLSKSRRLENLIAQLPGEKKNGLFGNLIALSLGLTPNFKSNFDLAEDAKLQLSKDTYDDDLDNLLAQIGDQYADLFLAAKNLSDAILLSDILRVNTEITKAPLSASMIKRYDEHHQDLTLLKALVRQQLPEKYKEIFFDQSKNGYAGYIDGGASQEEFYKFIKPILEKMDGTEELLVKLNREDLLRKQRTFDNGSIPHQIHLGELHAILRRQEDFYPFLKDNREKIEKILTFRIPYYVGPLARGNSRFAWMTRKSEETITPWNFEEVVDKGASAQSFIERMTNFDKNLPNEKVLPKHSLLYEYFTVYNELTKVKYVTEGMRKPAFLSGEQKKAIVDLLFKTNRKVTVKQLKEDYFKKIECFDSVEISGVEDRFNASLGTYHDLLKIIKDKDFLDNEENEDILEDIVLTLTLFEDREMIEERLKTYAHLFDDKVMKQLKRRRYTGWGRLSRKLINGIRDKQSGKTILDFLKSDGFANRNFMQLIHDDSLTFKEDIQKAQVSGQGDSLHEHIANLAGSPAIKKGILQTVKVVDELVKVMGRHKPENIVIEMARENQTTQKGQKNSRERMKRIEEGIKELGSQILKEHPVENTQLQNEKLYLYYLQNGRDMYVDQELDINRLSDYDVDHIVPQSFLKDDSIDNKVLTRSDKARGKSDNVPSEEVVKKMKNYWRQLLNAKLITQRKFDNLTKAERGGLSELDKAGFIKRQLVETRQITKHVAQILDSRMNTKYDENDKLIREVKVITLKSKLVSDFRKDFQFYKVREINNYHHAHDAYLNAVVGTALIKKYPKLESEFVYGDYKVYDVRKMIAKSEQEIGKATAKYFFYSNIMNFFKTEITLANGEIRKRPLIETNGETGEIVWDKGRDFATVRKVLSMPQVNIVKKTEVQTGGFSKESILPKRNSDKLIARKKDWDPKKYGGFDSPTVAYSVLVVAKVEKGKSKKLKSVKELLGITIMERSSFEKNPIDFLEAKGYKEVKKDLIIKLPKYSLFELENGRKRMLASAGELQKGNELALPSKYVNFLYLASHYEKLKGSPEDNEQKQLFVEQHKHYLDEIIEQISEFSKRVILADANLDKVLSAYNKHRDKPIREQAENIIHLFTLTNLGAPAAFKYFDTTIDRKRYTSTKEVLDATLIHQSITGLYETRIDLSQLGGDGGGGGGSSEAAAKGGMDPLQLLQPLEAEIKGTKLKAHWNSGATITCVPEAFLEDERPIQTMLIKTIHGEKQQDVYYLTFKVQGRKVEAEVLASPYDYILLNPSDVPWLMKKPLQLTVLVPLHEYQERLLQQTALPKEQKELLQKLFLKYDALWQHWENQVGHRRIKPHNIATGTLAPRPQKQYPINPKAKPSIQIVIDDLLKQGVLIQQNSTMNTPVYPVPKPDGKWRMVLDYREVNKTIPLIAAQNQHSAGILSSIYRGKYKTTLDLTNGFWAHPITPESYWLTAFTWQGKQYCWTRLPQGFLNSPALFTADVVDLLKEIPNVQAYVDDIYISHDDPQEHLEQLEKIFSILLNAGYVVSLKKSEIAQREVEFLGFNITKEGRGLTDTFKQKLLNITPPKDLKQLQSILGLLNFARNFIPNYSELVKPLYTIVANANGKFISWTEDNSNQLQHIISVLNQADNLEERNPETRLIIKVNSSPSAGYIRYYNEGSKRPIMYVNYIFSKAEAKFTQTEKLLTTMHKGLIKAMDLAMGQEILVYSPIVSMTKIQRTPLPERKALPVRWITWMTYLEDPRIQFHYDKSLPELQQIPNVTEDVIAKTKHPSEFAMVFYTDGSAIKHPDVNKSHSAGMGIAQVQFIPEYKIVHQWSIPLGDHTAQLAEIAAVEFACKKALKISGPVLIVTDSFYVAESANKELPYWKSNGFLNNKKKPLRHVSKWKSIAECLQLKPDIIIMHEKGHQQPMTTLHTEGNNLADKLATQGSYVVHAGKRTADGSEFEKRTADGSEFESPKKKAKVE

SEQ ID NO: 421 - protein, 2180 aa, synthetic construct
MPAAKRVKLDGGDKKYSIGLDIGTNSVGWAVITDEYKVPSKKFKVLGNTDRHSIKKNLIGALLFDSGETAEATRLKRTARRRYTRRKNRICYLQEIFSNEMAKVDDSFFHRLEESFLVEEDKKHERHPIFGNIVDEVAYHEKYPTIYHLRKKLVDSTDKADLRLIYLALAHMIKFRGHFLIEGDLNPDNSDVDKLFIQLVQTYNQLFEENPINASGVDAKAILSARLSKSRRLENLIAQLPGEKKNGLFGNLIALSLGLTPNFKSNFDLAEDAKLQLSKDTYDDDLDNLLAQIGDQYADLFLAAKNLSDAILLSDILRVNTEITKAPLSASMIKRYDEHHQDLTLLKALVRQQLPEKYKEIFFDQSKNGYAGYIDGGASQEEFYKFIKPILEKMDGTEELLVKLNREDLLRKQRTFDNGSIPHQIHLGELHAILRRQEDFYPFLKDNREKIEKILTFRIPYYVGPLARGNSRFAWMTRKSEETITPWNFEEVVDKGASAQSFIERMTNFDKNLPNEKVLPKHSLLYEYFTVYNELTKVKYVTEGMRKPAFLSGEQKKAIVDLLFKTNRKVTVKQLKEDYFKKIECFDSVEISGVEDRFNASLGTYHDLLKIIKDKDFLDNEENEDILEDIVLTLTLFEDREMIEERLKTYAHLFDDKVMKQLKRRRYTGWGRLSRKLINGIRDKQSGKTILDFLKSDGFANRNFMQLIHDDSLTFKEDIQKAQVSGQGDSLHEHIANLAGSPAIKKGILQTVKVVDELVKVMGRHKPENIVIEMARENQTTQKGQKNSRERMKRIEEGIKELGSQILKEHPVENTQLQNEKLYLYYLQNGRDMYVDQELDINRLSDYDVDHIVPQSFLKDDSIDNKVLTRSDKARGKSDNVPSEEVVKKMKNYWRQLLNAKLITQRKFDNLTKAERGGLSELDKAGFIKRQLVETRQITKHVAQILDSRMNTKYDENDKLIREVKVITLKSKLVSDFRKDFQFYKVREINNYHHAHDAYLNAVVGTALIKKYPKLESEFVYGDYKVYDVRKMIAKSEQEIGKATAKYFFYSNIMNFFKTEITLANGEIRKRPLIETNGETGEIVWDKGRDFATVRKVLSMPQVNIVKKTEVQTGGFSKESILPKRNSDKLIARKKDWDPKKYGGFDSPTVAYSVLVVAKVEKGKSKKLKSVKELLGITIMERSSFEKNPIDFLEAKGYKEVKKDLIIKLPKYSLFELENGRKRMLASAGELQKGNELALPSKYVNFLYLASHYEKLKGSPEDNEQKQLFVEQHKHYLDEIIEQISEFSKRVILADANLDKVLSAYNKHRDKPIREQAENIIHLFTLTNLGAPAAFKYFDTTIDRKRYTSTKEVLDATLIHQSITGLYETRIDLSQLGGDGGGGGGSEAAAKGGGGSGGMDPLQLLQPLEAEIKGTKLKAHWNSGATITCVPEAFLEDERPIQTMLIKTIHGEKQQDVYYLTFKVQGRKVEAEVLASPYDYILLNPSDVPWLMKKPLQLTVLVPLHEYQERLLQQTALPKEQKELLQKLFLKYDALWQHWENQVGHRRIKPHNIATGTLAPRPQKQYPINPKAKPSIQIVIDDLLKQGVLIQQNSTMNTPVYPVPKPDGKWRMVLDYREVNKTIPLIAAQNQHSAGILSSIYRGKYKTTLDLTNGFWAHPITPESYWLTAFTWQGKQYCWTRLPQGFLNSPALFTADVVDLLKEIPNVQAYVDDIYISHDDPQEHLEQLEKIFSILLNAGYVVSLKKSEIAQREVEFLGFNITKEGRGLTDTFKQKLLNITPPKDLKQLQSILGLLNFARNFIPNYSELVKPLYTIVANANGKFISWTEDNSNQLQHIISVLNQADNLEERNPETRLIIKVNSSPSAGYIRYYNEGSKRPIMYVNYIFSKAEAKFTQTEKLLTTMHKGLIKAMDLAMGQEILVYSPIVSMTKIQRTPLPERKALPVRWITWMTYLEDPRIQFHYDKSLPELQQIPNVTEDVIAKTKHPSEFAMVFYTDGSAIKHPDVNKSHSAGMGIAQVQFIPEYKIVHQWSIPLGDHTAQLAEIAAVEFACKKALKISGPVLIVTDSFYVAESANKELPYWKSNGFLNNKKKPLRHVSKWKSIAECLQLKPDIIIMHEKGHQQPMTTLHTEGNNLADKLATQGSYVVHAGKRTADGSEFEKRTADGSEFESPKKKAKVE

SEQ ID NO: 422 - protein, 2176 aa, synthetic construct
MPAAKRVKLDGGDKKYSIGLDIGTNSVGWAVITDEYKVPSKKFKVLGNTDRHSIKKNLIGALLFDSGETAEATRLKRTARRRYTRRKNRICYLQEIFSNEMAKVDDSFFHRLEESFLVEEDKKHERHPIFGNIVDEVAYHEKYPTIYHLRKKLVDSTDKADLRLIYLALAHMIKFRGHFLIEGDLNPDNSDVDKLFIQLVQTYNQLFEENPINASGVDAKAILSARLSKSRRLENLIAQLPGEKKNGLFGNLIALSLGLTPNFKSNFDLAEDAKLQLSKDTYDDDLDNLLAQIGDQYADLFLAAKNLSDAILLSDILRVNTEITKAPLSASMIKRYDEHHQDLTLLKALVRQQLPEKYKEIFFDQSKNGYAGYIDGGASQEEFYKFIKPILEKMDGTEELLVKLNREDLLRKQRTFDNGSIPHQIHLGELHAILRRQEDFYPFLKDNREKIEKILTFRIPYYVGPLARGNSRFAWMTRKSEETITPWNFEEVVDKGASAQSFIERMTNFDKNLPNEKVLPKHSLLYEYFTVYNELTKVKYVTEGMRKPAFLSGEQKKAIVDLLFKTNRKVTVKQLKEDYFKKIECFDSVEISGVEDRFNASLGTYHDLLKIIKDKDFLDNEENEDILEDIVLTLTLFEDREMIEERLKTYAHLFDDKVMKQLKRRRYTGWGRLSRKLINGIRDKQSGKTILDFLKSDGFANRNFMQLIHDDSLTFKEDIQKAQVSGQGDSLHEHIANLAGSPAIKKGILQTVKVVDELVKVMGRHKPENIVIEMARENQTTQKGQKNSRERMKRIEEGIKELGSQILKEHPVENTQLQNEKLYLYYLQNGRDMYVDQELDINRLSDYDVDHIVPQSFLKDDSIDNKVLTRSDKARGKSDNVPSEEVVKKMKNYWRQLLNAKLITQRKFDNLTKAERGGLSELDKAGFIKRQLVETRQITKHVAQILDSRMNTKYDENDKLIREVKVITLKSKLVSDFRKDFQFYKVREINNYHHAHDAYLNAVVGTALIKKYPKLESEFVYGDYKVYDVRKMIAKSEQEIGKATAKYFFYSNIMNFFKTEITLANGEIRKRPLIETNGETGEIVWDKGRDFATVRKVLSMPQVNIVKKTEVQTGGFSKESILPKRNSDKLIARKKDWDPKKYGGFDSPTVAYSVLVVAKVEKGKSKKLKSVKELLGITIMERSSFEKNPIDFLEAKGYKEVKKDLIIKLPKYSLFELENGRKRMLASAGELQKGNELALPSKYVNFLYLASHYEKLKGSPEDNEQKQLFVEQHKHYLDEIIEQISEFSKRVILADANLDKVLSAYNKHRDKPIREQAENIIHLFTLTNLGAPAAFKYFDTTIDRKRYTSTKEVLDATLIHQSITGLYETRIDLSQLGGDGGGGGEAAAKGGSGGMDPLQLLQPLEAEIKGTKLKAHWNSGATITCVPEAFLEDERPIQTMLIKTIHGEKQQDVYYLTFKVQGRKVEAEVLASPYDYILLNPSDVPWLMKKPLQLTVLVPLHEYQERLLQQTALPKEQKELLQKLFLKYDALWQHWENQVGHRRIKPHNIATGTLAPRPQKQYPINPKAKPSIQIVIDDLLKQGVLIQQNSTMNTPVYPVPKPDGKWRMVLDYREVNKTIPLIAAQNQHSAGILSSIYRGKYKTTLDLTNGFWAHPITPESYWLTAFTWQGKQYCWTRLPQGFLNSPALFTADVVDLLKEIPNVQAYVDDIYISHDDPQEHLEQLEKIFSILLNAGYVVSLKKSEIAQREVEFLGFNITKEGRGLTDTFKQKLLNITPPKDLKQLQSILGLLNFARNFIPNYSELVKPLYTIVANANGKFISWTEDNSNQLQHIISVLNQADNLEERNPETRLIIKVNSSPSAGYIRYYNEGSKRPIMYVNYIFSKAEAKFTQTEKLLTTMHKGLIKAMDLAMGQEILVYSPIVSMTKIQRTPLPERKALPVRWITWMTYLEDPRIQFHYDKSLPELQQIPNVTEDVIAKTKHPSEFAMVFYTDGSAIKHPDVNKSHSAGMGIAQVQFIPEYKIVHQWSIPLGDHTAQLAEIAAVEFACKKALKISGPVLIVTDSFYVAESANKELPYWKSNGFLNNKKKPLRHVSKWKSIAECLQLKPDIIIMHEKGHQQPMTTLHTEGNNLADKLATQGSYVVHAGKRTADGSEFEKRTADGSEFESPKKKAKVE

SEQ ID NO: 423 - protein, 2171 aa, synthetic construct
MPAAKRVKLDGGDKKYSIGLDIGTNSVGWAVITDEYKVPSKKFKVLGNTDRHSIKKNLIGALLFDSGETAEATRLKRTARRRYTRRKNRICYLQEIFSNEMAKVDDSFFHRLEESFLVEEDKKHERHPIFGNIVDEVAYHEKYPTIYHLRKKLVDSTDKADLRLIYLALAHMIKFRGHFLIEGDLNPDNSDVDKLFIQLVQTYNQLFEENPINASGVDAKAILSARLSKSRRLENLIAQLPGEKKNGLFGNLIALSLGLTPNFKSNFDLAEDAKLQLSKDTYDDDLDNLLAQIGDQYADLFLAAKNLSDAILLSDILRVNTEITKAPLSASMIKRYDEHHQDLTLLKALVRQQLPEKYKEIFFDQSKNGYAGYIDGGASQEEFYKFIKPILEKMDGTEELLVKLNREDLLRKQRTFDNGSIPHQIHLGELHAILRRQEDFYPFLKDNREKIEKILTFRIPYYVGPLARGNSRFAWMTRKSEETITPWNFEEVVDKGASAQSFIERMTNFDKNLPNEKVLPKHSLLYEYFTVYNELTKVKYVTEGMRKPAFLSGEQKKAIVDLLFKTNRKVTVKQLKEDYFKKIECFDSVEISGVEDRFNASLGTYHDLLKIIKDKDFLDNEENEDILEDIVLTLTLFEDREMIEERLKTYAHLFDDKVMKQLKRRRYTGWGRLSRKLINGIRDKQSGKTILDFLKSDGFANRNFMQLIHDDSLTFKEDIQKAQVSGQGDSLHEHIANLAGSPAIKKGILQTVKVVDELVKVMGRHKPENIVIEMARENQTTQKGQKNSRERMKRIEEGIKELGSQILKEHPVENTQLQNEKLYLYYLQNGRDMYVDQELDINRLSDYDVDHIVPQSFLKDDSIDNKVLTRSDKARGKSDNVPSEEVVKKMKNYWRQLLNAKLITQRKFDNLTKAERGGLSELDKAGFIKRQLVETRQITKHVAQILDSRMNTKYDENDKLIREVKVITLKSKLVSDFRKDFQFYKVREINNYHHAHDAYLNAVVGTALIKKYPKLESEFVYGDYKVYDVRKMIAKSEQEIGKATAKYFFYSNIMNFFKTEITLANGEIRKRPLIETNGETGEIVWDKGRDFATVRKVLSMPQVNIVKKTEVQTGGFSKESILPKRNSDKLIARKKDWDPKKYGGFDSPTVAYSVLVVAKVEKGKSKKLKSVKELLGITIMERSSFEKNPIDFLEAKGYKEVKKDLIIKLPKYSLFELENGRKRMLASAGELQKGNELALPSKYVNFLYLASHYEKLKGSPEDNEQKQLFVEQHKHYLDEIIEQISEFSKRVILADANLDKVLSAYNKHRDKPIREQAENIIHLFTLTNLGAPAAFKYFDTTIDRKRYTSTKEVLDATLIHQSITGLYETRIDLSQLGGDGGGSSGSSGGMDPLQLLQPLEAEIKGTKLKAHWNSGATITCVPEAFLEDERPIQTMLIKTIHGEKQQDVYYLTFKVQGRKVEAEVLASPYDYILLNPSDVPWLMKKPLQLTVLVPLHEYQERLLQQTALPKEQKELLQKLFLKYDALWQHWENQVGHRRIKPHNIATGTLAPRPQKQYPINPKAKPSIQIVIDDLLKQGVLIQQNSTMNTPVYPVPKPDGKWRMVLDYREVNKTIPLIAAQNQHSAGILSSIYRGKYKTTLDLTNGFWAHPITPESYWLTAFTWQGKQYCWTRLPQGFLNSPALFTADVVDLLKEIPNVQAYVDDIYISHDDPQEHLEQLEKIFSILLNAGYVVSLKKSEIAQREVEFLGFNITKEGRGLTDTFKQKLLNITPPKDLKQLQSILGLLNFARNFIPNYSELVKPLYTIVANANGKFISWTEDNSNQLQHIISVLNQADNLEERNPETRLIIKVNSSPSAGYIRYYNEGSKRPIMYVNYIFSKAEAKFTQTEKLLTTMHKGLIKAMDLAMGQEILVYSPIVSMTKIQRTPLPERKALPVRWITWMTYLEDPRIQFHYDKSLPELQQIPNVTEDVIAKTKHPSEFAMVFYTDGSAIKHPDVNKSHSAGMGIAQVQFIPEYKIVHQWSIPLGDHTAQLAEIAAVEFACKKALKISGPVLIVTDSFYVAESANKELPYWKSNGFLNNKKKPLRHVSKWKSIAECLQLKPDIIIMHEKGHQQPMTTLHTEGNNLADKLATQGSYVVHAGKRTADGSEFEKRTADGSEFESPKKKAKVE

SEQ ID NO: 424 - protein, 2176 aa, synthetic construct
MPAAKRVKLDGGDKKYSIGLDIGTNSVGWAVITDEYKVPSKKFKVLGNTDRHSIKKNLIGALLFDSGETAEATRLKRTARRRYTRRKNRICYLQEIFSNEMAKVDDSFFHRLEESFLVEEDKKHERHPIFGNIVDEVAYHEKYPTIYHLRKKLVDSTDKADLRLIYLALAHMIKFRGHFLIEGDLNPDNSDVDKLFIQLVQTYNQLFEENPINASGVDAKAILSARLSKSRRLENLIAQLPGEKKNGLFGNLIALSLGLTPNFKSNFDLAEDAKLQLSKDTYDDDLDNLLAQIGDQYADLFLAAKNLSDAILLSDILRVNTEITKAPLSASMIKRYDEHHQDLTLLKALVRQQLPEKYKEIFFDQSKNGYAGYIDGGASQEEFYKFIKPILEKMDGTEELLVKLNREDLLRKQRTFDNGSIPHQIHLGELHAILRRQEDFYPFLKDNREKIEKILTFRIPYYVGPLARGNSRFAWMTRKSEETITPWNFEEVVDKGASAQSFIERMTNFDKNLPNEKVLPKHSLLYEYFTVYNELTKVKYVTEGMRKPAFLSGEQKKAIVDLLFKTNRKVTVKQLKEDYFKKIECFDSVEISGVEDRFNASLGTYHDLLKIIKDKDFLDNEENEDILEDIVLTLTLFEDREMIEERLKTYAHLFDDKVMKQLKRRRYTGWGRLSRKLINGIRDKQSGKTILDFLKSDGFANRNFMQLIHDDSLTFKEDIQKAQVSGQGDSLHEHIANLAGSPAIKKGILQTVKVVDELVKVMGRHKPENIVIEMARENQTTQKGQKNSRERMKRIEEGIKELGSQILKEHPVENTQLQNEKLYLYYLQNGRDMYVDQELDINRLSDYDVDHIVPQSFLKDDSIDNKVLTRSDKARGKSDNVPSEEVVKKMKNYWRQLLNAKLITQRKFDNLTKAERGGLSELDKAGFIKRQLVETRQITKHVAQILDSRMNTKYDENDKLIREVKVITLKSKLVSDFRKDFQFYKVREINNYHHAHDAYLNAVVGTALIKKYPKLESEFVYGDYKVYDVRKMIAKSEQEIGKATAKYFFYSNIMNFFKTEITLANGEIRKRPLIETNGETGEIVWDKGRDFATVRKVLSMPQVNIVKKTEVQTGGFSKESILPKRNSDKLIARKKDWDPKKYGGFDSPTVAYSVLVVAKVEKGKSKKLKSVKELLGITIMERSSFEKNPIDFLEAKGYKEVKKDLIIKLPKYSLFELENGRKRMLASAGELQKGNELALPSKYVNFLYLASHYEKLKGSPEDNEQKQLFVEQHKHYLDEIIEQISEFSKRVILADANLDKVLSAYNKHRDKPIREQAENIIHLFTLTNLGAPAAFKYFDTTIDRKRYTSTKEVLDATLIHQSITGLYETRIDLSQLGGDGGPAPGGGEAAAKGGMDPLQLLQPLEAEIKGTKLKAHWNSGATITCVPEAFLEDERPIQTMLIKTIHGEKQQDVYYLTFKVQGRKVEAEVLASPYDYILLNPSDVPWLMKKPLQLTVLVPLHEYQERLLQQTALPKEQKELLQKLFLKYDALWQHWENQVGHRRIKPHNIATGTLAPRPQKQYPINPKAKPSIQIVIDDLLKQGVLIQQNSTMNTPVYPVPKPDGKWRMVLDYREVNKTIPLIAAQNQHSAGILSSIYRGKYKTTLDLTNGFWAHPITPESYWLTAFTWQGKQYCWTRLPQGFLNSPALFTADVVDLLKEIPNVQAYVDDIYISHDDPQEHLEQLEKIFSILLNAGYVVSLKKSEIAQREVEFLGFNITKEGRGLTDTFKQKLLNITPPKDLKQLQSILGLLNFARNFIPNYSELVKPLYTIVANANGKFISWTEDNSNQLQHIISVLNQADNLEERNPETRLIIKVNSSPSAGYIRYYNEGSKRPIMYVNYIFSKAEAKFTQTEKLLTTMHKGLIKAMDLAMGQEILVYSPIVSMTKIQRTPLPERKALPVRWITWMTYLEDPRIQFHYDKSLPELQQIPNVTEDVIAKTKHPSEFAMVFYTDGSAIKHPDVNKSHSAGMGIAQVQFIPEYKIVHQWSIPLGDHTAQLAEIAAVEFACKKALKISGPVLIVTDSFYVAESANKELPYWKSNGFLNNKKKPLRHVSKWKSIAECLQLKPDIIIMHEKGHQQPMTTLHTEGNNLADKLATQGSYVVHAGKRTADGSEFEKRTADGSEFESPKKKAKVE

SEQ ID NO: 425 - protein, 2174 aa, synthetic construct
MPAAKRVKLDGGDKKYSIGLDIGTNSVGWAVITDEYKVPSKKFKVLGNTDRHSIKKNLIGALLFDSGETAEATRLKRTARRRYTRRKNRICYLQEIFSNEMAKVDDSFFHRLEESFLVEEDKKHERHPIFGNIVDEVAYHEKYPTIYHLRKKLVDSTDKADLRLIYLALAHMIKFRGHFLIEGDLNPDNSDVDKLFIQLVQTYNQLFEENPINASGVDAKAILSARLSKSRRLENLIAQLPGEKKNGLFGNLIALSLGLTPNFKSNFDLAEDAKLQLSKDTYDDDLDNLLAQIGDQYADLFLAAKNLSDAILLSDILRVNTEITKAPLSASMIKRYDEHHQDLTLLKALVRQQLPEKYKEIFFDQSKNGYAGYIDGGASQEEFYKFIKPILEKMDGTEELLVKLNREDLLRKQRTFDNGSIPHQIHLGELHAILRRQEDFYPFLKDNREKIEKILTFRIPYYVGPLARGNSRFAWMTRKSEETITPWNFEEVVDKGASAQSFIERMTNFDKNLPNEKVLPKHSLLYEYFTVYNELTKVKYVTEGMRKPAFLSGEQKKAIVDLLFKTNRKVTVKQLKEDYFKKIECFDSVEISGVEDRFNASLGTYHDLLKIIKDKDFLDNEENEDILEDIVLTLTLFEDREMIEERLKTYAHLFDDKVMKQLKRRRYTGWGRLSRKLINGIRDKQSGKTILDFLKSDGFANRNFMQLIHDDSLTFKEDIQKAQVSGQGDSLHEHIANLAGSPAIKKGILQTVKVVDELVKVMGRHKPENIVIEMARENQTTQKGQKNSRERMKRIEEGIKELGSQILKEHPVENTQLQNEKLYLYYLQNGRDMYVDQELDINRLSDYDVDHIVPQSFLKDDSIDNKVLTRSDKARGKSDNVPSEEVVKKMKNYWRQLLNAKLITQRKFDNLTKAERGGLSELDKAGFIKRQLVETRQITKHVAQILDSRMNTKYDENDKLIREVKVITLKSKLVSDFRKDFQFYKVREINNYHHAHDAYLNAVVGTALIKKYPKLESEFVYGDYKVYDVRKMIAKSEQEIGKATAKYFFYSNIMNFFKTEITLANGEIRKRPLIETNGETGEIVWDKGRDFATVRKVLSMPQVNIVKKTEVQTGGFSKESILPKRNSDKLIARKKDWDPKKYGGFDSPTVAYSVLVVAKVEKGKSKKLKSVKELLGITIMERSSFEKNPIDFLEAKGYKEVKKDLIIKLPKYSLFELENGRKRMLASAGELQKGNELALPSKYVNFLYLASHYEKLKGSPEDNEQKQLFVEQHKHYLDEIIEQISEFSKRVILADANLDKVLSAYNKHRDKPIREQAENIIHLFTLTNLGAPAAFKYFDTTIDRKRYTSTKEVLDATLIHQSITGLYETRIDLSQLGGDGGGGSGGSGGSGGMDPLQLLQPLEAEIKGTKLKAHWNSGATITCVPEAFLEDERPIQTMLIKTIHGEKQQDVYYLTFKVQGRKVEAEVLASPYDYILLNPSDVPWLMKKPLQLTVLVPLHEYQERLLQQTALPKEQKELLQKLFLKYDALWQHWENQVGHRRIKPHNIATGTLAPRPQKQYPINPKAKPSIQIVIDDLLKQGVLIQQNSTMNTPVYPVPKPDGKWRMVLDYREVNKTIPLIAAQNQHSAGILSSIYRGKYKTTLDLTNGFWAHPITPESYWLTAFTWQGKQYCWTRLPQGFLNSPALFTADVVDLLKEIPNVQAYVDDIYISHDDPQEHLEQLEKIFSILLNAGYVVSLKKSEIAQREVEFLGFNITKEGRGLTDTFKQKLLNITPPKDLKQLQSILGLLNFARNFIPNYSELVKPLYTIVANANGKFISWTEDNSNQLQHIISVLNQADNLEERNPETRLIIKVNSSPSAGYIRYYNEGSKRPIMYVNYIFSKAEAKFTQTEKLLTTMHKGLIKAMDLAMGQEILVYSPIVSMTKIQRTPLPERKALPVRWITWMTYLEDPRIQFHYDKSLPELQQIPNVTEDVIAKTKHPSEFAMVFYTDGSAIKHPDVNKSHSAGMGIAQVQFIPEYKIVHQWSIPLGDHTAQLAEIAAVEFACKKALKISGPVLIVTDSFYVAESANKELPYWKSNGFLNNKKKPLRHVSKWKSIAECLQLKPDIIIMHEKGHQQPMTTLHTEGNNLADKLATQGSYVVHAGKRTADGSEFEKRTADGSEFESPKKKAKVE

SEQ ID NO: 426 - protein, 2094 aa, synthetic construct
MPAAKRVKLDGGDKKYSIGLDIGTNSVGWAVITDEYKVPSKKFKVLGNTDRHSIKKNLIGALLFDSGETAEATRLKRTARRRYTRRKNRICYLQEIFSNEMAKVDDSFFHRLEESFLVEEDKKHERHPIFGNIVDEVAYHEKYPTIYHLRKKLVDSTDKADLRLIYLALAHMIKFRGHFLIEGDLNPDNSDVDKLFIQLVQTYNQLFEENPINASGVDAKAILSARLSKSRRLENLIAQLPGEKKNGLFGNLIALSLGLTPNFKSNFDLAEDAKLQLSKDTYDDDLDNLLAQIGDQYADLFLAAKNLSDAILLSDILRVNTEITKAPLSASMIKRYDEHHQDLTLLKALVRQQLPEKYKEIFFDQSKNGYAGYIDGGASQEEFYKFIKPILEKMDGTEELLVKLNREDLLRKQRTFDNGSIPHQIHLGELHAILRRQEDFYPFLKDNREKIEKILTFRIPYYVGPLARGNSRFAWMTRKSEETITPWNFEEVVDKGASAQSFIERMTNFDKNLPNEKVLPKHSLLYEYFTVYNELTKVKYVTEGMRKPAFLSGEQKKAIVDLLFKTNRKVTVKQLKEDYFKKIECFDSVEISGVEDRFNASLGTYHDLLKIIKDKDFLDNEENEDILEDIVLTLTLFEDREMIEERLKTYAHLFDDKVMKQLKRRRYTGWGRLSRKLINGIRDKQSGKTILDFLKSDGFANRNFMQLIHDDSLTFKEDIQKAQVSGQGDSLHEHIANLAGSPAIKKGILQTVKVVDELVKVMGRHKPENIVIEMARENQTTQKGQKNSRERMKRIEEGIKELGSQILKEHPVENTQLQNEKLYLYYLQNGRDMYVDQELDINRLSDYDVDHIVPQSFLKDDSIDNKVLTRSDKARGKSDNVPSEEVVKKMKNYWRQLLNAKLITQRKFDNLTKAERGGLSELDKAGFIKRQLVETRQITKHVAQILDSRMNTKYDENDKLIREVKVITLKSKLVSDFRKDFQFYKVREINNYHHAHDAYLNAVVGTALIKKYPKLESEFVYGDYKVYDVRKMIAKSEQEIGKATAKYFFYSNIMNFFKTEITLANGEIRKRPLIETNGETGEIVWDKGRDFATVRKVLSMPQVNIVKKTEVQTGGFSKESILPKRNSDKLIARKKDWDPKKYGGFDSPTVAYSVLVVAKVEKGKSKKLKSVKELLGITIMERSSFEKNPIDFLEAKGYKEVKKDLIIKLPKYSLFELENGRKRMLASAGELQKGNELALPSKYVNFLYLASHYEKLKGSPEDNEQKQLFVEQHKHYLDEIIEQISEFSKRVILADANLDKVLSAYNKHRDKPIREQAENIIHLFTLTNLGAPAAFKYFDTTIDRKRYTSTKEVLDATLIHQSITGLYETRIDLSQLGGDGGGSSGSSGSSGSSGSSGSSGGVPWLMKKPLQLTVLVPLHEYQERLLQQTALPKEQKELLQKLFLKYDALWQHWENQVGHRRIKPHNIATGTLAPRPQKQYPINPKAKPSIQIVIDDLLKQGVLIQQNSTMNTPVYPVPKPDGKWRMVLDYREVNKTIPLIAAQNQHSAGILSSIYRGKYKTTLDLTNGFWAHPITPESYWLTAFTWQGKQYCWTRLPQGFLNSPALFTADVVDLLKEIPNVQAYVDDIYISHDDPQEHLEQLEKIFSILLNAGYVVSLKKSEIAQREVEFLGFNITKEGRGLTDTFKQKLLNITPPKDLKQLQSILGLLNFARNFIPNYSELVKPLYTIVANANGKFISWTEDNSNQLQHIISVLNQADNLEERNPETRLIIKVNSSPSAGYIRYYNEGSKRPIMYVNYIFSKAEAKFTQTEKLLTTMHKGLIKAMDLAMGQEILVYSPIVSMTKIQRTPLPERKALPVRWITWMTYLEDPRIQFHYDKSLPELQQIPNVTEDVIAKTKHPSEFAMVFYTDGSAIKHPDVNKSHSAGMGIAQVQFIPEYKIVHQWSIPLGDHTAQLAEIAAVEFACKKALKISGPVLIVTDSFYVAESANKELPYWKSNGFLNNKKKPLRHVSKWKSIAECLQLKPDIIIMHEKGHQQPMTTLHTEGNNLADKLATQGSYVVHAGKRTADGSEFEKRTADGSEFESPKKKAKVE

SEQ ID NO: 427 - protein, 2087 aa, synthetic construct
MPAAKRVKLDGGDKKYSIGLDIGTNSVGWAVITDEYKVPSKKFKVLGNTDRHSIKKNLIGALLFDSGETAEATRLKRTARRRYTRRKNRICYLQEIFSNEMAKVDDSFFHRLEESFLVEEDKKHERHPIFGNIVDEVAYHEKYPTIYHLRKKLVDSTDKADLRLIYLALAHMIKFRGHFLIEGDLNPDNSDVDKLFIQLVQTYNQLFEENPINASGVDAKAILSARLSKSRRLENLIAQLPGEKKNGLFGNLIALSLGLTPNFKSNFDLAEDAKLQLSKDTYDDDLDNLLAQIGDQYADLFLAAKNLSDAILLSDILRVNTEITKAPLSASMIKRYDEHHQDLTLLKALVRQQLPEKYKEIFFDQSKNGYAGYIDGGASQEEFYKFIKPILEKMDGTEELLVKLNREDLLRKQRTFDNGSIPHQIHLGELHAILRRQEDFYPFLKDNREKIEKILTFRIPYYVGPLARGNSRFAWMTRKSEETITPWNFEEVVDKGASAQSFIERMTNFDKNLPNEKVLPKHSLLYEYFTVYNELTKVKYVTEGMRKPAFLSGEQKKAIVDLLFKTNRKVTVKQLKEDYFKKIECFDSVEISGVEDRFNASLGTYHDLLKIIKDKDFLDNEENEDILEDIVLTLTLFEDREMIEERLKTYAHLFDDKVMKQLKRRRYTGWGRLSRKLINGIRDKQSGKTILDFLKSDGFANRNFMQLIHDDSLTFKEDIQKAQVSGQGDSLHEHIANLAGSPAIKKGILQTVKVVDELVKVMGRHKPENIVIEMARENQTTQKGQKNSRERMKRIEEGIKELGSQILKEHPVENTQLQNEKLYLYYLQNGRDMYVDQELDINRLSDYDVDHIVPQSFLKDDSIDNKVLTRSDKARGKSDNVPSEEVVKKMKNYWRQLLNAKLITQRKFDNLTKAERGGLSELDKAGFIKRQLVETRQITKHVAQILDSRMNTKYDENDKLIREVKVITLKSKLVSDFRKDFQFYKVREINNYHHAHDAYLNAVVGTALIKKYPKLESEFVYGDYKVYDVRKMIAKSEQEIGKATAKYFFYSNIMNFFKTEITLANGEIRKRPLIETNGETGEIVWDKGRDFATVRKVLSMPQVNIVKKTEVQTGGFSKESILPKRNSDKLIARKKDWDPKKYGGFDSPTVAYSVLVVAKVEKGKSKKLKSVKELLGITIMERSSFEKNPIDFLEAKGYKEVKKDLIIKLPKYSLFELENGRKRMLASAGELQKGNELALPSKYVNFLYLASHYEKLKGSPEDNEQKQLFVEQHKHYLDEIIEQISEFSKRVILADANLDKVLSAYNKHRDKPIREQAENIIHLFTLTNLGAPAAFKYFDTTIDRKRYTSTKEVLDATLIHQSITGLYETRIDLSQLGGDGGPAPEAAAKGSSGGVPWLMKKPLQLTVLVPLHEYQERLLQQTALPKEQKELLQKLFLKYDALWQHWENQVGHRRIKPHNIATGTLAPRPQKQYPINPKAKPSIQIVIDDLLKQGVLIQQNSTMNTPVYPVPKPDGKWRMVLDYREVNKTIPLIAAQNQHSAGILSSIYRGKYKTTLDLTNGFWAHPITPESYWLTAFTWQGKQYCWTRLPQGFLNSPALFTADVVDLLKEIPNVQAYVDDIYISHDDPQEHLEQLEKIFSILLNAGYVVSLKKSEIAQREVEFLGFNITKEGRGLTDTFKQKLLNITPPKDLKQLQSILGLLNFARNFIPNYSELVKPLYTIVANANGKFISWTEDNSNQLQHIISVLNQADNLEERNPETRLIIKVNSSPSAGYIRYYNEGSKRPIMYVNYIFSKAEAKFTQTEKLLTTMHKGLIKAMDLAMGQEILVYSPIVSMTKIQRTPLPERKALPVRWITWMTYLEDPRIQFHYDKSLPELQQIPNVTEDVIAKTKHPSEFAMVFYTDGSAIKHPDVNKSHSAGMGIAQVQFIPEYKIVHQWSIPLGDHTAQLAEIAAVEFACKKALKISGPVLIVTDSFYVAESANKELPYWKSNGFLNNKKKPLRHVSKWKSIAECLQLKPDIIIMHEKGHQQPMTTLHTEGNNLADKLATQGSYVVHAGKRTADGSEFEKRTADGSEFESPKKKAKVE

SEQ ID NO: 428 - protein, 2091 aa, synthetic construct
MPAAKRVKLDGGDKKYSIGLDIGTNSVGWAVITDEYKVPSKKFKVLGNTDRHSIKKNLIGALLFDSGETAEATRLKRTARRRYTRRKNRICYLQEIFSNEMAKVDDSFFHRLEESFLVEEDKKHERHPIFGNIVDEVAYHEKYPTIYHLRKKLVDSTDKADLRLIYLALAHMIKFRGHFLIEGDLNPDNSDVDKLFIQLVQTYNQLFEENPINASGVDAKAILSARLSKSRRLENLIAQLPGEKKNGLFGNLIALSLGLTPNFKSNFDLAEDAKLQLSKDTYDDDLDNLLAQIGDQYADLFLAAKNLSDAILLSDILRVNTEITKAPLSASMIKRYDEHHQDLTLLKALVRQQLPEKYKEIFFDQSKNGYAGYIDGGASQEEFYKFIKPILEKMDGTEELLVKLNREDLLRKQRTFDNGSIPHQIHLGELHAILRRQEDFYPFLKDNREKIEKILTFRIPYYVGPLARGNSRFAWMTRKSEETITPWNFEEVVDKGASAQSFIERMTNFDKNLPNEKVLPKHSLLYEYFTVYNELTKVKYVTEGMRKPAFLSGEQKKAIVDLLFKTNRKVTVKQLKEDYFKKIECFDSVEISGVEDRFNASLGTYHDLLKIIKDKDFLDNEENEDILEDIVLTLTLFEDREMIEERLKTYAHLFDDKVMKQLKRRRYTGWGRLSRKLINGIRDKQSGKTILDFLKSDGFANRNFMQLIHDDSLTFKEDIQKAQVSGQGDSLHEHIANLAGSPAIKKGILQTVKVVDELVKVMGRHKPENIVIEMARENQTTQKGQKNSRERMKRIEEGIKELGSQILKEHPVENTQLQNEKLYLYYLQNGRDMYVDQELDINRLSDYDVDHIVPQSFLKDDSIDNKVLTRSDKARGKSDNVPSEEVVKKMKNYWRQLLNAKLITQRKFDNLTKAERGGLSELDKAGFIKRQLVETRQITKHVAQILDSRMNTKYDENDKLIREVKVITLKSKLVSDFRKDFQFYKVREINNYHHAHDAYLNAVVGTALIKKYPKLESEFVYGDYKVYDVRKMIAKSEQEIGKATAKYFFYSNIMNFFKTEITLANGEIRKRPLIETNGETGEIVWDKGRDFATVRKVLSMPQVNIVKKTEVQTGGFSKESILPKRNSDKLIARKKDWDPKKYGGFDSPTVAYSVLVVAKVEKGKSKKLKSVKELLGITIMERSSFEKNPIDFLEAKGYKEVKKDLIIKLPKYSLFELENGRKRMLASAGELQKGNELALPSKYVNFLYLASHYEKLKGSPEDNEQKQLFVEQHKHYLDEIIEQISEFSKRVILADANLDKVLSAYNKHRDKPIREQAENIIHLFTLTNLGAPAAFKYFDTTIDRKRYTSTKEVLDATLIHQSITGLYETRIDLSQLGGDGGGSSGSSGSSGSSGSSGGVPWLMKKPLQLTVLVPLHEYQERLLQQTALPKEQKELLQKLFLKYDALWQHWENQVGHRRIKPHNIATGTLAPRPQKQYPINPKAKPSIQIVIDDLLKQGVLIQQNSTMNTPVYPVPKPDGKWRMVLDYREVNKTIPLIAAQNQHSAGILSSIYRGKYKTTLDLTNGFWAHPITPESYWLTAFTWQGKQYCWTRLPQGFLNSPALFTADVVDLLKEIPNVQAYVDDIYISHDDPQEHLEQLEKIFSILLNAGYVVSLKKSEIAQREVEFLGFNITKEGRGLTDTFKQKLLNITPPKDLKQLQSILGLLNFARNFIPNYSELVKPLYTIVANANGKFISWTEDNSNQLQHIISVLNQADNLEERNPETRLIIKVNSSPSAGYIRYYNEGSKRPIMYVNYIFSKAEAKFTQTEKLLTTMHKGLIKAMDLAMGQEILVYSPIVSMTKIQRTPLPERKALPVRWITWMTYLEDPRIQFHYDKSLPELQQIPNVTEDVIAKTKHPSEFAMVFYTDGSAIKHPDVNKSHSAGMGIAQVQFIPEYKIVHQWSIPLGDHTAQLAEIAAVEFACKKALKISGPVLIVTDSFYVAESANKELPYWKSNGFLNNKKKPLRHVSKWKSIAECLQLKPDIIIMHEKGHQQPMTTLHTEGNNLADKLATQGSYVVHAGKRTADGSEFEKRTADGSEFESPKKKAKVE

SEQ ID NO: 429 - protein, 2084 aa, synthetic construct
MPAAKRVKLDGGDKKYSIGLDIGTNSVGWAVITDEYKVPSKKFKVLGNTDRHSIKKNLIGALLFDSGETAEATRLKRTARRRYTRRKNRICYLQEIFSNEMAKVDDSFFHRLEESFLVEEDKKHERHPIFGNIVDEVAYHEKYPTIYHLRKKLVDSTDKADLRLIYLALAHMIKFRGHFLIEGDLNPDNSDVDKLFIQLVQTYNQLFEENPINASGVDAKAILSARLSKSRRLENLIAQLPGEKKNGLFGNLIALSLGLTPNFKSNFDLAEDAKLQLSKDTYDDDLDNLLAQIGDQYADLFLAAKNLSDAILLSDILRVNTEITKAPLSASMIKRYDEHHQDLTLLKALVRQQLPEKYKEIFFDQSKNGYAGYIDGGASQEEFYKFIKPILEKMDGTEELLVKLNREDLLRKQRTFDNGSIPHQIHLGELHAILRRQEDFYPFLKDNREKIEKILTFRIPYYVGPLARGNSRFAWMTRKSEETITPWNFEEVVDKGASAQSFIERMTNFDKNLPNEKVLPKHSLLYEYFTVYNELTKVKYVTEGMRKPAFLSGEQKKAIVDLLFKTNRKVTVKQLKEDYFKKIECFDSVEISGVEDRFNASLGTYHDLLKIIKDKDFLDNEENEDILEDIVLTLTLFEDREMIEERLKTYAHLFDDKVMKQLKRRRYTGWGRLSRKLINGIRDKQSGKTILDFLKSDGFANRNFMQLIHDDSLTFKEDIQKAQVSGQGDSLHEHIANLAGSPAIKKGILQTVKVVDELVKVMGRHKPENIVIEMARENQTTQKGQKNSRERMKRIEEGIKELGSQILKEHPVENTQLQNEKLYLYYLQNGRDMYVDQELDINRLSDYDVDHIVPQSFLKDDSIDNKVLTRSDKARGKSDNVPSEEVVKKMKNYWRQLLNAKLITQRKFDNLTKAERGGLSELDKAGFIKRQLVETRQITKHVAQILDSRMNTKYDENDKLIREVKVITLKSKLVSDFRKDFQFYKVREINNYHHAHDAYLNAVVGTALIKKYPKLESEFVYGDYKVYDVRKMIAKSEQEIGKATAKYFFYSNIMNFFKTEITLANGEIRKRPLIETNGETGEIVWDKGRDFATVRKVLSMPQVNIVKKTEVQTGGFSKESILPKRNSDKLIARKKDWDPKKYGGFDSPTVAYSVLVVAKVEKGKSKKLKSVKELLGITIMERSSFEKNPIDFLEAKGYKEVKKDLIIKLPKYSLFELENGRKRMLASAGELQKGNELALPSKYVNFLYLASHYEKLKGSPEDNEQKQLFVEQHKHYLDEIIEQISEFSKRVILADANLDKVLSAYNKHRDKPIREQAENIIHLFTLTNLGAPAAFKYFDTTIDRKRYTSTKEVLDATLIHQSITGLYETRIDLSQLGGDGGGGGGGGGGGGVPWLMKKPLQLTVLVPLHEYQERLLQQTALPKEQKELLQKLFLKYDALWQHWENQVGHRRIKPHNIATGTLAPRPQKQYPINPKAKPSIQIVIDDLLKQGVLIQQNSTMNTPVYPVPKPDGKWRMVLDYREVNKTIPLIAAQNQHSAGILSSIYRGKYKTTLDLTNGFWAHPITPESYWLTAFTWQGKQYCWTRLPQGFLNSPALFTADVVDLLKEIPNVQAYVDDIYISHDDPQEHLEQLEKIFSILLNAGYVVSLKKSEIAQREVEFLGFNITKEGRGLTDTFKQKLLNITPPKDLKQLQSILGLLNFARNFIPNYSELVKPLYTIVANANGKFISWTEDNSNQLQHIISVLNQADNLEERNPETRLIIKVNSSPSAGYIRYYNEGSKRPIMYVNYIFSKAEAKFTQTEKLLTTMHKGLIKAMDLAMGQEILVYSPIVSMTKIQRTPLPERKALPVRWITWMTYLEDPRIQFHYDKSLPELQQIPNVTEDVIAKTKHPSEFAMVFYTDGSAIKHPDVNKSHSAGMGIAQVQFIPEYKIVHQWSIPLGDHTAQLAEIAAVEFACKKALKISGPVLIVTDSFYVAESANKELPYWKSNGFLNNKKKPLRHVSKWKSIAECLQLKPDIIIMHEKGHQQPMTTLHTEGNNLADKLATQGSYVVHAGKRTADGSEFEKRTADGSEFESPKKKAKVE

SEQ ID NO: 430 - protein, 2084 aa, synthetic construct
MPAAKRVKLDGGDKKYSIGLDIGTNSVGWAVITDEYKVPSKKFKVLGNTDRHSIKKNLIGALLFDSGETAEATRLKRTARRRYTRRKNRICYLQEIFSNEMAKVDDSFFHRLEESFLVEEDKKHERHPIFGNIVDEVAYHEKYPTIYHLRKKLVDSTDKADLRLIYLALAHMIKFRGHFLIEGDLNPDNSDVDKLFIQLVQTYNQLFEENPINASGVDAKAILSARLSKSRRLENLIAQLPGEKKNGLFGNLIALSLGLTPNFKSNFDLAEDAKLQLSKDTYDDDLDNLLAQIGDQYADLFLAAKNLSDAILLSDILRVNTEITKAPLSASMIKRYDEHHQDLTLLKALVRQQLPEKYKEIFFDQSKNGYAGYIDGGASQEEFYKFIKPILEKMDGTEELLVKLNREDLLRKQRTFDNGSIPHQIHLGELHAILRRQEDFYPFLKDNREKIEKILTFRIPYYVGPLARGNSRFAWMTRKSEETITPWNFEEVVDKGASAQSFIERMTNFDKNLPNEKVLPKHSLLYEYFTVYNELTKVKYVTEGMRKPAFLSGEQKKAIVDLLFKTNRKVTVKQLKEDYFKKIECFDSVEISGVEDRFNASLGTYHDLLKIIKDKDFLDNEENEDILEDIVLTLTLFEDREMIEERLKTYAHLFDDKVMKQLKRRRYTGWGRLSRKLINGIRDKQSGKTILDFLKSDGFANRNFMQLIHDDSLTFKEDIQKAQVSGQGDSLHEHIANLAGSPAIKKGILQTVKVVDELVKVMGRHKPENIVIEMARENQTTQKGQKNSRERMKRIEEGIKELGSQILKEHPVENTQLQNEKLYLYYLQNGRDMYVDQELDINRLSDYDVDHIVPQSFLKDDSIDNKVLTRSDKARGKSDNVPSEEVVKKMKNYWRQLLNAKLITQRKFDNLTKAERGGLSELDKAGFIKRQLVETRQITKHVAQILDSRMNTKYDENDKLIREVKVITLKSKLVSDFRKDFQFYKVREINNYHHAHDAYLNAVVGTALIKKYPKLESEFVYGDYKVYDVRKMIAKSEQEIGKATAKYFFYSNIMNFFKTEITLANGEIRKRPLIETNGETGEIVWDKGRDFATVRKVLSMPQVNIVKKTEVQTGGFSKESILPKRNSDKLIARKKDWDPKKYGGFDSPTVAYSVLVVAKVEKGKSKKLKSVKELLGITIMERSSFEKNPIDFLEAKGYKEVKKDLIIKLPKYSLFELENGRKRMLASAGELQKGNELALPSKYVNFLYLASHYEKLKGSPEDNEQKQLFVEQHKHYLDEIIEQISEFSKRVILADANLDKVLSAYNKHRDKPIREQAENIIHLFTLTNLGAPAAFKYFDTTIDRKRYTSTKEVLDATLIHQSITGLYETRIDLSQLGGDGGPAPEAAAKGGVPWLMKKPLQLTVLVPLHEYQERLLQQTALPKEQKELLQKLFLKYDALWQHWENQVGHRRIKPHNIATGTLAPRPQKQYPINPKAKPSIQIVIDDLLKQGVLIQQNSTMNTPVYPVPKPDGKWRMVLDYREVNKTIPLIAAQNQHSAGILSSIYRGKYKTTLDLTNGFWAHPITPESYWLTAFTWQGKQYCWTRLPQGFLNSPALFTADVVDLLKEIPNVQAYVDDIYISHDDPQEHLEQLEKIFSILLNAGYVVSLKKSEIAQREVEFLGFNITKEGRGLTDTFKQKLLNITPPKDLKQLQSILGLLNFARNFIPNYSELVKPLYTIVANANGKFISWTEDNSNQLQHIISVLNQADNLEERNPETRLIIKVNSSPSAGYIRYYNEGSKRPIMYVNYIFSKAEAKFTQTEKLLTTMHKGLIKAMDLAMGQEILVYSPIVSMTKIQRTPLPERKALPVRWITWMTYLEDPRIQFHYDKSLPELQQIPNVTEDVIAKTKHPSEFAMVFYTDGSAIKHPDVNKSHSAGMGIAQVQFIPEYKIVHQWSIPLGDHTAQLAEIAAVEFACKKALKISGPVLIVTDSFYVAESANKELPYWKSNGFLNNKKKPLRHVSKWKSIAECLQLKPDIIIMHEKGHQQPMTTLHTEGNNLADKLATQGSYVVHAGKRTADGSEFEKRTADGSEFESPKKKAKVE

SEQ ID NO: 431 - protein, 2082 aa, synthetic construct
MPAAKRVKLDGGDKKYSIGLDIGTNSVGWAVITDEYKVPSKKFKVLGNTDRHSIKKNLIGALLFDSGETAEATRLKRTARRRYTRRKNRICYLQEIFSNEMAKVDDSFFHRLEESFLVEEDKKHERHPIFGNIVDEVAYHEKYPTIYHLRKKLVDSTDKADLRLIYLALAHMIKFRGHFLIEGDLNPDNSDVDKLFIQLVQTYNQLFEENPINASGVDAKAILSARLSKSRRLENLIAQLPGEKKNGLFGNLIALSLGLTPNFKSNFDLAEDAKLQLSKDTYDDDLDNLLAQIGDQYADLFLAAKNLSDAILLSDILRVNTEITKAPLSASMIKRYDEHHQDLTLLKALVRQQLPEKYKEIFFDQSKNGYAGYIDGGASQEEFYKFIKPILEKMDGTEELLVKLNREDLLRKQRTFDNGSIPHQIHLGELHAILRRQEDFYPFLKDNREKIEKILTFRIPYYVGPLARGNSRFAWMTRKSEETITPWNFEEVVDKGASAQSFIERMTNFDKNLPNEKVLPKHSLLYEYFTVYNELTKVKYVTEGMRKPAFLSGEQKKAIVDLLFKTNRKVTVKQLKEDYFKKIECFDSVEISGVEDRFNASLGTYHDLLKIIKDKDFLDNEENEDILEDIVLTLTLFEDREMIEERLKTYAHLFDDKVMKQLKRRRYTGWGRLSRKLINGIRDKQSGKTILDFLKSDGFANRNFMQLIHDDSLTFKEDIQKAQVSGQGDSLHEHIANLAGSPAIKKGILQTVKVVDELVKVMGRHKPENIVIEMARENQTTQKGQKNSRERMKRIEEGIKELGSQILKEHPVENTQLQNEKLYLYYLQNGRDMYVDQELDINRLSDYDVDHIVPQSFLKDDSIDNKVLTRSDKARGKSDNVPSEEVVKKMKNYWRQLLNAKLITQRKFDNLTKAERGGLSELDKAGFIKRQLVETRQITKHVAQILDSRMNTKYDENDKLIREVKVITLKSKLVSDFRKDFQFYKVREINNYHHAHDAYLNAVVGTALIKKYPKLESEFVYGDYKVYDVRKMIAKSEQEIGKATAKYFFYSNIMNFFKTEITLANGEIRKRPLIETNGETGEIVWDKGRDFATVRKVLSMPQVNIVKKTEVQTGGFSKESILPKRNSDKLIARKKDWDPKKYGGFDSPTVAYSVLVVAKVEKGKSKKLKSVKELLGITIMERSSFEKNPIDFLEAKGYKEVKKDLIIKLPKYSLFELENGRKRMLASAGELQKGNELALPSKYVNFLYLASHYEKLKGSPEDNEQKQLFVEQHKHYLDEIIEQISEFSKRVILADANLDKVLSAYNKHRDKPIREQAENIIHLFTLTNLGAPAAFKYFDTTIDRKRYTSTKEVLDATLIHQSITGLYETRIDLSQLGGDGGGGGGGGGGVPWLMKKPLQLTVLVPLHEYQERLLQQTALPKEQKELLQKLFLKYDALWQHWENQVGHRRIKPHNIATGTLAPRPQKQYPINPKAKPSIQIVIDDLLKQGVLIQQNSTMNTPVYPVPKPDGKWRMVLDYREVNKTIPLIAAQNQHSAGILSSIYRGKYKTTLDLTNGFWAHPITPESYWLTAFTWQGKQYCWTRLPQGFLNSPALFTADVVDLLKEIPNVQAYVDDIYISHDDPQEHLEQLEKIFSILLNAGYVVSLKKSEIAQREVEFLGFNITKEGRGLTDTFKQKLLNITPPKDLKQLQSILGLLNFARNFIPNYSELVKPLYTIVANANGKFISWTEDNSNQLQHIISVLNQADNLEERNPETRLIIKVNSSPSAGYIRYYNEGSKRPIMYVNYIFSKAEAKFTQTEKLLTTMHKGLIKAMDLAMGQEILVYSPIVSMTKIQRTPLPERKALPVRWITWMTYLEDPRIQFHYDKSLPELQQIPNVTEDVIAKTKHPSEFAMVFYTDGSAIKHPDVNKSHSAGMGIAQVQFIPEYKIVHQWSIPLGDHTAQLAEIAAVEFACKKALKISGPVLIVTDSFYVAESANKELPYWKSNGFLNNKKKPLRHVSKWKSIAECLQLKPDIIIMHEKGHQQPMTTLHTEGNNLADKLATQGSYVVHAGKRTADGSEFEKRTADGSEFESPKKKAKVE

SEQ ID NO: 432 - protein, 2087 aa, synthetic construct
MPAAKRVKLDGGDKKYSIGLDIGTNSVGWAVITDEYKVPSKKFKVLGNTDRHSIKKNLIGALLFDSGETAEATRLKRTARRRYTRRKNRICYLQEIFSNEMAKVDDSFFHRLEESFLVEEDKKHERHPIFGNIVDEVAYHEKYPTIYHLRKKLVDSTDKADLRLIYLALAHMIKFRGHFLIEGDLNPDNSDVDKLFIQLVQTYNQLFEENPINASGVDAKAILSARLSKSRRLENLIAQLPGEKKNGLFGNLIALSLGLTPNFKSNFDLAEDAKLQLSKDTYDDDLDNLLAQIGDQYADLFLAAKNLSDAILLSDILRVNTEITKAPLSASMIKRYDEHHQDLTLLKALVRQQLPEKYKEIFFDQSKNGYAGYIDGGASQEEFYKFIKPILEKMDGTEELLVKLNREDLLRKQRTFDNGSIPHQIHLGELHAILRRQEDFYPFLKDNREKIEKILTFRIPYYVGPLARGNSRFAWMTRKSEETITPWNFEEVVDKGASAQSFIERMTNFDKNLPNEKVLPKHSLLYEYFTVYNELTKVKYVTEGMRKPAFLSGEQKKAIVDLLFKTNRKVTVKQLKEDYFKKIECFDSVEISGVEDRFNASLGTYHDLLKIIKDKDFLDNEENEDILEDIVLTLTLFEDREMIEERLKTYAHLFDDKVMKQLKRRRYTGWGRLSRKLINGIRDKQSGKTILDFLKSDGFANRNFMQLIHDDSLTFKEDIQKAQVSGQGDSLHEHIANLAGSPAIKKGILQTVKVVDELVKVMGRHKPENIVIEMARENQTTQKGQKNSRERMKRIEEGIKELGSQILKEHPVENTQLQNEKLYLYYLQNGRDMYVDQELDINRLSDYDVDHIVPQSFLKDDSIDNKVLTRSDKARGKSDNVPSEEVVKKMKNYWRQLLNAKLITQRKFDNLTKAERGGLSELDKAGFIKRQLVETRQITKHVAQILDSRMNTKYDENDKLIREVKVITLKSKLVSDFRKDFQFYKVREINNYHHAHDAYLNAVVGTALIKKYPKLESEFVYGDYKVYDVRKMIAKSEQEIGKATAKYFFYSNIMNFFKTEITLANGEIRKRPLIETNGETGEIVWDKGRDFATVRKVLSMPQVNIVKKTEVQTGGFSKESILPKRNSDKLIARKKDWDPKKYGGFDSPTVAYSVLVVAKVEKGKSKKLKSVKELLGITIMERSSFEKNPIDFLEAKGYKEVKKDLIIKLPKYSLFELENGRKRMLASAGELQKGNELALPSKYVNFLYLASHYEKLKGSPEDNEQKQLFVEQHKHYLDEIIEQISEFSKRVILADANLDKVLSAYNKHRDKPIREQAENIIHLFTLTNLGAPAAFKYFDTTIDRKRYTSTKEVLDATLIHQSITGLYETRIDLSQLGGDGGGGSEAAAKPAPGGVPWLMKKPLQLTVLVPLHEYQERLLQQTALPKEQKELLQKLFLKYDALWQHWENQVGHRRIKPHNIATGTLAPRPQKQYPINPKAKPSIQIVIDDLLKQGVLIQQNSTMNTPVYPVPKPDGKWRMVLDYREVNKTIPLIAAQNQHSAGILSSIYRGKYKTTLDLTNGFWAHPITPESYWLTAFTWQGKQYCWTRLPQGFLNSPALFTADVVDLLKEIPNVQAYVDDIYISHDDPQEHLEQLEKIFSILLNAGYVVSLKKSEIAQREVEFLGFNITKEGRGLTDTFKQKLLNITPPKDLKQLQSILGLLNFARNFIPNYSELVKPLYTIVANANGKFISWTEDNSNQLQHIISVLNQADNLEERNPETRLIIKVNSSPSAGYIRYYNEGSKRPIMYVNYIFSKAEAKFTQTEKLLTTMHKGLIKAMDLAMGQEILVYSPIVSMTKIQRTPLPERKALPVRWITWMTYLEDPRIQFHYDKSLPELQQIPNVTEDVIAKTKHPSEFAMVFYTDGSAIKHPDVNKSHSAGMGIAQVQFIPEYKIVHQWSIPLGDHTAQLAEIAAVEFACKKALKISGPVLIVTDSFYVAESANKELPYWKSNGFLNNKKKPLRHVSKWKSIAECLQLKPDIIIMHEKGHQQPMTTLHTEGNNLADKLATQGSYVVHAGKRTADGSEFEKRTADGSEFESPKKKAKVE

SEQ ID NO: 433 - protein, 2087 aa, synthetic construct
MPAAKRVKLDGGDKKYSIGLDIGTNSVGWAVITDEYKVPSKKFKVLGNTDRHSIKKNLIGALLFDSGETAEATRLKRTARRRYTRRKNRICYLQEIFSNEMAKVDDSFFHRLEESFLVEEDKKHERHPIFGNIVDEVAYHEKYPTIYHLRKKLVDSTDKADLRLIYLALAHMIKFRGHFLIEGDLNPDNSDVDKLFIQLVQTYNQLFEENPINASGVDAKAILSARLSKSRRLENLIAQLPGEKKNGLFGNLIALSLGLTPNFKSNFDLAEDAKLQLSKDTYDDDLDNLLAQIGDQYADLFLAAKNLSDAILLSDILRVNTEITKAPLSASMIKRYDEHHQDLTLLKALVRQQLPEKYKEIFFDQSKNGYAGYIDGGASQEEFYKFIKPILEKMDGTEELLVKLNREDLLRKQRTFDNGSIPHQIHLGELHAILRRQEDFYPFLKDNREKIEKILTFRIPYYVGPLARGNSRFAWMTRKSEETITPWNFEEVVDKGASAQSFIERMTNFDKNLPNEKVLPKHSLLYEYFTVYNELTKVKYVTEGMRKPAFLSGEQKKAIVDLLFKTNRKVTVKQLKEDYFKKIECFDSVEISGVEDRFNASLGTYHDLLKIIKDKDFLDNEENEDILEDIVLTLTLFEDREMIEERLKTYAHLFDDKVMKQLKRRRYTGWGRLSRKLINGIRDKQSGKTILDFLKSDGFANRNFMQLIHDDSLTFKEDIQKAQVSGQGDSLHEHIANLAGSPAIKKGILQTVKVVDELVKVMGRHKPENIVIEMARENQTTQKGQKNSRERMKRIEEGIKELGSQILKEHPVENTQLQNEKLYLYYLQNGRDMYVDQELDINRLSDYDVDHIVPQSFLKDDSIDNKVLTRSDKARGKSDNVPSEEVVKKMKNYWRQLLNAKLITQRKFDNLTKAERGGLSELDKAGFIKRQLVETRQITKHVAQILDSRMNTKYDENDKLIREVKVITLKSKLVSDFRKDFQFYKVREINNYHHAHDAYLNAVVGTALIKKYPKLESEFVYGDYKVYDVRKMIAKSEQEIGKATAKYFFYSNIMNFFKTEITLANGEIRKRPLIETNGETGEIVWDKGRDFATVRKVLSMPQVNIVKKTEVQTGGFSKESILPKRNSDKLIARKKDWDPKKYGGFDSPTVAYSVLVVAKVEKGKSKKLKSVKELLGITIMERSSFEKNPIDFLEAKGYKEVKKDLIIKLPKYSLFELENGRKRMLASAGELQKGNELALPSKYVNFLYLASHYEKLKGSPEDNEQKQLFVEQHKHYLDEIIEQISEFSKRVILADANLDKVLSAYNKHRDKPIREQAENIIHLFTLTNLGAPAAFKYFDTTIDRKRYTSTKEVLDATLIHQSITGLYETRIDLSQLGGDGGGGGEAAAKGSSGGVPWLMKKPLQLTVLVPLHEYQERLLQQTALPKEQKELLQKLFLKYDALWQHWENQVGHRRIKPHNIATGTLAPRPQKQYPINPKAKPSIQIVIDDLLKQGVLIQQNSTMNTPVYPVPKPDGKWRMVLDYREVNKTIPLIAAQNQHSAGILSSIYRGKYKTTLDLTNGFWAHPITPESYWLTAFTWQGKQYCWTRLPQGFLNSPALFTADVVDLLKEIPNVQAYVDDIYISHDDPQEHLEQLEKIFSILLNAGYVVSLKKSEIAQREVEFLGFNITKEGRGLTDTFKQKLLNITPPKDLKQLQSILGLLNFARNFIPNYSELVKPLYTIVANANGKFISWTEDNSNQLQHIISVLNQADNLEERNPETRLIIKVNSSPSAGYIRYYNEGSKRPIMYVNYIFSKAEAKFTQTEKLLTTMHKGLIKAMDLAMGQEILVYSPIVSMTKIQRTPLPERKALPVRWITWMTYLEDPRIQFHYDKSLPELQQIPNVTEDVIAKTKHPSEFAMVFYTDGSAIKHPDVNKSHSAGMGIAQVQFIPEYKIVHQWSIPLGDHTAQLAEIAAVEFACKKALKISGPVLIVTDSFYVAESANKELPYWKSNGFLNNKKKPLRHVSKWKSIAECLQLKPDIIIMHEKGHQQPMTTLHTEGNNLADKLATQGSYVVHAGKRTADGSEFEKRTADGSEFESPKKKAKVE

SEQ ID NO: 434 - protein, 2082 aa, synthetic construct
MPAAKRVKLDGGDKKYSIGLDIGTNSVGWAVITDEYKVPSKKFKVLGNTDRHSIKKNLIGALLFDSGETAEATRLKRTARRRYTRRKNRICYLQEIFSNEMAKVDDSFFHRLEESFLVEEDKKHERHPIFGNIVDEVAYHEKYPTIYHLRKKLVDSTDKADLRLIYLALAHMIKFRGHFLIEGDLNPDNSDVDKLFIQLVQTYNQLFEENPINASGVDAKAILSARLSKSRRLENLIAQLPGEKKNGLFGNLIALSLGLTPNFKSNFDLAEDAKLQLSKDTYDDDLDNLLAQIGDQYADLFLAAKNLSDAILLSDILRVNTEITKAPLSASMIKRYDEHHQDLTLLKALVRQQLPEKYKEIFFDQSKNGYAGYIDGGASQEEFYKFIKPILEKMDGTEELLVKLNREDLLRKQRTFDNGSIPHQIHLGELHAILRRQEDFYPFLKDNREKIEKILTFRIPYYVGPLARGNSRFAWMTRKSEETITPWNFEEVVDKGASAQSFIERMTNFDKNLPNEKVLPKHSLLYEYFTVYNELTKVKYVTEGMRKPAFLSGEQKKAIVDLLFKTNRKVTVKQLKEDYFKKIECFDSVEISGVEDRFNASLGTYHDLLKIIKDKDFLDNEENEDILEDIVLTLTLFEDREMIEERLKTYAHLFDDKVMKQLKRRRYTGWGRLSRKLINGIRDKQSGKTILDFLKSDGFANRNFMQLIHDDSLTFKEDIQKAQVSGQGDSLHEHIANLAGSPAIKKGILQTVKVVDELVKVMGRHKPENIVIEMARENQTTQKGQKNSRERMKRIEEGIKELGSQILKEHPVENTQLQNEKLYLYYLQNGRDMYVDQELDINRLSDYDVDHIVPQSFLKDDSIDNKVLTRSDKARGKSDNVPSEEVVKKMKNYWRQLLNAKLITQRKFDNLTKAERGGLSELDKAGFIKRQLVETRQITKHVAQILDSRMNTKYDENDKLIREVKVITLKSKLVSDFRKDFQFYKVREINNYHHAHDAYLNAVVGTALIKKYPKLESEFVYGDYKVYDVRKMIAKSEQEIGKATAKYFFYSNIMNFFKTEITLANGEIRKRPLIETNGETGEIVWDKGRDFATVRKVLSMPQVNIVKKTEVQTGGFSKESILPKRNSDKLIARKKDWDPKKYGGFDSPTVAYSVLVVAKVEKGKSKKLKSVKELLGITIMERSSFEKNPIDFLEAKGYKEVKKDLIIKLPKYSLFELENGRKRMLASAGELQKGNELALPSKYVNFLYLASHYEKLKGSPEDNEQKQLFVEQHKHYLDEIIEQISEFSKRVILADANLDKVLSAYNKHRDKPIREQAENIIHLFTLTNLGAPAAFKYFDTTIDRKRYTSTKEVLDATLIHQSITGLYETRIDLSQLGGDGGGSSGSSGGVPWLMKKPLQLTVLVPLHEYQERLLQQTALPKEQKELLQKLFLKYDALWQHWENQVGHRRIKPHNIATGTLAPRPQKQYPINPKAKPSIQIVIDDLLKQGVLIQQNSTMNTPVYPVPKPDGKWRMVLDYREVNKTIPLIAAQNQHSAGILSSIYRGKYKTTLDLTNGFWAHPITPESYWLTAFTWQGKQYCWTRLPQGFLNSPALFTADVVDLLKEIPNVQAYVDDIYISHDDPQEHLEQLEKIFSILLNAGYVVSLKKSEIAQREVEFLGFNITKEGRGLTDTFKQKLLNITPPKDLKQLQSILGLLNFARNFIPNYSELVKPLYTIVANANGKFISWTEDNSNQLQHIISVLNQADNLEERNPETRLIIKVNSSPSAGYIRYYNEGSKRPIMYVNYIFSKAEAKFTQTEKLLTTMHKGLIKAMDLAMGQEILVYSPIVSMTKIQRTPLPERKALPVRWITWMTYLEDPRIQFHYDKSLPELQQIPNVTEDVIAKTKHPSEFAMVFYTDGSAIKHPDVNKSHSAGMGIAQVQFIPEYKIVHQWSIPLGDHTAQLAEIAAVEFACKKALKISGPVLIVTDSFYVAESANKELPYWKSNGFLNNKKKPLRHVSKWKSIAECLQLKPDIIIMHEKGHQQPMTTLHTEGNNLADKLATQGSYVVHAGKRTADGSEFEKRTADGSEFESPKKKAKVE

SEQ ID NO: 435 - protein, 2084 aa, synthetic construct
MPAAKRVKLDGGDKKYSIGLDIGTNSVGWAVITDEYKVPSKKFKVLGNTDRHSIKKNLIGALLFDSGETAEATRLKRTARRRYTRRKNRICYLQEIFSNEMAKVDDSFFHRLEESFLVEEDKKHERHPIFGNIVDEVAYHEKYPTIYHLRKKLVDSTDKADLRLIYLALAHMIKFRGHFLIEGDLNPDNSDVDKLFIQLVQTYNQLFEENPINASGVDAKAILSARLSKSRRLENLIAQLPGEKKNGLFGNLIALSLGLTPNFKSNFDLAEDAKLQLSKDTYDDDLDNLLAQIGDQYADLFLAAKNLSDAILLSDILRVNTEITKAPLSASMIKRYDEHHQDLTLLKALVRQQLPEKYKEIFFDQSKNGYAGYIDGGASQEEFYKFIKPILEKMDGTEELLVKLNREDLLRKQRTFDNGSIPHQIHLGELHAILRRQEDFYPFLKDNREKIEKILTFRIPYYVGPLARGNSRFAWMTRKSEETITPWNFEEVVDKGASAQSFIERMTNFDKNLPNEKVLPKHSLLYEYFTVYNELTKVKYVTEGMRKPAFLSGEQKKAIVDLLFKTNRKVTVKQLKEDYFKKIECFDSVEISGVEDRFNASLGTYHDLLKIIKDKDFLDNEENEDILEDIVLTLTLFEDREMIEERLKTYAHLFDDKVMKQLKRRRYTGWGRLSRKLINGIRDKQSGKTILDFLKSDGFANRNFMQLIHDDSLTFKEDIQKAQVSGQGDSLHEHIANLAGSPAIKKGILQTVKVVDELVKVMGRHKPENIVIEMARENQTTQKGQKNSRERMKRIEEGIKELGSQILKEHPVENTQLQNEKLYLYYLQNGRDMYVDQELDINRLSDYDVDHIVPQSFLKDDSIDNKVLTRSDKARGKSDNVPSEEVVKKMKNYWRQLLNAKLITQRKFDNLTKAERGGLSELDKAGFIKRQLVETRQITKHVAQILDSRMNTKYDENDKLIREVKVITLKSKLVSDFRKDFQFYKVREINNYHHAHDAYLNAVVGTALIKKYPKLESEFVYGDYKVYDVRKMIAKSEQEIGKATAKYFFYSNIMNFFKTEITLANGEIRKRPLIETNGETGEIVWDKGRDFATVRKVLSMPQVNIVKKTEVQTGGFSKESILPKRNSDKLIARKKDWDPKKYGGFDSPTVAYSVLVVAKVEKGKSKKLKSVKELLGITIMERSSFEKNPIDFLEAKGYKEVKKDLIIKLPKYSLFELENGRKRMLASAGELQKGNELALPSKYVNFLYLASHYEKLKGSPEDNEQKQLFVEQHKHYLDEIIEQISEFSKRVILADANLDKVLSAYNKHRDKPIREQAENIIHLFTLTNLGAPAAFKYFDTTIDRKRYTSTKEVLDATLIHQSITGLYETRIDLSQLGGDGGGGGEAAAKGGVPWLMKKPLQLTVLVPLHEYQERLLQQTALPKEQKELLQKLFLKYDALWQHWENQVGHRRIKPHNIATGTLAPRPQKQYPINPKAKPSIQIVIDDLLKQGVLIQQNSTMNTPVYPVPKPDGKWRMVLDYREVNKTIPLIAAQNQHSAGILSSIYRGKYKTTLDLTNGFWAHPITPESYWLTAFTWQGKQYCWTRLPQGFLNSPALFTADVVDLLKEIPNVQAYVDDIYISHDDPQEHLEQLEKIFSILLNAGYVVSLKKSEIAQREVEFLGFNITKEGRGLTDTFKQKLLNITPPKDLKQLQSILGLLNFARNFIPNYSELVKPLYTIVANANGKFISWTEDNSNQLQHIISVLNQADNLEERNPETRLIIKVNSSPSAGYIRYYNEGSKRPIMYVNYIFSKAEAKFTQTEKLLTTMHKGLIKAMDLAMGQEILVYSPIVSMTKIQRTPLPERKALPVRWITWMTYLEDPRIQFHYDKSLPELQQIPNVTEDVIAKTKHPSEFAMVFYTDGSAIKHPDVNKSHSAGMGIAQVQFIPEYKIVHQWSIPLGDHTAQLAEIAAVEFACKKALKISGPVLIVTDSFYVAESANKELPYWKSNGFLNNKKKPLRHVSKWKSIAECLQLKPDIIIMHEKGHQQPMTTLHTEGNNLADKLATQGSYVVHAGKRTADGSEFEKRTADGSEFESPKKKAKVE

SEQ ID NO: 436 - protein, 2087 aa, synthetic construct
MPAAKRVKLDGGDKKYSIGLDIGTNSVGWAVITDEYKVPSKKFKVLGNTDRHSIKKNLIGALLFDSGETAEATRLKRTARRRYTRRKNRICYLQEIFSNEMAKVDDSFFHRLEESFLVEEDKKHERHPIFGNIVDEVAYHEKYPTIYHLRKKLVDSTDKADLRLIYLALAHMIKFRGHFLIEGDLNPDNSDVDKLFIQLVQTYNQLFEENPINASGVDAKAILSARLSKSRRLENLIAQLPGEKKNGLFGNLIALSLGLTPNFKSNFDLAEDAKLQLSKDTYDDDLDNLLAQIGDQYADLFLAAKNLSDAILLSDILRVNTEITKAPLSASMIKRYDEHHQDLTLLKALVRQQLPEKYKEIFFDQSKNGYAGYIDGGASQEEFYKFIKPILEKMDGTEELLVKLNREDLLRKQRTFDNGSIPHQIHLGELHAILRRQEDFYPFLKDNREKIEKILTFRIPYYVGPLARGNSRFAWMTRKSEETITPWNFEEVVDKGASAQSFIERMTNFDKNLPNEKVLPKHSLLYEYFTVYNELTKVKYVTEGMRKPAFLSGEQKKAIVDLLFKTNRKVTVKQLKEDYFKKIECFDSVEISGVEDRFNASLGTYHDLLKIIKDKDFLDNEENEDILEDIVLTLTLFEDREMIEERLKTYAHLFDDKVMKQLKRRRYTGWGRLSRKLINGIRDKQSGKTILDFLKSDGFANRNFMQLIHDDSLTFKEDIQKAQVSGQGDSLHEHIANLAGSPAIKKGILQTVKVVDELVKVMGRHKPENIVIEMARENQTTQKGQKNSRERMKRIEEGIKELGSQILKEHPVENTQLQNEKLYLYYLQNGRDMYVDQELDINRLSDYDVDHIVPQSFLKDDSIDNKVLTRSDKARGKSDNVPSEEVVKKMKNYWRQLLNAKLITQRKFDNLTKAERGGLSELDKAGFIKRQLVETRQITKHVAQILDSRMNTKYDENDKLIREVKVITLKSKLVSDFRKDFQFYKVREINNYHHAHDAYLNAVVGTALIKKYPKLESEFVYGDYKVYDVRKMIAKSEQEIGKATAKYFFYSNIMNFFKTEITLANGEIRKRPLIETNGETGEIVWDKGRDFATVRKVLSMPQVNIVKKTEVQTGGFSKESILPKRNSDKLIARKKDWDPKKYGGFDSPTVAYSVLVVAKVEKGKSKKLKSVKELLGITIMERSSFEKNPIDFLEAKGYKEVKKDLIIKLPKYSLFELENGRKRMLASAGELQKGNELALPSKYVNFLYLASHYEKLKGSPEDNEQKQLFVEQHKHYLDEIIEQISEFSKRVILADANLDKVLSAYNKHRDKPIREQAENIIHLFTLTNLGAPAAFKYFDTTIDRKRYTSTKEVLDATLIHQSITGLYETRIDLSQLGGDGGPAPGGGEAAAKGGVPWLMKKPLQLTVLVPLHEYQERLLQQTALPKEQKELLQKLFLKYDALWQHWENQVGHRRIKPHNIATGTLAPRPQKQYPINPKAKPSIQIVIDDLLKQGVLIQQNSTMNTPVYPVPKPDGKWRMVLDYREVNKTIPLIAAQNQHSAGILSSIYRGKYKTTLDLTNGFWAHPITPESYWLTAFTWQGKQYCWTRLPQGFLNSPALFTADVVDLLKEIPNVQAYVDDIYISHDDPQEHLEQLEKIFSILLNAGYVVSLKKSEIAQREVEFLGFNITKEGRGLTDTFKQKLLNITPPKDLKQLQSILGLLNFARNFIPNYSELVKPLYTIVANANGKFISWTEDNSNQLQHIISVLNQADNLEERNPETRLIIKVNSSPSAGYIRYYNEGSKRPIMYVNYIFSKAEAKFTQTEKLLTTMHKGLIKAMDLAMGQEILVYSPIVSMTKIQRTPLPERKALPVRWITWMTYLEDPRIQFHYDKSLPELQQIPNVTEDVIAKTKHPSEFAMVFYTDGSAIKHPDVNKSHSAGMGIAQVQFIPEYKIVHQWSIPLGDHTAQLAEIAAVEFACKKALKISGPVLIVTDSFYVAESANKELPYWKSNGFLNNKKKPLRHVSKWKSIAECLQLKPDIIIMHEKGHQQPMTTLHTEGNNLADKLATQGSYVVHAGKRTADGSEFEKRTADGSEFESPKKKAKVE

SEQ ID NO: 437 - protein, 2094 aa, synthetic construct
MPAAKRVKLDGGDKKYSIGLDIGTNSVGWAVITDEYKVPSKKFKVLGNTDRHSIKKNLIGALLFDSGETAEATRLKRTARRRYTRRKNRICYLQEIFSNEMAKVDDSFFHRLEESFLVEEDKKHERHPIFGNIVDEVAYHEKYPTIYHLRKKLVDSTDKADLRLIYLALAHMIKFRGHFLIEGDLNPDNSDVDKLFIQLVQTYNQLFEENPINASGVDAKAILSARLSKSRRLENLIAQLPGEKKNGLFGNLIALSLGLTPNFKSNFDLAEDAKLQLSKDTYDDDLDNLLAQIGDQYADLFLAAKNLSDAILLSDILRVNTEITKAPLSASMIKRYDEHHQDLTLLKALVRQQLPEKYKEIFFDQSKNGYAGYIDGGASQEEFYKFIKPILEKMDGTEELLVKLNREDLLRKQRTFDNGSIPHQIHLGELHAILRRQEDFYPFLKDNREKIEKILTFRIPYYVGPLARGNSRFAWMTRKSEETITPWNFEEVVDKGASAQSFIERMTNFDKNLPNEKVLPKHSLLYEYFTVYNELTKVKYVTEGMRKPAFLSGEQKKAIVDLLFKTNRKVTVKQLKEDYFKKIECFDSVEISGVEDRFNASLGTYHDLLKIIKDKDFLDNEENEDILEDIVLTLTLFEDREMIEERLKTYAHLFDDKVMKQLKRRRYTGWGRLSRKLINGIRDKQSGKTILDFLKSDGFANRNFMQLIHDDSLTFKEDIQKAQVSGQGDSLHEHIANLAGSPAIKKGILQTVKVVDELVKVMGRHKPENIVIEMARENQTTQKGQKNSRERMKRIEEGIKELGSQILKEHPVENTQLQNEKLYLYYLQNGRDMYVDQELDINRLSDYDVDHIVPQSFLKDDSIDNKVLTRSDKARGKSDNVPSEEVVKKMKNYWRQLLNAKLITQRKFDNLTKAERGGLSELDKAGFIKRQLVETRQITKHVAQILDSRMNTKYDENDKLIREVKVITLKSKLVSDFRKDFQFYKVREINNYHHAHDAYLNAVVGTALIKKYPKLESEFVYGDYKVYDVRKMIAKSEQEIGKATAKYFFYSNIMNFFKTEITLANGEIRKRPLIETNGETGEIVWDKGRDFATVRKVLSMPQVNIVKKTEVQTGGFSKESILPKRNSDKLIARKKDWDPKKYGGFDSPTVAYSVLVVAKVEKGKSKKLKSVKELLGITIMERSSFEKNPIDFLEAKGYKEVKKDLIIKLPKYSLFELENGRKRMLASAGELQKGNELALPSKYVNFLYLASHYEKLKGSPEDNEQKQLFVEQHKHYLDEIIEQISEFSKRVILADANLDKVLSAYNKHRDKPIREQAENIIHLFTLTNLGAPAAFKYFDTTIDRKRYTSTKEVLDATLIHQSITGLYETRIDLSQLGGDGGGSSGSSGSSGSSGSSGSSGGVPWLMKKPLQLTVLVPLHEYQERLLQQTALPKEQKELLQKLFLKYDALWQHWENQVGHRRIKPHNIATGTLAPRPQKQYPINPKAKPSIQIVIDDLLKQGVLIQQNSTMNTPVYPVPKPDGKWRMVLDYREVNKTIPLIAAQNQHSAGILSSIYRGKYKTTLDLTNGFWAHPITPESYWLTAFTWQGKQYCWTRLPQGFLNSPALFNADVVDLLKEIPNVQAYVDDIYISHDDPQEHLEQLEKIFSILLNAGYVVSLKKSEIAQREVEFLGFNITKEGRGLTDTFKQKLLNITPPKDLKQLQSILGLLNFARNFIPNYSELVKPLYTIVAPANGKFISWTEDNSNQLQHIISVLNQADNLEERNPETRLIIKVNSSPSAGYIRYYNEGSKRPIMYVNYIFSKAEAKFTQTEKLLTTMHKGLIKAMDLAMGQEILVYSPIVSMTKIQRTPLPERKALPVRWITWMTYLEDPRIQFHYDKSLPELQQIPNVTEDVIAKTKHPSEFAMVFYTDGSAIKHPDVNKSHSAGMGIAQVQFIPEYKIVHQWSIPLGDHTAQLAEIAAVEFACKKALKISGPVLIVTDSFYVAESANKELPYWKSNGFLNNKKKPLRHVSKWKSIAECLQLKPDIIIMHEKGHQQPMTTLHTEGNNLADKLATQGSYVVHAGKRTADGSEFEKRTADGSEFESPKKKAKVE

SEQ ID NO: 438 - protein, 2087 aa, synthetic construct
MPAAKRVKLDGGDKKYSIGLDIGTNSVGWAVITDEYKVPSKKFKVLGNTDRHSIKKNLIGALLFDSGETAEATRLKRTARRRYTRRKNRICYLQEIFSNEMAKVDDSFFHRLEESFLVEEDKKHERHPIFGNIVDEVAYHEKYPTIYHLRKKLVDSTDKADLRLIYLALAHMIKFRGHFLIEGDLNPDNSDVDKLFIQLVQTYNQLFEENPINASGVDAKAILSARLSKSRRLENLIAQLPGEKKNGLFGNLIALSLGLTPNFKSNFDLAEDAKLQLSKDTYDDDLDNLLAQIGDQYADLFLAAKNLSDAILLSDILRVNTEITKAPLSASMIKRYDEHHQDLTLLKALVRQQLPEKYKEIFFDQSKNGYAGYIDGGASQEEFYKFIKPILEKMDGTEELLVKLNREDLLRKQRTFDNGSIPHQIHLGELHAILRRQEDFYPFLKDNREKIEKILTFRIPYYVGPLARGNSRFAWMTRKSEETITPWNFEEVVDKGASAQSFIERMTNFDKNLPNEKVLPKHSLLYEYFTVYNELTKVKYVTEGMRKPAFLSGEQKKAIVDLLFKTNRKVTVKQLKEDYFKKIECFDSVEISGVEDRFNASLGTYHDLLKIIKDKDFLDNEENEDILEDIVLTLTLFEDREMIEERLKTYAHLFDDKVMKQLKRRRYTGWGRLSRKLINGIRDKQSGKTILDFLKSDGFANRNFMQLIHDDSLTFKEDIQKAQVSGQGDSLHEHIANLAGSPAIKKGILQTVKVVDELVKVMGRHKPENIVIEMARENQTTQKGQKNSRERMKRIEEGIKELGSQILKEHPVENTQLQNEKLYLYYLQNGRDMYVDQELDINRLSDYDVDHIVPQSFLKDDSIDNKVLTRSDKARGKSDNVPSEEVVKKMKNYWRQLLNAKLITQRKFDNLTKAERGGLSELDKAGFIKRQLVETRQITKHVAQILDSRMNTKYDENDKLIREVKVITLKSKLVSDFRKDFQFYKVREINNYHHAHDAYLNAVVGTALIKKYPKLESEFVYGDYKVYDVRKMIAKSEQEIGKATAKYFFYSNIMNFFKTEITLANGEIRKRPLIETNGETGEIVWDKGRDFATVRKVLSMPQVNIVKKTEVQTGGFSKESILPKRNSDKLIARKKDWDPKKYGGFDSPTVAYSVLVVAKVEKGKSKKLKSVKELLGITIMERSSFEKNPIDFLEAKGYKEVKKDLIIKLPKYSLFELENGRKRMLASAGELQKGNELALPSKYVNFLYLASHYEKLKGSPEDNEQKQLFVEQHKHYLDEIIEQISEFSKRVILADANLDKVLSAYNKHRDKPIREQAENIIHLFTLTNLGAPAAFKYFDTTIDRKRYTSTKEVLDATLIHQSITGLYETRIDLSQLGGDGGGSSGGGEAAAKGGVPWLMKKPLQLTVLVPLHEYQERLLQQTALPKEQKELLQKLFLKYDALWQHWENQVGHRRIKPHNIATGTLAPRPQKQYPINPKAKPSIQIVIDDLLKQGVLIQQNSTMNTPVYPVPKPDGKWRMVLDYREVNKTIPLIAAQNQHSAGILSSIYRGKYKTTLDLTNGFWAHPITPESYWLTAFTWQGKQYCWTRLPQGFLNSPALFNADVVDLLKEIPNVQAYVDDIYISHDDPQEHLEQLEKIFSILLNAGYVVSLKKSEIAQREVEFLGFNITKEGRGLTDTFKQKLLNITPPKDLKQLQSILGLLNFARNFIPNYSELVKPLYTIVAPANGKFISWTEDNSNQLQHIISVLNQADNLEERNPETRLIIKVNSSPSAGYIRYYNEGSKRPIMYVNYIFSKAEAKFTQTEKLLTTMHKGLIKAMDLAMGQEILVYSPIVSMTKIQRTPLPERKALPVRWITWMTYLEDPRIQFHYDKSLPELQQIPNVTEDVIAKTKHPSEFAMVFYTDGSAIKHPDVNKSHSAGMGIAQVQFIPEYKIVHQWSIPLGDHTAQLAEIAAVEFACKKALKISGPVLIVTDSFYVAESANKELPYWKSNGFLNNKKKPLRHVSKWKSIAECLQLKPDIIIMHEKGHQQPMTTLHTEGNNLADKLATQGSYVVHAGKRTADGSEFEKRTADGSEFESPKKKAKVE

SEQ ID NO: 439 - protein, 2091 aa, synthetic construct
MPAAKRVKLDGGDKKYSIGLDIGTNSVGWAVITDEYKVPSKKFKVLGNTDRHSIKKNLIGALLFDSGETAEATRLKRTARRRYTRRKNRICYLQEIFSNEMAKVDDSFFHRLEESFLVEEDKKHERHPIFGNIVDEVAYHEKYPTIYHLRKKLVDSTDKADLRLIYLALAHMIKFRGHFLIEGDLNPDNSDVDKLFIQLVQTYNQLFEENPINASGVDAKAILSARLSKSRRLENLIAQLPGEKKNGLFGNLIALSLGLTPNFKSNFDLAEDAKLQLSKDTYDDDLDNLLAQIGDQYADLFLAAKNLSDAILLSDILRVNTEITKAPLSASMIKRYDEHHQDLTLLKALVRQQLPEKYKEIFFDQSKNGYAGYIDGGASQEEFYKFIKPILEKMDGTEELLVKLNREDLLRKQRTFDNGSIPHQIHLGELHAILRRQEDFYPFLKDNREKIEKILTFRIPYYVGPLARGNSRFAWMTRKSEETITPWNFEEVVDKGASAQSFIERMTNFDKNLPNEKVLPKHSLLYEYFTVYNELTKVKYVTEGMRKPAFLSGEQKKAIVDLLFKTNRKVTVKQLKEDYFKKIECFDSVEISGVEDRFNASLGTYHDLLKIIKDKDFLDNEENEDILEDIVLTLTLFEDREMIEERLKTYAHLFDDKVMKQLKRRRYTGWGRLSRKLINGIRDKQSGKTILDFLKSDGFANRNFMQLIHDDSLTFKEDIQKAQVSGQGDSLHEHIANLAGSPAIKKGILQTVKVVDELVKVMGRHKPENIVIEMARENQTTQKGQKNSRERMKRIEEGIKELGSQILKEHPVENTQLQNEKLYLYYLQNGRDMYVDQELDINRLSDYDVDHIVPQSFLKDDSIDNKVLTRSDKARGKSDNVPSEEVVKKMKNYWRQLLNAKLITQRKFDNLTKAERGGLSELDKAGFIKRQLVETRQITKHVAQILDSRMNTKYDENDKLIREVKVITLKSKLVSDFRKDFQFYKVREINNYHHAHDAYLNAVVGTALIKKYPKLESEFVYGDYKVYDVRKMIAKSEQEIGKATAKYFFYSNIMNFFKTEITLANGEIRKRPLIETNGETGEIVWDKGRDFATVRKVLSMPQVNIVKKTEVQTGGFSKESILPKRNSDKLIARKKDWDPKKYGGFDSPTVAYSVLVVAKVEKGKSKKLKSVKELLGITIMERSSFEKNPIDFLEAKGYKEVKKDLIIKLPKYSLFELENGRKRMLASAGELQKGNELALPSKYVNFLYLASHYEKLKGSPEDNEQKQLFVEQHKHYLDEIIEQISEFSKRVILADANLDKVLSAYNKHRDKPIREQAENIIHLFTLTNLGAPAAFKYFDTTIDRKRYTSTKEVLDATLIHQSITGLYETRIDLSQLGGDGGGGGGSEAAAKGGGGSGGVPWLMKKPLQLTVLVPLHEYQERLLQQTALPKEQKELLQKLFLKYDALWQHWENQVGHRRIKPHNIATGTLAPRPQKQYPINPKAKPSIQIVIDDLLKQGVLIQQNSTMNTPVYPVPKPDGKWRMVLDYREVNKTIPLIAAQNQHSAGILSSIYRGKYKTTLDLTNGFWAHPITPESYWLTAFTWQGKQYCWTRLPQGFLNSPALFNADVVDLLKEIPNVQAYVDDIYISHDDPQEHLEQLEKIFSILLNAGYVVSLKKSEIAQREVEFLGFNITKEGRGLTDTFKQKLLNITPPKDLKQLQSILGLLNFARNFIPNYSELVKPLYTIVAPANGKFISWTEDNSNQLQHIISVLNQADNLEERNPETRLIIKVNSSPSAGYIRYYNEGSKRPIMYVNYIFSKAEAKFTQTEKLLTTMHKGLIKAMDLAMGQEILVYSPIVSMTKIQRTPLPERKALPVRWITWMTYLEDPRIQFHYDKSLPELQQIPNVTEDVIAKTKHPSEFAMVFYTDGSAIKHPDVNKSHSAGMGIAQVQFIPEYKIVHQWSIPLGDHTAQLAEIAAVEFACKKALKISGPVLIVTDSFYVAESANKELPYWKSNGFLNNKKKPLRHVSKWKSIAECLQLKPDIIIMHEKGHQQPMTTLHTEGNNLADKLATQGSYVVHAGKRTADGSEFEKRTADGSEFESPKKKAKVE

SEQ ID NO: 440 - protein, 2085 aa, synthetic construct
MPAAKRVKLDGGDKKYSIGLDIGTNSVGWAVITDEYKVPSKKFKVLGNTDRHSIKKNLIGALLFDSGETAEATRLKRTARRRYTRRKNRICYLQEIFSNEMAKVDDSFFHRLEESFLVEEDKKHERHPIFGNIVDEVAYHEKYPTIYHLRKKLVDSTDKADLRLIYLALAHMIKFRGHFLIEGDLNPDNSDVDKLFIQLVQTYNQLFEENPINASGVDAKAILSARLSKSRRLENLIAQLPGEKKNGLFGNLIALSLGLTPNFKSNFDLAEDAKLQLSKDTYDDDLDNLLAQIGDQYADLFLAAKNLSDAILLSDILRVNTEITKAPLSASMIKRYDEHHQDLTLLKALVRQQLPEKYKEIFFDQSKNGYAGYIDGGASQEEFYKFIKPILEKMDGTEELLVKLNREDLLRKQRTFDNGSIPHQIHLGELHAILRRQEDFYPFLKDNREKIEKILTFRIPYYVGPLARGNSRFAWMTRKSEETITPWNFEEVVDKGASAQSFIERMTNFDKNLPNEKVLPKHSLLYEYFTVYNELTKVKYVTEGMRKPAFLSGEQKKAIVDLLFKTNRKVTVKQLKEDYFKKIECFDSVEISGVEDRFNASLGTYHDLLKIIKDKDFLDNEENEDILEDIVLTLTLFEDREMIEERLKTYAHLFDDKVMKQLKRRRYTGWGRLSRKLINGIRDKQSGKTILDFLKSDGFANRNFMQLIHDDSLTFKEDIQKAQVSGQGDSLHEHIANLAGSPAIKKGILQTVKVVDELVKVMGRHKPENIVIEMARENQTTQKGQKNSRERMKRIEEGIKELGSQILKEHPVENTQLQNEKLYLYYLQNGRDMYVDQELDINRLSDYDVDHIVPQSFLKDDSIDNKVLTRSDKARGKSDNVPSEEVVKKMKNYWRQLLNAKLITQRKFDNLTKAERGGLSELDKAGFIKRQLVETRQITKHVAQILDSRMNTKYDENDKLIREVKVITLKSKLVSDFRKDFQFYKVREINNYHHAHDAYLNAVVGTALIKKYPKLESEFVYGDYKVYDVRKMIAKSEQEIGKATAKYFFYSNIMNFFKTEITLANGEIRKRPLIETNGETGEIVWDKGRDFATVRKVLSMPQVNIVKKTEVQTGGFSKESILPKRNSDKLIARKKDWDPKKYGGFDSPTVAYSVLVVAKVEKGKSKKLKSVKELLGITIMERSSFEKNPIDFLEAKGYKEVKKDLIIKLPKYSLFELENGRKRMLASAGELQKGNELALPSKYVNFLYLASHYEKLKGSPEDNEQKQLFVEQHKHYLDEIIEQISEFSKRVILADANLDKVLSAYNKHRDKPIREQAENIIHLFTLTNLGAPAAFKYFDTTIDRKRYTSTKEVLDATLIHQSITGLYETRIDLSQLGGDGGPAPGSSGGSGGVPWLMKKPLQLTVLVPLHEYQERLLQQTALPKEQKELLQKLFLKYDALWQHWENQVGHRRIKPHNIATGTLAPRPQKQYPINPKAKPSIQIVIDDLLKQGVLIQQNSTMNTPVYPVPKPDGKWRMVLDYREVNKTIPLIAAQNQHSAGILSSIYRGKYKTTLDLTNGFWAHPITPESYWLTAFTWQGKQYCWTRLPQGFLNSPALFNADVVDLLKEIPNVQAYVDDIYISHDDPQEHLEQLEKIFSILLNAGYVVSLKKSEIAQREVEFLGFNITKEGRGLTDTFKQKLLNITPPKDLKQLQSILGLLNFARNFIPNYSELVKPLYTIVAPANGKFISWTEDNSNQLQHIISVLNQADNLEERNPETRLIIKVNSSPSAGYIRYYNEGSKRPIMYVNYIFSKAEAKFTQTEKLLTTMHKGLIKAMDLAMGQEILVYSPIVSMTKIQRTPLPERKALPVRWITWMTYLEDPRIQFHYDKSLPELQQIPNVTEDVIAKTKHPSEFAMVFYTDGSAIKHPDVNKSHSAGMGIAQVQFIPEYKIVHQWSIPLGDHTAQLAEIAAVEFACKKALKISGPVLIVTDSFYVAESANKELPYWKSNGFLNNKKKPLRHVSKWKSIAECLQLKPDIIIMHEKGHQQPMTTLHTEGNNLADKLATQGSYVVHAGKRTADGSEFEKRTADGSEFESPKKKAKVE

SEQ ID NO: 441 - protein, 2087 aa, synthetic construct
MPAAKRVKLDGGDKKYSIGLDIGTNSVGWAVITDEYKVPSKKFKVLGNTDRHSIKKNLIGALLFDSGETAEATRLKRTARRRYTRRKNRICYLQEIFSNEMAKVDDSFFHRLEESFLVEEDKKHERHPIFGNIVDEVAYHEKYPTIYHLRKKLVDSTDKADLRLIYLALAHMIKFRGHFLIEGDLNPDNSDVDKLFIQLVQTYNQLFEENPINASGVDAKAILSARLSKSRRLENLIAQLPGEKKNGLFGNLIALSLGLTPNFKSNFDLAEDAKLQLSKDTYDDDLDNLLAQIGDQYADLFLAAKNLSDAILLSDILRVNTEITKAPLSASMIKRYDEHHQDLTLLKALVRQQLPEKYKEIFFDQSKNGYAGYIDGGASQEEFYKFIKPILEKMDGTEELLVKLNREDLLRKQRTFDNGSIPHQIHLGELHAILRRQEDFYPFLKDNREKIEKILTFRIPYYVGPLARGNSRFAWMTRKSEETITPWNFEEVVDKGASAQSFIERMTNFDKNLPNEKVLPKHSLLYEYFTVYNELTKVKYVTEGMRKPAFLSGEQKKAIVDLLFKTNRKVTVKQLKEDYFKKIECFDSVEISGVEDRFNASLGTYHDLLKIIKDKDFLDNEENEDILEDIVLTLTLFEDREMIEERLKTYAHLFDDKVMKQLKRRRYTGWGRLSRKLINGIRDKQSGKTILDFLKSDGFANRNFMQLIHDDSLTFKEDIQKAQVSGQGDSLHEHIANLAGSPAIKKGILQTVKVVDELVKVMGRHKPENIVIEMARENQTTQKGQKNSRERMKRIEEGIKELGSQILKEHPVENTQLQNEKLYLYYLQNGRDMYVDQELDINRLSDYDVDHIVPQSFLKDDSIDNKVLTRSDKARGKSDNVPSEEVVKKMKNYWRQLLNAKLITQRKFDNLTKAERGGLSELDKAGFIKRQLVETRQITKHVAQILDSRMNTKYDENDKLIREVKVITLKSKLVSDFRKDFQFYKVREINNYHHAHDAYLNAVVGTALIKKYPKLESEFVYGDYKVYDVRKMIAKSEQEIGKATAKYFFYSNIMNFFKTEITLANGEIRKRPLIETNGETGEIVWDKGRDFATVRKVLSMPQVNIVKKTEVQTGGFSKESILPKRNSDKLIARKKDWDPKKYGGFDSPTVAYSVLVVAKVEKGKSKKLKSVKELLGITIMERSSFEKNPIDFLEAKGYKEVKKDLIIKLPKYSLFELENGRKRMLASAGELQKGNELALPSKYVNFLYLASHYEKLKGSPEDNEQKQLFVEQHKHYLDEIIEQISEFSKRVILADANLDKVLSAYNKHRDKPIREQAENIIHLFTLTNLGAPAAFKYFDTTIDRKRYTSTKEVLDATLIHQSITGLYETRIDLSQLGGDGGGGGEAAAKPAPGGVPWLMKKPLQLTVLVPLHEYQERLLQQTALPKEQKELLQKLFLKYDALWQHWENQVGHRRIKPHNIATGTLAPRPQKQYPINPKAKPSIQIVIDDLLKQGVLIQQNSTMNTPVYPVPKPDGKWRMVLDYREVNKTIPLIAAQNQHSAGILSSIYRGKYKTTLDLTNGFWAHPITPESYWLTAFTWQGKQYCWTRLPQGFLNSPALFNADVVDLLKEIPNVQAYVDDIYISHDDPQEHLEQLEKIFSILLNAGYVVSLKKSEIAQREVEFLGFNITKEGRGLTDTFKQKLLNITPPKDLKQLQSILGLLNFARNFIPNYSELVKPLYTIVAPANGKFISWTEDNSNQLQHIISVLNQADNLEERNPETRLIIKVNSSPSAGYIRYYNEGSKRPIMYVNYIFSKAEAKFTQTEKLLTTMHKGLIKAMDLAMGQEILVYSPIVSMTKIQRTPLPERKALPVRWITWMTYLEDPRIQFHYDKSLPELQQIPNVTEDVIAKTKHPSEFAMVFYTDGSAIKHPDVNKSHSAGMGIAQVQFIPEYKIVHQWSIPLGDHTAQLAEIAAVEFACKKALKISGPVLIVTDSFYVAESANKELPYWKSNGFLNNKKKPLRHVSKWKSIAECLQLKPDIIIMHEKGHQQPMTTLHTEGNNLADKLATQGSYVVHAGKRTADGSEFEKRTADGSEFESPKKKAKVE

SEQ ID NO: 442 - protein, 2087 aa, synthetic construct
MPAAKRVKLDGGDKKYSIGLDIGTNSVGWAVITDEYKVPSKKFKVLGNTDRHSIKKNLIGALLFDSGETAEATRLKRTARRRYTRRKNRICYLQEIFSNEMAKVDDSFFHRLEESFLVEEDKKHERHPIFGNIVDEVAYHEKYPTIYHLRKKLVDSTDKADLRLIYLALAHMIKFRGHFLIEGDLNPDNSDVDKLFIQLVQTYNQLFEENPINASGVDAKAILSARLSKSRRLENLIAQLPGEKKNGLFGNLIALSLGLTPNFKSNFDLAEDAKLQLSKDTYDDDLDNLLAQIGDQYADLFLAAKNLSDAILLSDILRVNTEITKAPLSASMIKRYDEHHQDLTLLKALVRQQLPEKYKEIFFDQSKNGYAGYIDGGASQEEFYKFIKPILEKMDGTEELLVKLNREDLLRKQRTFDNGSIPHQIHLGELHAILRRQEDFYPFLKDNREKIEKILTFRIPYYVGPLARGNSRFAWMTRKSEETITPWNFEEVVDKGASAQSFIERMTNFDKNLPNEKVLPKHSLLYEYFTVYNELTKVKYVTEGMRKPAFLSGEQKKAIVDLLFKTNRKVTVKQLKEDYFKKIECFDSVEISGVEDRFNASLGTYHDLLKIIKDKDFLDNEENEDILEDIVLTLTLFEDREMIEERLKTYAHLFDDKVMKQLKRRRYTGWGRLSRKLINGIRDKQSGKTILDFLKSDGFANRNFMQLIHDDSLTFKEDIQKAQVSGQGDSLHEHIANLAGSPAIKKGILQTVKVVDELVKVMGRHKPENIVIEMARENQTTQKGQKNSRERMKRIEEGIKELGSQILKEHPVENTQLQNEKLYLYYLQNGRDMYVDQELDINRLSDYDVDHIVPQSFLKDDSIDNKVLTRSDKARGKSDNVPSEEVVKKMKNYWRQLLNAKLITQRKFDNLTKAERGGLSELDKAGFIKRQLVETRQITKHVAQILDSRMNTKYDENDKLIREVKVITLKSKLVSDFRKDFQFYKVREINNYHHAHDAYLNAVVGTALIKKYPKLESEFVYGDYKVYDVRKMIAKSEQEIGKATAKYFFYSNIMNFFKTEITLANGEIRKRPLIETNGETGEIVWDKGRDFATVRKVLSMPQVNIVKKTEVQTGGFSKESILPKRNSDKLIARKKDWDPKKYGGFDSPTVAYSVLVVAKVEKGKSKKLKSVKELLGITIMERSSFEKNPIDFLEAKGYKEVKKDLIIKLPKYSLFELENGRKRMLASAGELQKGNELALPSKYVNFLYLASHYEKLKGSPEDNEQKQLFVEQHKHYLDEIIEQISEFSKRVILADANLDKVLSAYNKHRDKPIREQAENIIHLFTLTNLGAPAAFKYFDTTIDRKRYTSTKEVLDATLIHQSITGLYETRIDLSQLGGDGGGGSPAPEAAAKGGVPWLMKKPLQLTVLVPLHEYQERLLQQTALPKEQKELLQKLFLKYDALWQHWENQVGHRRIKPHNIATGTLAPRPQKQYPINPKAKPSIQIVIDDLLKQGVLIQQNSTMNTPVYPVPKPDGKWRMVLDYREVNKTIPLIAAQNQHSAGILSSIYRGKYKTTLDLTNGFWAHPITPESYWLTAFTWQGKQYCWTRLPQGFLNSPALFNADVVDLLKEIPNVQAYVDDIYISHDDPQEHLEQLEKIFSILLNAGYVVSLKKSEIAQREVEFLGFNITKEGRGLTDTFKQKLLNITPPKDLKQLQSILGLLNFARNFIPNYSELVKPLYTIVAPANGKFISWTEDNSNQLQHIISVLNQADNLEERNPETRLIIKVNSSPSAGYIRYYNEGSKRPIMYVNYIFSKAEAKFTQTEKLLTTMHKGLIKAMDLAMGQEILVYSPIVSMTKIQRTPLPERKALPVRWITWMTYLEDPRIQFHYDKSLPELQQIPNVTEDVIAKTKHPSEFAMVFYTDGSAIKHPDVNKSHSAGMGIAQVQFIPEYKIVHQWSIPLGDHTAQLAEIAAVEFACKKALKISGPVLIVTDSFYVAESANKELPYWKSNGFLNNKKKPLRHVSKWKSIAECLQLKPDIIIMHEKGHQQPMTTLHTEGNNLADKLATQGSYVVHAGKRTADGSEFEKRTADGSEFESPKKKAKVE

SEQ ID NO: 443 - protein, 2084 aa, synthetic construct
MPAAKRVKLDGGDKKYSIGLDIGTNSVGWAVITDEYKVPSKKFKVLGNTDRHSIKKNLIGALLFDSGETAEATRLKRTARRRYTRRKNRICYLQEIFSNEMAKVDDSFFHRLEESFLVEEDKKHERHPIFGNIVDEVAYHEKYPTIYHLRKKLVDSTDKADLRLIYLALAHMIKFRGHFLIEGDLNPDNSDVDKLFIQLVQTYNQLFEENPINASGVDAKAILSARLSKSRRLENLIAQLPGEKKNGLFGNLIALSLGLTPNFKSNFDLAEDAKLQLSKDTYDDDLDNLLAQIGDQYADLFLAAKNLSDAILLSDILRVNTEITKAPLSASMIKRYDEHHQDLTLLKALVRQQLPEKYKEIFFDQSKNGYAGYIDGGASQEEFYKFIKPILEKMDGTEELLVKLNREDLLRKQRTFDNGSIPHQIHLGELHAILRRQEDFYPFLKDNREKIEKILTFRIPYYVGPLARGNSRFAWMTRKSEETITPWNFEEVVDKGASAQSFIERMTNFDKNLPNEKVLPKHSLLYEYFTVYNELTKVKYVTEGMRKPAFLSGEQKKAIVDLLFKTNRKVTVKQLKEDYFKKIECFDSVEISGVEDRFNASLGTYHDLLKIIKDKDFLDNEENEDILEDIVLTLTLFEDREMIEERLKTYAHLFDDKVMKQLKRRRYTGWGRLSRKLINGIRDKQSGKTILDFLKSDGFANRNFMQLIHDDSLTFKEDIQKAQVSGQGDSLHEHIANLAGSPAIKKGILQTVKVVDELVKVMGRHKPENIVIEMARENQTTQKGQKNSRERMKRIEEGIKELGSQILKEHPVENTQLQNEKLYLYYLQNGRDMYVDQELDINRLSDYDVDHIVPQSFLKDDSIDNKVLTRSDKARGKSDNVPSEEVVKKMKNYWRQLLNAKLITQRKFDNLTKAERGGLSELDKAGFIKRQLVETRQITKHVAQILDSRMNTKYDENDKLIREVKVITLKSKLVSDFRKDFQFYKVREINNYHHAHDAYLNAVVGTALIKKYPKLESEFVYGDYKVYDVRKMIAKSEQEIGKATAKYFFYSNIMNFFKTEITLANGEIRKRPLIETNGETGEIVWDKGRDFATVRKVLSMPQVNIVKKTEVQTGGFSKESILPKRNSDKLIARKKDWDPKKYGGFDSPTVAYSVLVVAKVEKGKSKKLKSVKELLGITIMERSSFEKNPIDFLEAKGYKEVKKDLIIKLPKYSLFELENGRKRMLASAGELQKGNELALPSKYVNFLYLASHYEKLKGSPEDNEQKQLFVEQHKHYLDEIIEQISEFSKRVILADANLDKVLSAYNKHRDKPIREQAENIIHLFTLTNLGAPAAFKYFDTTIDRKRYTSTKEVLDATLIHQSITGLYETRIDLSQLGGDGGEAAAKGGGGGVPWLMKKPLQLTVLVPLHEYQERLLQQTALPKEQKELLQKLFLKYDALWQHWENQVGHRRIKPHNIATGTLAPRPQKQYPINPKAKPSIQIVIDDLLKQGVLIQQNSTMNTPVYPVPKPDGKWRMVLDYREVNKTIPLIAAQNQHSAGILSSIYRGKYKTTLDLTNGFWAHPITPESYWLTAFTWQGKQYCWTRLPQGFLNSPALFNADVVDLLKEIPNVQAYVDDIYISHDDPQEHLEQLEKIFSILLNAGYVVSLKKSEIAQREVEFLGFNITKEGRGLTDTFKQKLLNITPPKDLKQLQSILGLLNFARNFIPNYSELVKPLYTIVAPANGKFISWTEDNSNQLQHIISVLNQADNLEERNPETRLIIKVNSSPSAGYIRYYNEGSKRPIMYVNYIFSKAEAKFTQTEKLLTTMHKGLIKAMDLAMGQEILVYSPIVSMTKIQRTPLPERKALPVRWITWMTYLEDPRIQFHYDKSLPELQQIPNVTEDVIAKTKHPSEFAMVFYTDGSAIKHPDVNKSHSAGMGIAQVQFIPEYKIVHQWSIPLGDHTAQLAEIAAVEFACKKALKISGPVLIVTDSFYVAESANKELPYWKSNGFLNNKKKPLRHVSKWKSIAECLQLKPDIIIMHEKGHQQPMTTLHTEGNNLADKLATQGSYVVHAGKRTADGSEFEKRTADGSEFESPKKKAKVE

SEQ ID NO: 444 - protein, 2087 aa, synthetic construct
MPAAKRVKLDGGDKKYSIGLDIGTNSVGWAVITDEYKVPSKKFKVLGNTDRHSIKKNLIGALLFDSGETAEATRLKRTARRRYTRRKNRICYLQEIFSNEMAKVDDSFFHRLEESFLVEEDKKHERHPIFGNIVDEVAYHEKYPTIYHLRKKLVDSTDKADLRLIYLALAHMIKFRGHFLIEGDLNPDNSDVDKLFIQLVQTYNQLFEENPINASGVDAKAILSARLSKSRRLENLIAQLPGEKKNGLFGNLIALSLGLTPNFKSNFDLAEDAKLQLSKDTYDDDLDNLLAQIGDQYADLFLAAKNLSDAILLSDILRVNTEITKAPLSASMIKRYDEHHQDLTLLKALVRQQLPEKYKEIFFDQSKNGYAGYIDGGASQEEFYKFIKPILEKMDGTEELLVKLNREDLLRKQRTFDNGSIPHQIHLGELHAILRRQEDFYPFLKDNREKIEKILTFRIPYYVGPLARGNSRFAWMTRKSEETITPWNFEEVVDKGASAQSFIERMTNFDKNLPNEKVLPKHSLLYEYFTVYNELTKVKYVTEGMRKPAFLSGEQKKAIVDLLFKTNRKVTVKQLKEDYFKKIECFDSVEISGVEDRFNASLGTYHDLLKIIKDKDFLDNEENEDILEDIVLTLTLFEDREMIEERLKTYAHLFDDKVMKQLKRRRYTGWGRLSRKLINGIRDKQSGKTILDFLKSDGFANRNFMQLIHDDSLTFKEDIQKAQVSGQGDSLHEHIANLAGSPAIKKGILQTVKVVDELVKVMGRHKPENIVIEMARENQTTQKGQKNSRERMKRIEEGIKELGSQILKEHPVENTQLQNEKLYLYYLQNGRDMYVDQELDINRLSDYDVDHIVPQSFLKDDSIDNKVLTRSDKARGKSDNVPSEEVVKKMKNYWRQLLNAKLITQRKFDNLTKAERGGLSELDKAGFIKRQLVETRQITKHVAQILDSRMNTKYDENDKLIREVKVITLKSKLVSDFRKDFQFYKVREINNYHHAHDAYLNAVVGTALIKKYPKLESEFVYGDYKVYDVRKMIAKSEQEIGKATAKYFFYSNIMNFFKTEITLANGEIRKRPLIETNGETGEIVWDKGRDFATVRKVLSMPQVNIVKKTEVQTGGFSKESILPKRNSDKLIARKKDWDPKKYGGFDSPTVAYSVLVVAKVEKGKSKKLKSVKELLGITIMERSSFEKNPIDFLEAKGYKEVKKDLIIKLPKYSLFELENGRKRMLASAGELQKGNELALPSKYVNFLYLASHYEKLKGSPEDNEQKQLFVEQHKHYLDEIIEQISEFSKRVILADANLDKVLSAYNKHRDKPIREQAENIIHLFTLTNLGAPAAFKYFDTTIDRKRYTSTKEVLDATLIHQSITGLYETRIDLSQLGGDGGPAPGGSEAAAKGGVPWLMKKPLQLTVLVPLHEYQERLLQQTALPKEQKELLQKLFLKYDALWQHWENQVGHRRIKPHNIATGTLAPRPQKQYPINPKAKPSIQIVIDDLLKQGVLIQQNSTMNTPVYPVPKPDGKWRMVLDYREVNKTIPLIAAQNQHSAGILSSIYRGKYKTTLDLTNGFWAHPITPESYWLTAFTWQGKQYCWTRLPQGFLNSPALFNADVVDLLKEIPNVQAYVDDIYISHDDPQEHLEQLEKIFSILLNAGYVVSLKKSEIAQREVEFLGFNITKEGRGLTDTFKQKLLNITPPKDLKQLQSILGLLNFARNFIPNYSELVKPLYTIVAPANGKFISWTEDNSNQLQHIISVLNQADNLEERNPETRLIIKVNSSPSAGYIRYYNEGSKRPIMYVNYIFSKAEAKFTQTEKLLTTMHKGLIKAMDLAMGQEILVYSPIVSMTKIQRTPLPERKALPVRWITWMTYLEDPRIQFHYDKSLPELQQIPNVTEDVIAKTKHPSEFAMVFYTDGSAIKHPDVNKSHSAGMGIAQVQFIPEYKIVHQWSIPLGDHTAQLAEIAAVEFACKKALKISGPVLIVTDSFYVAESANKELPYWKSNGFLNNKKKPLRHVSKWKSIAECLQLKPDIIIMHEKGHQQPMTTLHTEGNNLADKLATQGSYVVHAGKRTADGSEFEKRTADGSEFESPKKKAKVE

SEQ ID NO: 445 - protein, 2091 aa, synthetic construct
MPAAKRVKLDGGDKKYSIGLDIGTNSVGWAVITDEYKVPSKKFKVLGNTDRHSIKKNLIGALLFDSGETAEATRLKRTARRRYTRRKNRICYLQEIFSNEMAKVDDSFFHRLEESFLVEEDKKHERHPIFGNIVDEVAYHEKYPTIYHLRKKLVDSTDKADLRLIYLALAHMIKFRGHFLIEGDLNPDNSDVDKLFIQLVQTYNQLFEENPINASGVDAKAILSARLSKSRRLENLIAQLPGEKKNGLFGNLIALSLGLTPNFKSNFDLAEDAKLQLSKDTYDDDLDNLLAQIGDQYADLFLAAKNLSDAILLSDILRVNTEITKAPLSASMIKRYDEHHQDLTLLKALVRQQLPEKYKEIFFDQSKNGYAGYIDGGASQEEFYKFIKPILEKMDGTEELLVKLNREDLLRKQRTFDNGSIPHQIHLGELHAILRRQEDFYPFLKDNREKIEKILTFRIPYYVGPLARGNSRFAWMTRKSEETITPWNFEEVVDKGASAQSFIERMTNFDKNLPNEKVLPKHSLLYEYFTVYNELTKVKYVTEGMRKPAFLSGEQKKAIVDLLFKTNRKVTVKQLKEDYFKKIECFDSVEISGVEDRFNASLGTYHDLLKIIKDKDFLDNEENEDILEDIVLTLTLFEDREMIEERLKTYAHLFDDKVMKQLKRRRYTGWGRLSRKLINGIRDKQSGKTILDFLKSDGFANRNFMQLIHDDSLTFKEDIQKAQVSGQGDSLHEHIANLAGSPAIKKGILQTVKVVDELVKVMGRHKPENIVIEMARENQTTQKGQKNSRERMKRIEEGIKELGSQILKEHPVENTQLQNEKLYLYYLQNGRDMYVDQELDINRLSDYDVDHIVPQSFLKDDSIDNKVLTRSDKARGKSDNVPSEEVVKKMKNYWRQLLNAKLITQRKFDNLTKAERGGLSELDKAGFIKRQLVETRQITKHVAQILDSRMNTKYDENDKLIREVKVITLKSKLVSDFRKDFQFYKVREINNYHHAHDAYLNAVVGTALIKKYPKLESEFVYGDYKVYDVRKMIAKSEQEIGKATAKYFFYSNIMNFFKTEITLANGEIRKRPLIETNGETGEIVWDKGRDFATVRKVLSMPQVNIVKKTEVQTGGFSKESILPKRNSDKLIARKKDWDPKKYGGFDSPTVAYSVLVVAKVEKGKSKKLKSVKELLGITIMERSSFEKNPIDFLEAKGYKEVKKDLIIKLPKYSLFELENGRKRMLASAGELQKGNELALPSKYVNFLYLASHYEKLKGSPEDNEQKQLFVEQHKHYLDEIIEQISEFSKRVILADANLDKVLSAYNKHRDKPIREQAENIIHLFTLTNLGAPAAFKYFDTTIDRKRYTSTKEVLDATLIHQSITGLYETRIDLSQLGGDGGGGGGSEAAAKGGGGSGGVPWLMKKPLQLTVLVPLHEYQERLLQQTALPKEQKELLQKLFLKYDALWQHWENQVGHRRIKPHNIATGTLAPRPQKQYPINPKAKPSIQIVIDDLLKQGVLIQQNSTMNTPVYPVPKPDGKWRMVLDYREVNKTIPLIAAQNQHSAGILSSIYRGKYKTTLDLTNGFWAHPITPESYWLTAFTWQGKQYCWTRLPQGFLNSPALFNADVVDLLKEIPNVQAYVDDIYISHDDPQEHLEQLEKIFSILLNAGYVVSLKKSEIAQREVEFLGFNITKEGRGLTDTFKQKLLNITPPKDLKQLQSILGKLNFARNFIPNYSELVKPLYTIVAPANGKFISWTEDNSNQLQHIISVLNQADNLEERNPETRLIIKVNSSPSAGYIRYYNEGSKRPIMYVNYIFSKAEAKFTQTEKLLTTMHKGLIKAMDLAMGQEILVYSPIVSMTKIQRTPLPERKALPVRWITWMTYLEDPRIQFHYDKSLPELQQIPNVTEDVIAKTKHPSEFAMVFYTDGSAIKHPDVNKSHSAGMGIAQVQFIPEYKIVHQWSIPLGDHTAQLAEIAAVEFACKKALKISGPVLIVTDSFYVAESANKELPYWKSNGFLNNKKKPLRHVSKWKSIAECLQLKPDIIIMHEKGHQQPMTTLHTEGNNLADKLATQGSYVVHAGKRTADGSEFEKRTADGSEFESPKKKAKVE

SEQ ID NO: 446 - protein, 2082 aa, synthetic construct
MPAAKRVKLDGGDKKYSIGLDIGTNSVGWAVITDEYKVPSKKFKVLGNTDRHSIKKNLIGALLFDSGETAEATRLKRTARRRYTRRKNRICYLQEIFSNEMAKVDDSFFHRLEESFLVEEDKKHERHPIFGNIVDEVAYHEKYPTIYHLRKKLVDSTDKADLRLIYLALAHMIKFRGHFLIEGDLNPDNSDVDKLFIQLVQTYNQLFEENPINASGVDAKAILSARLSKSRRLENLIAQLPGEKKNGLFGNLIALSLGLTPNFKSNFDLAEDAKLQLSKDTYDDDLDNLLAQIGDQYADLFLAAKNLSDAILLSDILRVNTEITKAPLSASMIKRYDEHHQDLTLLKALVRQQLPEKYKEIFFDQSKNGYAGYIDGGASQEEFYKFIKPILEKMDGTEELLVKLNREDLLRKQRTFDNGSIPHQIHLGELHAILRRQEDFYPFLKDNREKIEKILTFRIPYYVGPLARGNSRFAWMTRKSEETITPWNFEEVVDKGASAQSFIERMTNFDKNLPNEKVLPKHSLLYEYFTVYNELTKVKYVTEGMRKPAFLSGEQKKAIVDLLFKTNRKVTVKQLKEDYFKKIECFDSVEISGVEDRFNASLGTYHDLLKIIKDKDFLDNEENEDILEDIVLTLTLFEDREMIEERLKTYAHLFDDKVMKQLKRRRYTGWGRLSRKLINGIRDKQSGKTILDFLKSDGFANRNFMQLIHDDSLTFKEDIQKAQVSGQGDSLHEHIANLAGSPAIKKGILQTVKVVDELVKVMGRHKPENIVIEMARENQTTQKGQKNSRERMKRIEEGIKELGSQILKEHPVENTQLQNEKLYLYYLQNGRDMYVDQELDINRLSDYDVDHIVPQSFLKDDSIDNKVLTRSDKARGKSDNVPSEEVVKKMKNYWRQLLNAKLITQRKFDNLTKAERGGLSELDKAGFIKRQLVETRQITKHVAQILDSRMNTKYDENDKLIREVKVITLKSKLVSDFRKDFQFYKVREINNYHHAHDAYLNAVVGTALIKKYPKLESEFVYGDYKVYDVRKMIAKSEQEIGKATAKYFFYSNIMNFFKTEITLANGEIRKRPLIETNGETGEIVWDKGRDFATVRKVLSMPQVNIVKKTEVQTGGFSKESILPKRNSDKLIARKKDWDPKKYGGFDSPTVAYSVLVVAKVEKGKSKKLKSVKELLGITIMERSSFEKNPIDFLEAKGYKEVKKDLIIKLPKYSLFELENGRKRMLASAGELQKGNELALPSKYVNFLYLASHYEKLKGSPEDNEQKQLFVEQHKHYLDEIIEQISEFSKRVILADANLDKVLSAYNKHRDKPIREQAENIIHLFTLTNLGAPAAFKYFDTTIDRKRYTSTKEVLDATLIHQSITGLYETRIDLSQLGGDGGGGGGSSGGVPWLMKKPLQLTVLVPLHEYQERLLQQTALPKEQKELLQKLFLKYDALWQHWENQVGHRRIKPHNIATGTLAPRPQKQYPINPKAKPSIQIVIDDLLKQGVLIQQNSTMNTPVYPVPKPDGKWRMVLDYREVNKTIPLIAAQNQHSAGILSSIYRGKYKTTLDLTNGFWAHPITPESYWLTAFTWQGKQYCWTRLPQGFLNSPALFNADVVDLLKEIPNVQAYVDDIYISHDDPQEHLEQLEKIFSILLNAGYVVSLKKSEIAQREVEFLGFNITKEGRGLTDTFKQKLLNITPPKDLKQLQSILGKLNFARNFIPNYSELVKPLYTIVAPANGKFISWTEDNSNQLQHIISVLNQADNLEERNPETRLIIKVNSSPSAGYIRYYNEGSKRPIMYVNYIFSKAEAKFTQTEKLLTTMHKGLIKAMDLAMGQEILVYSPIVSMTKIQRTPLPERKALPVRWITWMTYLEDPRIQFHYDKSLPELQQIPNVTEDVIAKTKHPSEFAMVFYTDGSAIKHPDVNKSHSAGMGIAQVQFIPEYKIVHQWSIPLGDHTAQLAEIAAVEFACKKALKISGPVLIVTDSFYVAESANKELPYWKSNGFLNNKKKPLRHVSKWKSIAECLQLKPDIIIMHEKGHQQPMTTLHTEGNNLADKLATQGSYVVHAGKRTADGSEFEKRTADGSEFESPKKKAKVE

SEQ ID NO: 447 - protein, 2101 aa, synthetic construct
MPAAKRVKLDGGDKKYSIGLDIGTNSVGWAVITDEYKVPSKKFKVLGNTDRHSIKKNLIGALLFDSGETAEATRLKRTARRRYTRRKNRICYLQEIFSNEMAKVDDSFFHRLEESFLVEEDKKHERHPIFGNIVDEVAYHEKYPTIYHLRKKLVDSTDKADLRLIYLALAHMIKFRGHFLIEGDLNPDNSDVDKLFIQLVQTYNQLFEENPINASGVDAKAILSARLSKSRRLENLIAQLPGEKKNGLFGNLIALSLGLTPNFKSNFDLAEDAKLQLSKDTYDDDLDNLLAQIGDQYADLFLAAKNLSDAILLSDILRVNTEITKAPLSASMIKRYDEHHQDLTLLKALVRQQLPEKYKEIFFDQSKNGYAGYIDGGASQEEFYKFIKPILEKMDGTEELLVKLNREDLLRKQRTFDNGSIPHQIHLGELHAILRRQEDFYPFLKDNREKIEKILTFRIPYYVGPLARGNSRFAWMTRKSEETITPWNFEEVVDKGASAQSFIERMTNFDKNLPNEKVLPKHSLLYEYFTVYNELTKVKYVTEGMRKPAFLSGEQKKAIVDLLFKTNRKVTVKQLKEDYFKKIECFDSVEISGVEDRFNASLGTYHDLLKIIKDKDFLDNEENEDILEDIVLTLTLFEDREMIEERLKTYAHLFDDKVMKQLKRRRYTGWGRLSRKLINGIRDKQSGKTILDFLKSDGFANRNFMQLIHDDSLTFKEDIQKAQVSGQGDSLHEHIANLAGSPAIKKGILQTVKVVDELVKVMGRHKPENIVIEMARENQTTQKGQKNSRERMKRIEEGIKELGSQILKEHPVENTQLQNEKLYLYYLQNGRDMYVDQELDINRLSDYDVDHIVPQSFLKDDSIDNKVLTRSDKARGKSDNVPSEEVVKKMKNYWRQLLNAKLITQRKFDNLTKAERGGLSELDKAGFIKRQLVETRQITKHVAQILDSRMNTKYDENDKLIREVKVITLKSKLVSDFRKDFQFYKVREINNYHHAHDAYLNAVVGTALIKKYPKLESEFVYGDYKVYDVRKMIAKSEQEIGKATAKYFFYSNIMNFFKTEITLANGEIRKRPLIETNGETGEIVWDKGRDFATVRKVLSMPQVNIVKKTEVQTGGFSKESILPKRNSDKLIARKKDWDPKKYGGFDSPTVAYSVLVVAKVEKGKSKKLKSVKELLGITIMERSSFEKNPIDFLEAKGYKEVKKDLIIKLPKYSLFELENGRKRMLASAGELQKGNELALPSKYVNFLYLASHYEKLKGSPEDNEQKQLFVEQHKHYLDEIIEQISEFSKRVILADANLDKVLSAYNKHRDKPIREQAENIIHLFTLTNLGAPAAFKYFDTTIDRKRYTSTKEVLDATLIHQSITGLYETRIDLSQLGGDGGEAAAKEAAAKEAAAKEAAAKEAAAKGGVPWLMKKPLQLTVLVPLHEYQERLLQQTALPKEQKELLQKLFLKYDALWQHWENQVGHRRIKPHNIATGTLAPRPQKQYPINPKAKPSIQIVIDDLLKQGVLIQQNSTMNTPVYPVPKPDGKWRMVLDYREVNKTIPLIAAQNQHSAGILSSIYRGKYKTTLDLTNGFWAHPITPESYWLTAFTWQGKQYCWTRLPQGFLNSPALFNADVVDLLKEIPNVQAYVDDIYISHDDPQEHLEQLEKIFSILLNAGYVVSLKKSEIAQREVEFLGFNITKEGRGLTDTFKQKLLNITPPKDLKQLQSILGKLNFARNFIPNYSELVKPLYTIVAPANGKFISWTEDNSNQLQHIISVLNQADNLEERNPETRLIIKVNSSPSAGYIRYYNEGSKRPIMYVNYIFSKAEAKFTQTEKLLTTMHKGLIKAMDLAMGQEILVYSPIVSMTKIQRTPLPERKALPVRWITWMTYLEDPRIQFHYDKSLPELQQIPNVTEDVIAKTKHPSEFAMVFYTDGSAIKHPDVNKSHSAGMGIAQVQFIPEYKIVHQWSIPLGDHTAQLAEIAAVEFACKKALKISGPVLIVTDSFYVAESANKELPYWKSNGFLNNKKKPLRHVSKWKSIAECLQLKPDIIIMHEKGHQQPMTTLHTEGNNLADKLATQGSYVVHAGKRTADGSEFEKRTADGSEFESPKKKAKVE

SEQ ID NO: 448 - protein, 2085 aa, synthetic construct
MPAAKRVKLDGGDKKYSIGLDIGTNSVGWAVITDEYKVPSKKFKVLGNTDRHSIKKNLIGALLFDSGETAEATRLKRTARRRYTRRKNRICYLQEIFSNEMAKVDDSFFHRLEESFLVEEDKKHERHPIFGNIVDEVAYHEKYPTIYHLRKKLVDSTDKADLRLIYLALAHMIKFRGHFLIEGDLNPDNSDVDKLFIQLVQTYNQLFEENPINASGVDAKAILSARLSKSRRLENLIAQLPGEKKNGLFGNLIALSLGLTPNFKSNFDLAEDAKLQLSKDTYDDDLDNLLAQIGDQYADLFLAAKNLSDAILLSDILRVNTEITKAPLSASMIKRYDEHHQDLTLLKALVRQQLPEKYKEIFFDQSKNGYAGYIDGGASQEEFYKFIKPILEKMDGTEELLVKLNREDLLRKQRTFDNGSIPHQIHLGELHAILRRQEDFYPFLKDNREKIEKILTFRIPYYVGPLARGNSRFAWMTRKSEETITPWNFEEVVDKGASAQSFIERMTNFDKNLPNEKVLPKHSLLYEYFTVYNELTKVKYVTEGMRKPAFLSGEQKKAIVDLLFKTNRKVTVKQLKEDYFKKIECFDSVEISGVEDRFNASLGTYHDLLKIIKDKDFLDNEENEDILEDIVLTLTLFEDREMIEERLKTYAHLFDDKVMKQLKRRRYTGWGRLSRKLINGIRDKQSGKTILDFLKSDGFANRNFMQLIHDDSLTFKEDIQKAQVSGQGDSLHEHIANLAGSPAIKKGILQTVKVVDELVKVMGRHKPENIVIEMARENQTTQKGQKNSRERMKRIEEGIKELGSQILKEHPVENTQLQNEKLYLYYLQNGRDMYVDQELDINRLSDYDVDHIVPQSFLKDDSIDNKVLTRSDKARGKSDNVPSEEVVKKMKNYWRQLLNAKLITQRKFDNLTKAERGGLSELDKAGFIKRQLVETRQITKHVAQILDSRMNTKYDENDKLIREVKVITLKSKLVSDFRKDFQFYKVREINNYHHAHDAYLNAVVGTALIKKYPKLESEFVYGDYKVYDVRKMIAKSEQEIGKATAKYFFYSNIMNFFKTEITLANGEIRKRPLIETNGETGEIVWDKGRDFATVRKVLSMPQVNIVKKTEVQTGGFSKESILPKRNSDKLIARKKDWDPKKYGGFDSPTVAYSVLVVAKVEKGKSKKLKSVKELLGITIMERSSFEKNPIDFLEAKGYKEVKKDLIIKLPKYSLFELENGRKRMLASAGELQKGNELALPSKYVNFLYLASHYEKLKGSPEDNEQKQLFVEQHKHYLDEIIEQISEFSKRVILADANLDKVLSAYNKHRDKPIREQAENIIHLFTLTNLGAPAAFKYFDTTIDRKRYTSTKEVLDATLIHQSITGLYETRIDLSQLGGDGGGGGPAPGGSGGVPWLMKKPLQLTVLVPLHEYQERLLQQTALPKEQKELLQKLFLKYDALWQHWENQVGHRRIKPHNIATGTLAPRPQKQYPINPKAKPSIQIVIDDLLKQGVLIQQNSTMNTPVYPVPKPDGKWRMVLDYREVNKTIPLIAAQNQHSAGILSSIYRGKYKTTLDLTNGFWAHPITPESYWLTAFTWQGKQYCWTRLPQGFLNSPALFNADVVDLLKEIPNVQAYVDDIYISHDDPQEHLEQLEKIFSILLNAGYVVSLKKSEIAQREVEFLGFNITKEGRGLTDTFKQKLLNITPPKDLKQLQSILGKLNFARNFIPNYSELVKPLYTIVAPANGKFISWTEDNSNQLQHIISVLNQADNLEERNPETRLIIKVNSSPSAGYIRYYNEGSKRPIMYVNYIFSKAEAKFTQTEKLLTTMHKGLIKAMDLAMGQEILVYSPIVSMTKIQRTPLPERKALPVRWITWMTYLEDPRIQFHYDKSLPELQQIPNVTEDVIAKTKHPSEFAMVFYTDGSAIKHPDVNKSHSAGMGIAQVQFIPEYKIVHQWSIPLGDHTAQLAEIAAVEFACKKALKISGPVLIVTDSFYVAESANKELPYWKSNGFLNNKKKPLRHVSKWKSIAECLQLKPDIIIMHEKGHQQPMTTLHTEGNNLADKLATQGSYVVHAGKRTADGSEFEKRTADGSEFESPKKKAKVE

SEQ ID NO: 449 - protein, 2088 aa, synthetic construct
MPAAKRVKLDGGDKKYSIGLDIGTNSVGWAVITDEYKVPSKKFKVLGNTDRHSIKKNLIGALLFDSGETAEATRLKRTARRRYTRRKNRICYLQEIFSNEMAKVDDSFFHRLEESFLVEEDKKHERHPIFGNIVDEVAYHEKYPTIYHLRKKLVDSTDKADLRLIYLALAHMIKFRGHFLIEGDLNPDNSDVDKLFIQLVQTYNQLFEENPINASGVDAKAILSARLSKSRRLENLIAQLPGEKKNGLFGNLIALSLGLTPNFKSNFDLAEDAKLQLSKDTYDDDLDNLLAQIGDQYADLFLAAKNLSDAILLSDILRVNTEITKAPLSASMIKRYDEHHQDLTLLKALVRQQLPEKYKEIFFDQSKNGYAGYIDGGASQEEFYKFIKPILEKMDGTEELLVKLNREDLLRKQRTFDNGSIPHQIHLGELHAILRRQEDFYPFLKDNREKIEKILTFRIPYYVGPLARGNSRFAWMTRKSEETITPWNFEEVVDKGASAQSFIERMTNFDKNLPNEKVLPKHSLLYEYFTVYNELTKVKYVTEGMRKPAFLSGEQKKAIVDLLFKTNRKVTVKQLKEDYFKKIECFDSVEISGVEDRFNASLGTYHDLLKIIKDKDFLDNEENEDILEDIVLTLTLFEDREMIEERLKTYAHLFDDKVMKQLKRRRYTGWGRLSRKLINGIRDKQSGKTILDFLKSDGFANRNFMQLIHDDSLTFKEDIQKAQVSGQGDSLHEHIANLAGSPAIKKGILQTVKVVDELVKVMGRHKPENIVIEMARENQTTQKGQKNSRERMKRIEEGIKELGSQILKEHPVENTQLQNEKLYLYYLQNGRDMYVDQELDINRLSDYDVDHIVPQSFLKDDSIDNKVLTRSDKARGKSDNVPSEEVVKKMKNYWRQLLNAKLITQRKFDNLTKAERGGLSELDKAGFIKRQLVETRQITKHVAQILDSRMNTKYDENDKLIREVKVITLKSKLVSDFRKDFQFYKVREINNYHHAHDAYLNAVVGTALIKKYPKLESEFVYGDYKVYDVRKMIAKSEQEIGKATAKYFFYSNIMNFFKTEITLANGEIRKRPLIETNGETGEIVWDKGRDFATVRKVLSMPQVNIVKKTEVQTGGFSKESILPKRNSDKLIARKKDWDPKKYGGFDSPTVAYSVLVVAKVEKGKSKKLKSVKELLGITIMERSSFEKNPIDFLEAKGYKEVKKDLIIKLPKYSLFELENGRKRMLASAGELQKGNELALPSKYVNFLYLASHYEKLKGSPEDNEQKQLFVEQHKHYLDEIIEQISEFSKRVILADANLDKVLSAYNKHRDKPIREQAENIIHLFTLTNLGAPAAFKYFDTTIDRKRYTSTKEVLDATLIHQSITGLYETRIDLSQLGGDGGGSSGSSGSSGSSGGVPWLMKKPLQLTVLVPLHEYQERLLQQTALPKEQKELLQKLFLKYDALWQHWENQVGHRRIKPHNIATGTLAPRPQKQYPINPKAKPSIQIVIDDLLKQGVLIQQNSTMNTPVYPVPKPDGKWRMVLDYREVNKTIPLIAAQNQHSAGILSSIYRGKYKTTLDLTNGFWAHPITPESYWLTAFTWQGKQYCWTRLPQGFLNSPALFNADVVDLLKEIPNVQAYVDDIYISHDDPQEHLEQLEKIFSILLNAGYVVSLKKSEIAQREVEFLGFNITKEGRGLTDTFKQKLLNITPPKDLKQLQSILGKLNFARNFIPNYSELVKPLYTIVAPANGKFISWTEDNSNQLQHIISVLNQADNLEERNPETRLIIKVNSSPSAGYIRYYNEGSKRPIMYVNYIFSKAEAKFTQTEKLLTTMHKGLIKAMDLAMGQEILVYSPIVSMTKIQRTPLPERKALPVRWITWMTYLEDPRIQFHYDKSLPELQQIPNVTEDVIAKTKHPSEFAMVFYTDGSAIKHPDVNKSHSAGMGIAQVQFIPEYKIVHQWSIPLGDHTAQLAEIAAVEFACKKALKISGPVLIVTDSFYVAESANKELPYWKSNGFLNNKKKPLRHVSKWKSIAECLQLKPDIIIMHEKGHQQPMTTLHTEGNNLADKLATQGSYVVHAGKRTADGSEFEKRTADGSEFESPKKKAKVE

SEQ ID NO: 450 - protein, 2094 aa, synthetic construct
MPAAKRVKLDGGDKKYSIGLDIGTNSVGWAVITDEYKVPSKKFKVLGNTDRHSIKKNLIGALLFDSGETAEATRLKRTARRRYTRRKNRICYLQEIFSNEMAKVDDSFFHRLEESFLVEEDKKHERHPIFGNIVDEVAYHEKYPTIYHLRKKLVDSTDKADLRLIYLALAHMIKFRGHFLIEGDLNPDNSDVDKLFIQLVQTYNQLFEENPINASGVDAKAILSARLSKSRRLENLIAQLPGEKKNGLFGNLIALSLGLTPNFKSNFDLAEDAKLQLSKDTYDDDLDNLLAQIGDQYADLFLAAKNLSDAILLSDILRVNTEITKAPLSASMIKRYDEHHQDLTLLKALVRQQLPEKYKEIFFDQSKNGYAGYIDGGASQEEFYKFIKPILEKMDGTEELLVKLNREDLLRKQRTFDNGSIPHQIHLGELHAILRRQEDFYPFLKDNREKIEKILTFRIPYYVGPLARGNSRFAWMTRKSEETITPWNFEEVVDKGASAQSFIERMTNFDKNLPNEKVLPKHSLLYEYFTVYNELTKVKYVTEGMRKPAFLSGEQKKAIVDLLFKTNRKVTVKQLKEDYFKKIECFDSVEISGVEDRFNASLGTYHDLLKIIKDKDFLDNEENEDILEDIVLTLTLFEDREMIEERLKTYAHLFDDKVMKQLKRRRYTGWGRLSRKLINGIRDKQSGKTILDFLKSDGFANRNFMQLIHDDSLTFKEDIQKAQVSGQGDSLHEHIANLAGSPAIKKGILQTVKVVDELVKVMGRHKPENIVIEMARENQTTQKGQKNSRERMKRIEEGIKELGSQILKEHPVENTQLQNEKLYLYYLQNGRDMYVDQELDINRLSDYDVDHIVPQSFLKDDSIDNKVLTRSDKARGKSDNVPSEEVVKKMKNYWRQLLNAKLITQRKFDNLTKAERGGLSELDKAGFIKRQLVETRQITKHVAQILDSRMNTKYDENDKLIREVKVITLKSKLVSDFRKDFQFYKVREINNYHHAHDAYLNAVVGTALIKKYPKLESEFVYGDYKVYDVRKMIAKSEQEIGKATAKYFFYSNIMNFFKTEITLANGEIRKRPLIETNGETGEIVWDKGRDFATVRKVLSMPQVNIVKKTEVQTGGFSKESILPKRNSDKLIARKKDWDPKKYGGFDSPTVAYSVLVVAKVEKGKSKKLKSVKELLGITIMERSSFEKNPIDFLEAKGYKEVKKDLIIKLPKYSLFELENGRKRMLASAGELQKGNELALPSKYVNFLYLASHYEKLKGSPEDNEQKQLFVEQHKHYLDEIIEQISEFSKRVILADANLDKVLSAYNKHRDKPIREQAENIIHLFTLTNLGAPAAFKYFDTTIDRKRYTSTKEVLDATLIHQSITGLYETRIDLSQLGGDGGGSSGSSGSSGSSGSSGSSGGVPWLMKKPLQLTVLVPLHEYQERLLQQTALPKEQKELLQKLFLKYDALWQHWENQVGHRRIKPHNIATGTLAPRPQKQYPINPKAKPSIQIVIDDLLKQGVLIQQNSTMNTPVYPVPKPDGKWRMVLDYREVNKTIPLIAAQNQHSAGILSSIYRGKYKTTLDLTNGFWAHPITPESYWLTAFTWQGKQYCWTRLPQGFLNSPALFNADVVDLLKEIPNVQAYVDDIYISHDDPQEHLEQLEKIFSILLNAGYVVSLKKSEIAQREVEFLGFNITKEGRGLTDTFKQKLLNITPPKDLKQLQSILGKLNFARNFIPNYSELVKPLYTIVAPANGKFISWTEDNSNQLQHIISVLNQADNLEERNPETRLIIKVNSSPSAGYIRYYNEGSKRPIMYVNYIFSKAEAKFTQTEKLLTTMHKGLIKAMDLAMGQEILVYSPIVSMTKIQRTPLPERKALPVRWITWMTYLEDPRIQFHYDKSLPELQQIPNVTEDVIAKTKHPSEFAMVFYTDGSAIKHPDVNKSHSAGMGIAQVQFIPEYKIVHQWSIPLGDHTAQLAEIAAVEFACKKALKISGPVLIVTDSFYVAESANKELPYWKSNGFLNNKKKPLRHVSKWKSIAECLQLKPDIIIMHEKGHQQPMTTLHTEGNNLADKLATQGSYVVHAGKRTADGSEFEKRTADGSEFESPKKKAKVE

SEQ ID NO: 451 - protein, 2087 aa, synthetic construct
MPAAKRVKLDGGDKKYSIGLDIGTNSVGWAVITDEYKVPSKKFKVLGNTDRHSIKKNLIGALLFDSGETAEATRLKRTARRRYTRRKNRICYLQEIFSNEMAKVDDSFFHRLEESFLVEEDKKHERHPIFGNIVDEVAYHEKYPTIYHLRKKLVDSTDKADLRLIYLALAHMIKFRGHFLIEGDLNPDNSDVDKLFIQLVQTYNQLFEENPINASGVDAKAILSARLSKSRRLENLIAQLPGEKKNGLFGNLIALSLGLTPNFKSNFDLAEDAKLQLSKDTYDDDLDNLLAQIGDQYADLFLAAKNLSDAILLSDILRVNTEITKAPLSASMIKRYDEHHQDLTLLKALVRQQLPEKYKEIFFDQSKNGYAGYIDGGASQEEFYKFIKPILEKMDGTEELLVKLNREDLLRKQRTFDNGSIPHQIHLGELHAILRRQEDFYPFLKDNREKIEKILTFRIPYYVGPLARGNSRFAWMTRKSEETITPWNFEEVVDKGASAQSFIERMTNFDKNLPNEKVLPKHSLLYEYFTVYNELTKVKYVTEGMRKPAFLSGEQKKAIVDLLFKTNRKVTVKQLKEDYFKKIECFDSVEISGVEDRFNASLGTYHDLLKIIKDKDFLDNEENEDILEDIVLTLTLFEDREMIEERLKTYAHLFDDKVMKQLKRRRYTGWGRLSRKLINGIRDKQSGKTILDFLKSDGFANRNFMQLIHDDSLTFKEDIQKAQVSGQGDSLHEHIANLAGSPAIKKGILQTVKVVDELVKVMGRHKPENIVIEMARENQTTQKGQKNSRERMKRIEEGIKELGSQILKEHPVENTQLQNEKLYLYYLQNGRDMYVDQELDINRLSDYDVDHIVPQSFLKDDSIDNKVLTRSDKARGKSDNVPSEEVVKKMKNYWRQLLNAKLITQRKFDNLTKAERGGLSELDKAGFIKRQLVETRQITKHVAQILDSRMNTKYDENDKLIREVKVITLKSKLVSDFRKDFQFYKVREINNYHHAHDAYLNAVVGTALIKKYPKLESEFVYGDYKVYDVRKMIAKSEQEIGKATAKYFFYSNIMNFFKTEITLANGEIRKRPLIETNGETGEIVWDKGRDFATVRKVLSMPQVNIVKKTEVQTGGFSKESILPKRNSDKLIARKKDWDPKKYGGFDSPTVAYSVLVVAKVEKGKSKKLKSVKELLGITIMERSSFEKNPIDFLEAKGYKEVKKDLIIKLPKYSLFELENGRKRMLASAGELQKGNELALPSKYVNFLYLASHYEKLKGSPEDNEQKQLFVEQHKHYLDEIIEQISEFSKRVILADANLDKVLSAYNKHRDKPIREQAENIIHLFTLTNLGAPAAFKYFDTTIDRKRYTSTKEVLDATLIHQSITGLYETRIDLSQLGGDGGPAPGGGEAAAKGGVPWLMKKPLQLTVLVPLHEYQERLLQQTALPKEQKELLQKLFLKYDALWQHWENQVGHRRIKPHNIATGTLAPRPQKQYPINPKAKPSIQIVIDDLLKQGVLIQQNSTMNTPVYPVPKPDGKWRMVLDYREVNKTIPLIAAQNQHSAGILSSIYRGKYKTTLDLTNGFWAHPITPESYWLTAFTWQGKQYCWTRLPQGFLNSPALFNADVVDLLKEIPNVQAYVDDIYISHDDPQEHLEQLEKIFSILLNAGYVVSLKKSEIAQREVEFLGFNITKEGRGLTDTFKQKLLNITPPKDLKQLQSILGKLNFARNFIPNYSELVKPLYTIVAPANGKFISWTEDNSNQLQHIISVLNQADNLEERNPETRLIIKVNSSPSAGYIRYYNEGSKRPIMYVNYIFSKAEAKFTQTEKLLTTMHKGLIKAMDLAMGQEILVYSPIVSMTKIQRTPLPERKALPVRWITWMTYLEDPRIQFHYDKSLPELQQIPNVTEDVIAKTKHPSEFAMVFYTDGSAIKHPDVNKSHSAGMGIAQVQFIPEYKIVHQWSIPLGDHTAQLAEIAAVEFACKKALKISGPVLIVTDSFYVAESANKELPYWKSNGFLNNKKKPLRHVSKWKSIAECLQLKPDIIIMHEKGHQQPMTTLHTEGNNLADKLATQGSYVVHAGKRTADGSEFEKRTADGSEFESPKKKAKVE

SEQ ID NO: 452 - protein, 2081 aa, synthetic construct
MPAAKRVKLDGGDKKYSIGLDIGTNSVGWAVITDEYKVPSKKFKVLGNTDRHSIKKNLIGALLFDSGETAEATRLKRTARRRYTRRKNRICYLQEIFSNEMAKVDDSFFHRLEESFLVEEDKKHERHPIFGNIVDEVAYHEKYPTIYHLRKKLVDSTDKADLRLIYLALAHMIKFRGHFLIEGDLNPDNSDVDKLFIQLVQTYNQLFEENPINASGVDAKAILSARLSKSRRLENLIAQLPGEKKNGLFGNLIALSLGLTPNFKSNFDLAEDAKLQLSKDTYDDDLDNLLAQIGDQYADLFLAAKNLSDAILLSDILRVNTEITKAPLSASMIKRYDEHHQDLTLLKALVRQQLPEKYKEIFFDQSKNGYAGYIDGGASQEEFYKFIKPILEKMDGTEELLVKLNREDLLRKQRTFDNGSIPHQIHLGELHAILRRQEDFYPFLKDNREKIEKILTFRIPYYVGPLARGNSRFAWMTRKSEETITPWNFEEVVDKGASAQSFIERMTNFDKNLPNEKVLPKHSLLYEYFTVYNELTKVKYVTEGMRKPAFLSGEQKKAIVDLLFKTNRKVTVKQLKEDYFKKIECFDSVEISGVEDRFNASLGTYHDLLKIIKDKDFLDNEENEDILEDIVLTLTLFEDREMIEERLKTYAHLFDDKVMKQLKRRRYTGWGRLSRKLINGIRDKQSGKTILDFLKSDGFANRNFMQLIHDDSLTFKEDIQKAQVSGQGDSLHEHIANLAGSPAIKKGILQTVKVVDELVKVMGRHKPENIVIEMARENQTTQKGQKNSRERMKRIEEGIKELGSQILKEHPVENTQLQNEKLYLYYLQNGRDMYVDQELDINRLSDYDVDHIVPQSFLKDDSIDNKVLTRSDKARGKSDNVPSEEVVKKMKNYWRQLLNAKLITQRKFDNLTKAERGGLSELDKAGFIKRQLVETRQITKHVAQILDSRMNTKYDENDKLIREVKVITLKSKLVSDFRKDFQFYKVREINNYHHAHDAYLNAVVGTALIKKYPKLESEFVYGDYKVYDVRKMIAKSEQEIGKATAKYFFYSNIMNFFKTEITLANGEIRKRPLIETNGETGEIVWDKGRDFATVRKVLSMPQVNIVKKTEVQTGGFSKESILPKRNSDKLIARKKDWDPKKYGGFDSPTVAYSVLVVAKVEKGKSKKLKSVKELLGITIMERSSFEKNPIDFLEAKGYKEVKKDLIIKLPKYSLFELENGRKRMLASAGELQKGNELALPSKYVNFLYLASHYEKLKGSPEDNEQKQLFVEQHKHYLDEIIEQISEFSKRVILADANLDKVLSAYNKHRDKPIREQAENIIHLFTLTNLGAPAAFKYFDTTIDRKRYTSTKEVLDATLIHQSITGLYETRIDLSQLGGDGGGGGGSGGVPWLMKKPLQLTVLVPLHEYQERLLQQTALPKEQKELLQKLFLKYDALWQHWENQVGHRRIKPHNIATGTLAPRPQKQYPINPKAKPSIQIVIDDLLKQGVLIQQNSTMNTPVYPVPKPDGKWRMVLDYREVNKTIPLIAAQNQHSAGILSSIYRGKYKTTLDLTNGFWAHPITPESYWLTAFTWQGKQYCWTRLPQGFLNSPALFNADVVDLLKEIPNVQAYVDDIYISHDDPQEHLEQLEKIFSILLNAGYVVSLKKSEIAQREVEFLGFNITKEGRGLTDTFKQKLLNITPPKDLKQLQSILGKLNFARNFIPNYSELVKPLYTIVAPANGKFISWTEDNSNQLQHIISVLNQADNLEERNPETRLIIKVNSSPSAGYIRYYNEGSKRPIMYVNYIFSKAEAKFTQTEKLLTTMHKGLIKAMDLAMGQEILVYSPIVSMTKIQRTPLPERKALPVRWITWMTYLEDPRIQFHYDKSLPELQQIPNVTEDVIAKTKHPSEFAMVFYTDGSAIKHPDVNKSHSAGMGIAQVQFIPEYKIVHQWSIPLGDHTAQLAEIAAVEFACKKALKISGPVLIVTDSFYVAESANKELPYWKSNGFLNNKKKPLRHVSKWKSIAECLQLKPDIIIMHEKGHQQPMTTLHTEGNNLADKLATQGSYVVHAGKRTADGSEFEKRTADGSEFESPKKKAKVE

SEQ ID NO: 453 - protein, 2084 aa, synthetic construct
MPAAKRVKLDGGDKKYSIGLDIGTNSVGWAVITDEYKVPSKKFKVLGNTDRHSIKKNLIGALLFDSGETAEATRLKRTARRRYTRRKNRICYLQEIFSNEMAKVDDSFFHRLEESFLVEEDKKHERHPIFGNIVDEVAYHEKYPTIYHLRKKLVDSTDKADLRLIYLALAHMIKFRGHFLIEGDLNPDNSDVDKLFIQLVQTYNQLFEENPINASGVDAKAILSARLSKSRRLENLIAQLPGEKKNGLFGNLIALSLGLTPNFKSNFDLAEDAKLQLSKDTYDDDLDNLLAQIGDQYADLFLAAKNLSDAILLSDILRVNTEITKAPLSASMIKRYDEHHQDLTLLKALVRQQLPEKYKEIFFDQSKNGYAGYIDGGASQEEFYKFIKPILEKMDGTEELLVKLNREDLLRKQRTFDNGSIPHQIHLGELHAILRRQEDFYPFLKDNREKIEKILTFRIPYYVGPLARGNSRFAWMTRKSEETITPWNFEEVVDKGASAQSFIERMTNFDKNLPNEKVLPKHSLLYEYFTVYNELTKVKYVTEGMRKPAFLSGEQKKAIVDLLFKTNRKVTVKQLKEDYFKKIECFDSVEISGVEDRFNASLGTYHDLLKIIKDKDFLDNEENEDILEDIVLTLTLFEDREMIEERLKTYAHLFDDKVMKQLKRRRYTGWGRLSRKLINGIRDKQSGKTILDFLKSDGFANRNFMQLIHDDSLTFKEDIQKAQVSGQGDSLHEHIANLAGSPAIKKGILQTVKVVDELVKVMGRHKPENIVIEMARENQTTQKGQKNSRERMKRIEEGIKELGSQILKEHPVENTQLQNEKLYLYYLQNGRDMYVDQELDINRLSDYDVDHIVPQSFLKDDSIDNKVLTRSDKARGKSDNVPSEEVVKKMKNYWRQLLNAKLITQRKFDNLTKAERGGLSELDKAGFIKRQLVETRQITKHVAQILDSRMNTKYDENDKLIREVKVITLKSKLVSDFRKDFQFYKVREINNYHHAHDAYLNAVVGTALIKKYPKLESEFVYGDYKVYDVRKMIAKSEQEIGKATAKYFFYSNIMNFFKTEITLANGEIRKRPLIETNGETGEIVWDKGRDFATVRKVLSMPQVNIVKKTEVQTGGFSKESILPKRNSDKLIARKKDWDPKKYGGFDSPTVAYSVLVVAKVEKGKSKKLKSVKELLGITIMERSSFEKNPIDFLEAKGYKEVKKDLIIKLPKYSLFELENGRKRMLASAGELQKGNELALPSKYVNFLYLASHYEKLKGSPEDNEQKQLFVEQHKHYLDEIIEQISEFSKRVILADANLDKVLSAYNKHRDKPIREQAENIIHLFTLTNLGAPAAFKYFDTTIDRKRYTSTKEVLDATLIHQSITGLYETRIDLSQLGGDGGEAAAKPAPGGVPWLMKKPLQLTVLVPLHEYQERLLQQTALPKEQKELLQKLFLKYDALWQHWENQVGHRRIKPHNIATGTLAPRPQKQYPINPKAKPSIQIVIDDLLKQGVLIQQNSTMNTPVYPVPKPDGKWRMVLDYREVNKTIPLIAAQNQHSAGILSSIYRGKYKTTLDLTNGFWAHPITPESYWLTAFTWQGKQYCWTRLPQGFLNSPALFNADVVDLLKEIPNVQAYVDDIYISHDDPQEHLEQLEKIFSILLNAGYVVSLKKSEIAQREVEFLGFNITKEGRGLTDTFKQKLLNITPPKDLKQLQSILGKLNFARNFIPNYSELVKPLYTIVAPANGKFISWTEDNSNQLQHIISVLNQADNLEERNPETRLIIKVNSSPSAGYIRYYNEGSKRPIMYVNYIFSKAEAKFTQTEKLLTTMHKGLIKAMDLAMGQEILVYSPIVSMTKIQRTPLPERKALPVRWITWMTYLEDPRIQFHYDKSLPELQQIPNVTEDVIAKTKHPSEFAMVFYTDGSAIKHPDVNKSHSAGMGIAQVQFIPEYKIVHQWSIPLGDHTAQLAEIAAVEFACKKALKISGPVLIVTDSFYVAESANKELPYWKSNGFLNNKKKPLRHVSKWKSIAECLQLKPDIIIMHEKGHQQPMTTLHTEGNNLADKLATQGSYVVHAGKRTADGSEFEKRTADGSEFESPKKKAKVE

SEQ ID NO: 454 - protein, 2085 aa, synthetic construct
MPAAKRVKLDGGDKKYSIGLDIGTNSVGWAVITDEYKVPSKKFKVLGNTDRHSIKKNLIGALLFDSGETAEATRLKRTARRRYTRRKNRICYLQEIFSNEMAKVDDSFFHRLEESFLVEEDKKHERHPIFGNIVDEVAYHEKYPTIYHLRKKLVDSTDKADLRLIYLALAHMIKFRGHFLIEGDLNPDNSDVDKLFIQLVQTYNQLFEENPINASGVDAKAILSARLSKSRRLENLIAQLPGEKKNGLFGNLIALSLGLTPNFKSNFDLAEDAKLQLSKDTYDDDLDNLLAQIGDQYADLFLAAKNLSDAILLSDILRVNTEITKAPLSASMIKRYDEHHQDLTLLKALVRQQLPEKYKEIFFDQSKNGYAGYIDGGASQEEFYKFIKPILEKMDGTEELLVKLNREDLLRKQRTFDNGSIPHQIHLGELHAILRRQEDFYPFLKDNREKIEKILTFRIPYYVGPLARGNSRFAWMTRKSEETITPWNFEEVVDKGASAQSFIERMTNFDKNLPNEKVLPKHSLLYEYFTVYNELTKVKYVTEGMRKPAFLSGEQKKAIVDLLFKTNRKVTVKQLKEDYFKKIECFDSVEISGVEDRFNASLGTYHDLLKIIKDKDFLDNEENEDILEDIVLTLTLFEDREMIEERLKTYAHLFDDKVMKQLKRRRYTGWGRLSRKLINGIRDKQSGKTILDFLKSDGFANRNFMQLIHDDSLTFKEDIQKAQVSGQGDSLHEHIANLAGSPAIKKGILQTVKVVDELVKVMGRHKPENIVIEMARENQTTQKGQKNSRERMKRIEEGIKELGSQILKEHPVENTQLQNEKLYLYYLQNGRDMYVDQELDINRLSDYDVDHIVPQSFLKDDSIDNKVLTRSDKARGKSDNVPSEEVVKKMKNYWRQLLNAKLITQRKFDNLTKAERGGLSELDKAGFIKRQLVETRQITKHVAQILDSRMNTKYDENDKLIREVKVITLKSKLVSDFRKDFQFYKVREINNYHHAHDAYLNAVVGTALIKKYPKLESEFVYGDYKVYDVRKMIAKSEQEIGKATAKYFFYSNIMNFFKTEITLANGEIRKRPLIETNGETGEIVWDKGRDFATVRKVLSMPQVNIVKKTEVQTGGFSKESILPKRNSDKLIARKKDWDPKKYGGFDSPTVAYSVLVVAKVEKGKSKKLKSVKELLGITIMERSSFEKNPIDFLEAKGYKEVKKDLIIKLPKYSLFELENGRKRMLASAGELQKGNELALPSKYVNFLYLASHYEKLKGSPEDNEQKQLFVEQHKHYLDEIIEQISEFSKRVILADANLDKVLSAYNKHRDKPIREQAENIIHLFTLTNLGAPAAFKYFDTTIDRKRYTSTKEVLDATLIHQSITGLYETRIDLSQLGGDGGGGGGSSGGSGGVPWLMKKPLQLTVLVPLHEYQERLLQQTALPKEQKELLQKLFLKYDALWQHWENQVGHRRIKPHNIATGTLAPRPQKQYPINPKAKPSIQIVIDDLLKQGVLIQQNSTMNTPVYPVPKPDGKWRMVLDYREVNKTIPLIAAQNQHSAGILSSIYRGKYKTTLDLTNGFWAHPITPESYWLTAFTWQGKQYCWTRLPQGFLNSPALFNADVVDLLKEIPNVQAYVDDIYISHDDPQEHLEQLEKIFSILLNAGYVVSLKKSEIAQREVEFLGFNITKEGRGLTDTFKQKLLNITPPKDLKQLQSILGKLNFARNFIPNYSELVKPLYTIVAPANGKFISWTEDNSNQLQHIISVLNQADNLEERNPETRLIIKVNSSPSAGYIRYYNEGSKRPIMYVNYIFSKAEAKFTQTEKLLTTMHKGLIKAMDLAMGQEILVYSPIVSMTKIQRTPLPERKALPVRWITWMTYLEDPRIQFHYDKSLPELQQIPNVTEDVIAKTKHPSEFAMVFYTDGSAIKHPDVNKSHSAGMGIAQVQFIPEYKIVHQWSIPLGDHTAQLAEIAAVEFACKKALKISGPVLIVTDSFYVAESANKELPYWKSNGFLNNKKKPLRHVSKWKSIAECLQLKPDIIIMHEKGHQQPMTTLHTEGNNLADKLATQGSYVVHAGKRTADGSEFEKRTADGSEFESPKKKAKVE

SEQ ID NO: 455 - protein, 2085 aa, synthetic construct
MPAAKRVKLDGGDKKYSIGLDIGTNSVGWAVITDEYKVPSKKFKVLGNTDRHSIKKNLIGALLFDSGETAEATRLKRTARRRYTRRKNRICYLQEIFSNEMAKVDDSFFHRLEESFLVEEDKKHERHPIFGNIVDEVAYHEKYPTIYHLRKKLVDSTDKADLRLIYLALAHMIKFRGHFLIEGDLNPDNSDVDKLFIQLVQTYNQLFEENPINASGVDAKAILSARLSKSRRLENLIAQLPGEKKNGLFGNLIALSLGLTPNFKSNFDLAEDAKLQLSKDTYDDDLDNLLAQIGDQYADLFLAAKNLSDAILLSDILRVNTEITKAPLSASMIKRYDEHHQDLTLLKALVRQQLPEKYKEIFFDQSKNGYAGYIDGGASQEEFYKFIKPILEKMDGTEELLVKLNREDLLRKQRTFDNGSIPHQIHLGELHAILRRQEDFYPFLKDNREKIEKILTFRIPYYVGPLARGNSRFAWMTRKSEETITPWNFEEVVDKGASAQSFIERMTNFDKNLPNEKVLPKHSLLYEYFTVYNELTKVKYVTEGMRKPAFLSGEQKKAIVDLLFKTNRKVTVKQLKEDYFKKIECFDSVEISGVEDRFNASLGTYHDLLKIIKDKDFLDNEENEDILEDIVLTLTLFEDREMIEERLKTYAHLFDDKVMKQLKRRRYTGWGRLSRKLINGIRDKQSGKTILDFLKSDGFANRNFMQLIHDDSLTFKEDIQKAQVSGQGDSLHEHIANLAGSPAIKKGILQTVKVVDELVKVMGRHKPENIVIEMARENQTTQKGQKNSRERMKRIEEGIKELGSQILKEHPVENTQLQNEKLYLYYLQNGRDMYVDQELDINRLSDYDVDHIVPQSFLKDDSIDNKVLTRSDKARGKSDNVPSEEVVKKMKNYWRQLLNAKLITQRKFDNLTKAERGGLSELDKAGFIKRQLVETRQITKHVAQILDSRMNTKYDENDKLIREVKVITLKSKLVSDFRKDFQFYKVREINNYHHAHDAYLNAVVGTALIKKYPKLESEFVYGDYKVYDVRKMIAKSEQEIGKATAKYFFYSNIMNFFKTEITLANGEIRKRPLIETNGETGEIVWDKGRDFATVRKVLSMPQVNIVKKTEVQTGGFSKESILPKRNSDKLIARKKDWDPKKYGGFDSPTVAYSVLVVAKVEKGKSKKLKSVKELLGITIMERSSFEKNPIDFLEAKGYKEVKKDLIIKLPKYSLFELENGRKRMLASAGELQKGNELALPSKYVNFLYLASHYEKLKGSPEDNEQKQLFVEQHKHYLDEIIEQISEFSKRVILADANLDKVLSAYNKHRDKPIREQAENIIHLFTLTNLGAPAAFKYFDTTIDRKRYTSTKEVLDATLIHQSITGLYETRIDLSQLGGDGGGSSPAPGGSGGVPWLMKKPLQLTVLVPLHEYQERLLQQTALPKEQKELLQKLFLKYDALWQHWENQVGHRRIKPHNIATGTLAPRPQKQYPINPKAKPSIQIVIDDLLKQGVLIQQNSTMNTPVYPVPKPDGKWRMVLDYREVNKTIPLIAAQNQHSAGILSSIYRGKYKTTLDLTNGFWAHPITPESYWLTAFTWQGKQYCWTRLPQGFLNSPALFNADVVDLLKEIPNVQAYVDDIYISHDDPQEHLEQLEKIFSILLNAGYVVSLKKSEIAQREVEFLGFNITKEGRGLTDTFKQKLLNITPPKDLKQLQSILGKLNFARNFIPNYSELVKPLYTIVAPANGKFISWTEDNSNQLQHIISVLNQADNLEERNPETRLIIKVNSSPSAGYIRYYNEGSKRPIMYVNYIFSKAEAKFTQTEKLLTTMHKGLIKAMDLAMGQEILVYSPIVSMTKIQRTPLPERKALPVRWITWMTYLEDPRIQFHYDKSLPELQQIPNVTEDVIAKTKHPSEFAMVFYTDGSAIKHPDVNKSHSAGMGIAQVQFIPEYKIVHQWSIPLGDHTAQLAEIAAVEFACKKALKISGPVLIVTDSFYVAESANKELPYWKSNGFLNNKKKPLRHVSKWKSIAECLQLKPDIIIMHEKGHQQPMTTLHTEGNNLADKLATQGSYVVHAGKRTADGSEFEKRTADGSEFESPKKKAKVE

SEQ ID NO: 456 - protein, 2085 aa, synthetic construct
MPAAKRVKLDGGDKKYSIGLDIGTNSVGWAVITDEYKVPSKKFKVLGNTDRHSIKKNLIGALLFDSGETAEATRLKRTARRRYTRRKNRICYLQEIFSNEMAKVDDSFFHRLEESFLVEEDKKHERHPIFGNIVDEVAYHEKYPTIYHLRKKLVDSTDKADLRLIYLALAHMIKFRGHFLIEGDLNPDNSDVDKLFIQLVQTYNQLFEENPINASGVDAKAILSARLSKSRRLENLIAQLPGEKKNGLFGNLIALSLGLTPNFKSNFDLAEDAKLQLSKDTYDDDLDNLLAQIGDQYADLFLAAKNLSDAILLSDILRVNTEITKAPLSASMIKRYDEHHQDLTLLKALVRQQLPEKYKEIFFDQSKNGYAGYIDGGASQEEFYKFIKPILEKMDGTEELLVKLNREDLLRKQRTFDNGSIPHQIHLGELHAILRRQEDFYPFLKDNREKIEKILTFRIPYYVGPLARGNSRFAWMTRKSEETITPWNFEEVVDKGASAQSFIERMTNFDKNLPNEKVLPKHSLLYEYFTVYNELTKVKYVTEGMRKPAFLSGEQKKAIVDLLFKTNRKVTVKQLKEDYFKKIECFDSVEISGVEDRFNASLGTYHDLLKIIKDKDFLDNEENEDILEDIVLTLTLFEDREMIEERLKTYAHLFDDKVMKQLKRRRYTGWGRLSRKLINGIRDKQSGKTILDFLKSDGFANRNFMQLIHDDSLTFKEDIQKAQVSGQGDSLHEHIANLAGSPAIKKGILQTVKVVDELVKVMGRHKPENIVIEMARENQTTQKGQKNSRERMKRIEEGIKELGSQILKEHPVENTQLQNEKLYLYYLQNGRDMYVDQELDINRLSDYDVDHIVPQSFLKDDSIDNKVLTRSDKARGKSDNVPSEEVVKKMKNYWRQLLNAKLITQRKFDNLTKAERGGLSELDKAGFIKRQLVETRQITKHVAQILDSRMNTKYDENDKLIREVKVITLKSKLVSDFRKDFQFYKVREINNYHHAHDAYLNAVVGTALIKKYPKLESEFVYGDYKVYDVRKMIAKSEQEIGKATAKYFFYSNIMNFFKTEITLANGEIRKRPLIETNGETGEIVWDKGRDFATVRKVLSMPQVNIVKKTEVQTGGFSKESILPKRNSDKLIARKKDWDPKKYGGFDSPTVAYSVLVVAKVEKGKSKKLKSVKELLGITIMERSSFEKNPIDFLEAKGYKEVKKDLIIKLPKYSLFELENGRKRMLASAGELQKGNELALPSKYVNFLYLASHYEKLKGSPEDNEQKQLFVEQHKHYLDEIIEQISEFSKRVILADANLDKVLSAYNKHRDKPIREQAENIIHLFTLTNLGAPAAFKYFDTTIDRKRYTSTKEVLDATLIHQSITGLYETRIDLSQLGGDGGPAPGSSGGGGGVPWLMKKPLQLTVLVPLHEYQERLLQQTALPKEQKELLQKLFLKYDALWQHWENQVGHRRIKPHNIATGTLAPRPQKQYPINPKAKPSIQIVIDDLLKQGVLIQQNSTMNTPVYPVPKPDGKWRMVLDYREVNKTIPLIAAQNQHSAGILSSIYRGKYKTTLDLTNGFWAHPITPESYWLTAFTWQGKQYCWTRLPQGFLNSPALFNADVVDLLKEIPNVQAYVDDIYISHDDPQEHLEQLEKIFSILLNAGYVVSLKKSEIAQREVEFLGFNITKEGRGLTDTFKQKLLNITPPKDLKQLQSILGKLNFARNFIPNYSELVKPLYTIVAPANGKFISWTEDNSNQLQHIISVLNQADNLEERNPETRLIIKVNSSPSAGYIRYYNEGSKRPIMYVNYIFSKAEAKFTQTEKLLTTMHKGLIKAMDLAMGQEILVYSPIVSMTKIQRTPLPERKALPVRWITWMTYLEDPRIQFHYDKSLPELQQIPNVTEDVIAKTKHPSEFAMVFYTDGSAIKHPDVNKSHSAGMGIAQVQFIPEYKIVHQWSIPLGDHTAQLAEIAAVEFACKKALKISGPVLIVTDSFYVAESANKELPYWKSNGFLNNKKKPLRHVSKWKSIAECLQLKPDIIIMHEKGHQQPMTTLHTEGNNLADKLATQGSYVVHAGKRTADGSEFEKRTADGSEFESPKKKAKVE

SEQ ID NO: 457 - protein, 2082 aa, synthetic construct
MPAAKRVKLDGGDKKYSIGLDIGTNSVGWAVITDEYKVPSKKFKVLGNTDRHSIKKNLIGALLFDSGETAEATRLKRTARRRYTRRKNRICYLQEIFSNEMAKVDDSFFHRLEESFLVEEDKKHERHPIFGNIVDEVAYHEKYPTIYHLRKKLVDSTDKADLRLIYLALAHMIKFRGHFLIEGDLNPDNSDVDKLFIQLVQTYNQLFEENPINASGVDAKAILSARLSKSRRLENLIAQLPGEKKNGLFGNLIALSLGLTPNFKSNFDLAEDAKLQLSKDTYDDDLDNLLAQIGDQYADLFLAAKNLSDAILLSDILRVNTEITKAPLSASMIKRYDEHHQDLTLLKALVRQQLPEKYKEIFFDQSKNGYAGYIDGGASQEEFYKFIKPILEKMDGTEELLVKLNREDLLRKQRTFDNGSIPHQIHLGELHAILRRQEDFYPFLKDNREKIEKILTFRIPYYVGPLARGNSRFAWMTRKSEETITPWNFEEVVDKGASAQSFIERMTNFDKNLPNEKVLPKHSLLYEYFTVYNELTKVKYVTEGMRKPAFLSGEQKKAIVDLLFKTNRKVTVKQLKEDYFKKIECFDSVEISGVEDRFNASLGTYHDLLKIIKDKDFLDNEENEDILEDIVLTLTLFEDREMIEERLKTYAHLFDDKVMKQLKRRRYTGWGRLSRKLINGIRDKQSGKTILDFLKSDGFANRNFMQLIHDDSLTFKEDIQKAQVSGQGDSLHEHIANLAGSPAIKKGILQTVKVVDELVKVMGRHKPENIVIEMARENQTTQKGQKNSRERMKRIEEGIKELGSQILKEHPVENTQLQNEKLYLYYLQNGRDMYVDQELDINRLSDYDVDHIVPQSFLKDDSIDNKVLTRSDKARGKSDNVPSEEVVKKMKNYWRQLLNAKLITQRKFDNLTKAERGGLSELDKAGFIKRQLVETRQITKHVAQILDSRMNTKYDENDKLIREVKVITLKSKLVSDFRKDFQFYKVREINNYHHAHDAYLNAVVGTALIKKYPKLESEFVYGDYKVYDVRKMIAKSEQEIGKATAKYFFYSNIMNFFKTEITLANGEIRKRPLIETNGETGEIVWDKGRDFATVRKVLSMPQVNIVKKTEVQTGGFSKESILPKRNSDKLIARKKDWDPKKYGGFDSPTVAYSVLVVAKVEKGKSKKLKSVKELLGITIMERSSFEKNPIDFLEAKGYKEVKKDLIIKLPKYSLFELENGRKRMLASAGELQKGNELALPSKYVNFLYLASHYEKLKGSPEDNEQKQLFVEQHKHYLDEIIEQISEFSKRVILADANLDKVLSAYNKHRDKPIREQAENIIHLFTLTNLGAPAAFKYFDTTIDRKRYTSTKEVLDATLIHQSITGLYETRIDLSQLGGDGGGGSGGSGGVPWLMKKPLQLTVLVPLHEYQERLLQQTALPKEQKELLQKLFLKYDALWQHWENQVGHRRIKPHNIATGTLAPRPQKQYPINPKAKPSIQIVIDDLLKQGVLIQQNSTMNTPVYPVPKPDGKWRMVLDYREVNKTIPLIAAQNQHSAGILSSIYRGKYKTTLDLTNGFWAHPITPESYWLTAFTWQGKQYCWTRLPQGFLNSPALFNADVVDLLKEIPNVQAYVDDIYISHDDPQEHLEQLEKIFSILLNAGYVVSLKKSEIAQREVEFLGFNITKEGRGLTDTFKQKLLNITPPKDLKQLQSILGKLNFARNFIPNYSELVKPLYTIVAPANGKFISWTEDNSNQLQHIISVLNQADNLEERNPETRLIIKVNSSPSAGYIRYYNEGSKRPIMYVNYIFSKAEAKFTQTEKLLTTMHKGLIKAMDLAMGQEILVYSPIVSMTKIQRTPLPERKALPVRWITWMTYLEDPRIQFHYDKSLPELQQIPNVTEDVIAKTKHPSEFAMVFYTDGSAIKHPDVNKSHSAGMGIAQVQFIPEYKIVHQWSIPLGDHTAQLAEIAAVEFACKKALKISGPVLIVTDSFYVAESANKELPYWKSNGFLNNKKKPLRHVSKWKSIAECLQLKPDIIIMHEKGHQQPMTTLHTEGNNLADKLATQGSYVVHAGKRTADGSEFEKRTADGSEFESPKKKAKVE

SEQ ID NO: 458 - protein, 2087 aa, synthetic construct
MPAAKRVKLDGGDKKYSIGLDIGTNSVGWAVITDEYKVPSKKFKVLGNTDRHSIKKNLIGALLFDSGETAEATRLKRTARRRYTRRKNRICYLQEIFSNEMAKVDDSFFHRLEESFLVEEDKKHERHPIFGNIVDEVAYHEKYPTIYHLRKKLVDSTDKADLRLIYLALAHMIKFRGHFLIEGDLNPDNSDVDKLFIQLVQTYNQLFEENPINASGVDAKAILSARLSKSRRLENLIAQLPGEKKNGLFGNLIALSLGLTPNFKSNFDLAEDAKLQLSKDTYDDDLDNLLAQIGDQYADLFLAAKNLSDAILLSDILRVNTEITKAPLSASMIKRYDEHHQDLTLLKALVRQQLPEKYKEIFFDQSKNGYAGYIDGGASQEEFYKFIKPILEKMDGTEELLVKLNREDLLRKQRTFDNGSIPHQIHLGELHAILRRQEDFYPFLKDNREKIEKILTFRIPYYVGPLARGNSRFAWMTRKSEETITPWNFEEVVDKGASAQSFIERMTNFDKNLPNEKVLPKHSLLYEYFTVYNELTKVKYVTEGMRKPAFLSGEQKKAIVDLLFKTNRKVTVKQLKEDYFKKIECFDSVEISGVEDRFNASLGTYHDLLKIIKDKDFLDNEENEDILEDIVLTLTLFEDREMIEERLKTYAHLFDDKVMKQLKRRRYTGWGRLSRKLINGIRDKQSGKTILDFLKSDGFANRNFMQLIHDDSLTFKEDIQKAQVSGQGDSLHEHIANLAGSPAIKKGILQTVKVVDELVKVMGRHKPENIVIEMARENQTTQKGQKNSRERMKRIEEGIKELGSQILKEHPVENTQLQNEKLYLYYLQNGRDMYVDQELDINRLSDYDVDHIVPQSFLKDDSIDNKVLTRSDKARGKSDNVPSEEVVKKMKNYWRQLLNAKLITQRKFDNLTKAERGGLSELDKAGFIKRQLVETRQITKHVAQILDSRMNTKYDENDKLIREVKVITLKSKLVSDFRKDFQFYKVREINNYHHAHDAYLNAVVGTALIKKYPKLESEFVYGDYKVYDVRKMIAKSEQEIGKATAKYFFYSNIMNFFKTEITLANGEIRKRPLIETNGETGEIVWDKGRDFATVRKVLSMPQVNIVKKTEVQTGGFSKESILPKRNSDKLIARKKDWDPKKYGGFDSPTVAYSVLVVAKVEKGKSKKLKSVKELLGITIMERSSFEKNPIDFLEAKGYKEVKKDLIIKLPKYSLFELENGRKRMLASAGELQKGNELALPSKYVNFLYLASHYEKLKGSPEDNEQKQLFVEQHKHYLDEIIEQISEFSKRVILADANLDKVLSAYNKHRDKPIREQAENIIHLFTLTNLGAPAAFKYFDTTIDRKRYTSTKEVLDATLIHQSITGLYETRIDLSQLGGDGGGGGEAAAKGSSGGVPWLMKKPLQLTVLVPLHEYQERLLQQTALPKEQKELLQKLFLKYDALWQHWENQVGHRRIKPHNIATGTLAPRPQKQYPINPKAKPSIQIVIDDLLKQGVLIQQNSTMNTPVYPVPKPDGKWRMVLDYREVNKTIPLIAAQNQHSAGILSSIYRGKYKTTLDLTNGFWAHPITPESYWLTAFTWQGKQYCWTRLPQGFLNSPALFNADVVDLLKEIPNVQAYVDDIYISHDDPQEHLEQLEKIFSILLNAGYVVSLKKSEIAQREVEFLGFNITKEGRGLTDTFKQKLLNITPPKDLKQLQSILGKLNFARNFIPNYSELVKPLYTIVAPANGKFISWTEDNSNQLQHIISVLNQADNLEERNPETRLIIKVNSSPSAGYIRYYNEGSKRPIMYVNYIFSKAEAKFTQTEKLLTTMHKGLIKAMDLAMGQEILVYSPIVSMTKIQRTPLPERKALPVRWITWMTYLEDPRIQFHYDKSLPELQQIPNVTEDVIAKTKHPSEFAMVFYTDGSAIKHPDVNKSHSAGMGIAQVQFIPEYKIVHQWSIPLGDHTAQLAEIAAVEFACKKALKISGPVLIVTDSFYVAESANKELPYWKSNGFLNNKKKPLRHVSKWKSIAECLQLKPDIIIMHEKGHQQPMTTLHTEGNNLADKLATQGSYVVHAGKRTADGSEFEKRTADGSEFESPKKKAKVE

SEQ ID NO: 459 - protein, 2087 aa, synthetic construct
MPAAKRVKLDGGDKKYSIGLDIGTNSVGWAVITDEYKVPSKKFKVLGNTDRHSIKKNLIGALLFDSGETAEATRLKRTARRRYTRRKNRICYLQEIFSNEMAKVDDSFFHRLEESFLVEEDKKHERHPIFGNIVDEVAYHEKYPTIYHLRKKLVDSTDKADLRLIYLALAHMIKFRGHFLIEGDLNPDNSDVDKLFIQLVQTYNQLFEENPINASGVDAKAILSARLSKSRRLENLIAQLPGEKKNGLFGNLIALSLGLTPNFKSNFDLAEDAKLQLSKDTYDDDLDNLLAQIGDQYADLFLAAKNLSDAILLSDILRVNTEITKAPLSASMIKRYDEHHQDLTLLKALVRQQLPEKYKEIFFDQSKNGYAGYIDGGASQEEFYKFIKPILEKMDGTEELLVKLNREDLLRKQRTFDNGSIPHQIHLGELHAILRRQEDFYPFLKDNREKIEKILTFRIPYYVGPLARGNSRFAWMTRKSEETITPWNFEEVVDKGASAQSFIERMTNFDKNLPNEKVLPKHSLLYEYFTVYNELTKVKYVTEGMRKPAFLSGEQKKAIVDLLFKTNRKVTVKQLKEDYFKKIECFDSVEISGVEDRFNASLGTYHDLLKIIKDKDFLDNEENEDILEDIVLTLTLFEDREMIEERLKTYAHLFDDKVMKQLKRRRYTGWGRLSRKLINGIRDKQSGKTILDFLKSDGFANRNFMQLIHDDSLTFKEDIQKAQVSGQGDSLHEHIANLAGSPAIKKGILQTVKVVDELVKVMGRHKPENIVIEMARENQTTQKGQKNSRERMKRIEEGIKELGSQILKEHPVENTQLQNEKLYLYYLQNGRDMYVDQELDINRLSDYDVDHIVPQSFLKDDSIDNKVLTRSDKARGKSDNVPSEEVVKKMKNYWRQLLNAKLITQRKFDNLTKAERGGLSELDKAGFIKRQLVETRQITKHVAQILDSRMNTKYDENDKLIREVKVITLKSKLVSDFRKDFQFYKVREINNYHHAHDAYLNAVVGTALIKKYPKLESEFVYGDYKVYDVRKMIAKSEQEIGKATAKYFFYSNIMNFFKTEITLANGEIRKRPLIETNGETGEIVWDKGRDFATVRKVLSMPQVNIVKKTEVQTGGFSKESILPKRNSDKLIARKKDWDPKKYGGFDSPTVAYSVLVVAKVEKGKSKKLKSVKELLGITIMERSSFEKNPIDFLEAKGYKEVKKDLIIKLPKYSLFELENGRKRMLASAGELQKGNELALPSKYVNFLYLASHYEKLKGSPEDNEQKQLFVEQHKHYLDEIIEQISEFSKRVILADANLDKVLSAYNKHRDKPIREQAENIIHLFTLTNLGAPAAFKYFDTTIDRKRYTSTKEVLDATLIHQSITGLYETRIDLSQLGGDGGGGSGGGEAAAKGGVPWLMKKPLQLTVLVPLHEYQERLLQQTALPKEQKELLQKLFLKYDALWQHWENQVGHRRIKPHNIATGTLAPRPQKQYPINPKAKPSIQIVIDDLLKQGVLIQQNSTMNTPVYPVPKPDGKWRMVLDYREVNKTIPLIAAQNQHSAGILSSIYRGKYKTTLDLTNGFWAHPITPESYWLTAFTWQGKQYCWTRLPQGFLNSPALFNADVVDLLKEIPNVQAYVDDIYISHDDPQEHLEQLEKIFSILLNAGYVVSLKKSEIAQREVEFLGFNITKEGRGLTDTFKQKLLNITPPKDLKQLQSILGKLNFARNFIPNYSELVKPLYTIVAPANGKFISWTEDNSNQLQHIISVLNQADNLEERNPETRLIIKVNSSPSAGYIRYYNEGSKRPIMYVNYIFSKAEAKFTQTEKLLTTMHKGLIKAMDLAMGQEILVYSPIVSMTKIQRTPLPERKALPVRWITWMTYLEDPRIQFHYDKSLPELQQIPNVTEDVIAKTKHPSEFAMVFYTDGSAIKHPDVNKSHSAGMGIAQVQFIPEYKIVHQWSIPLGDHTAQLAEIAAVEFACKKALKISGPVLIVTDSFYVAESANKELPYWKSNGFLNNKKKPLRHVSKWKSIAECLQLKPDIIIMHEKGHQQPMTTLHTEGNNLADKLATQGSYVVHAGKRTADGSEFEKRTADGSEFESPKKKAKVE

SEQ ID NO: 460 - protein, 2185 aa, synthetic construct
MPAAKRVKLDGGDKKYSIGLDIGTNSVGWAVITDEYKVPSKKFKVLGNTDRHSIKKNLIGALLFDSGETAEATRLKRTARRRYTRRKNRICYLQEIFSNEMAKVDDSFFHRLEESFLVEEDKKHERHPIFGNIVDEVAYHEKYPTIYHLRKKLVDSTDKADLRLIYLALAHMIKFRGHFLIEGDLNPDNSDVDKLFIQLVQTYNQLFEENPINASGVDAKAILSARLSKSRRLENLIAQLPGEKKNGLFGNLIALSLGLTPNFKSNFDLAEDAKLQLSKDTYDDDLDNLLAQIGDQYADLFLAAKNLSDAILLSDILRVNTEITKAPLSASMIKRYDEHHQDLTLLKALVRQQLPEKYKEIFFDQSKNGYAGYIDGGASQEEFYKFIKPILEKMDGTEELLVKLNREDLLRKQRTFDNGSIPHQIHLGELHAILRRQEDFYPFLKDNREKIEKILTFRIPYYVGPLARGNSRFAWMTRKSEETITPWNFEEVVDKGASAQSFIERMTNFDKNLPNEKVLPKHSLLYEYFTVYNELTKVKYVTEGMRKPAFLSGEQKKAIVDLLFKTNRKVTVKQLKEDYFKKIECFDSVEISGVEDRFNASLGTYHDLLKIIKDKDFLDNEENEDILEDIVLTLTLFEDREMIEERLKTYAHLFDDKVMKQLKRRRYTGWGRLSRKLINGIRDKQSGKTILDFLKSDGFANRNFMQLIHDDSLTFKEDIQKAQVSGQGDSLHEHIANLAGSPAIKKGILQTVKVVDELVKVMGRHKPENIVIEMARENQTTQKGQKNSRERMKRIEEGIKELGSQILKEHPVENTQLQNEKLYLYYLQNGRDMYVDQELDINRLSDYDVDHIVPQSFLKDDSIDNKVLTRSDKARGKSDNVPSEEVVKKMKNYWRQLLNAKLITQRKFDNLTKAERGGLSELDKAGFIKRQLVETRQITKHVAQILDSRMNTKYDENDKLIREVKVITLKSKLVSDFRKDFQFYKVREINNYHHAHDAYLNAVVGTALIKKYPKLESEFVYGDYKVYDVRKMIAKSEQEIGKATAKYFFYSNIMNFFKTEITLANGEIRKRPLIETNGETGEIVWDKGRDFATVRKVLSMPQVNIVKKTEVQTGGFSKESILPKRNSDKLIARKKDWDPKKYGGFDSPTVAYSVLVVAKVEKGKSKKLKSVKELLGITIMERSSFEKNPIDFLEAKGYKEVKKDLIIKLPKYSLFELENGRKRMLASAGELQKGNELALPSKYVNFLYLASHYEKLKGSPEDNEQKQLFVEQHKHYLDEIIEQISEFSKRVILADANLDKVLSAYNKHRDKPIREQAENIIHLFTLTNLGAPAAFKYFDTTIDRKRYTSTKEVLDATLIHQSITGLYETRIDLSQLGGDGGGGGGSGGGGSGGGGSGGGGSGGMDPLQLLQPLEAEIKGTKLKAHWNSGATITCVPEAFLEDERPIQTMLIKTIHGEKQQDVYYLTFKVQGRKVEAEVLASPYDYILLNPSDVPWLMKKPLQLTVLVPLHEYQERLLQQTALPKEQKELLQKLFLKYDALWQHWENQVGHRRIKPHNIATGTLAPRPQKQYPINPKAKPSIQIVIDDLLKQGVLIQQNSTMNTPVYPVPKPDGKWRMVLDYREVNKTIPLIAAQNQHSAGILSSIYRGKYKTTLDLTNGFWAHPITPESYWLTAFTWQGKQYCWTRLPQGFLNSPALFNADVVDLLKEIPNVQAYVDDIYISHDDPQEHLEQLEKIFSILLNAGYVVSLKKSEIAQREVEFLGFNITKEGRGLTDTFKQKLLNITPPKDLKQLQSILGLLNFARNFIPNYSELVKPLYTIVAPANGKFISWTEDNSNQLQHIISVLNQADNLEERNPETRLIIKVNSSPSAGYIRYYNEGSKRPIMYVNYIFSKAEAKFTQTEKLLTTMHKGLIKAMDLAMGQEILVYSPIVSMTKIQRTPLPERKALPVRWITWMTYLEDPRIQFHYDKSLPELQQIPNVTEDVIAKTKHPSEFAMVFYTDGSAIKHPDVNKSHSAGMGIAQVQFIPEYKIVHQWSIPLGDHTAQLAEIAAVEFACKKALKISGPVLIVTDSFYVAESANKELPYWKSNGFLNNKKKPLRHVSKWKSIAECLQLKPDIIIMHEKGHQQPMTTLHTEGNNLADKLATQGSYVVHAGKRTADGSEFEKRTADGSEFESPKKKAKVE

SEQ ID NO: 461 - protein, 2180 aa, synthetic construct
MPAAKRVKLDGGDKKYSIGLDIGTNSVGWAVITDEYKVPSKKFKVLGNTDRHSIKKNLIGALLFDSGETAEATRLKRTARRRYTRRKNRICYLQEIFSNEMAKVDDSFFHRLEESFLVEEDKKHERHPIFGNIVDEVAYHEKYPTIYHLRKKLVDSTDKADLRLIYLALAHMIKFRGHFLIEGDLNPDNSDVDKLFIQLVQTYNQLFEENPINASGVDAKAILSARLSKSRRLENLIAQLPGEKKNGLFGNLIALSLGLTPNFKSNFDLAEDAKLQLSKDTYDDDLDNLLAQIGDQYADLFLAAKNLSDAILLSDILRVNTEITKAPLSASMIKRYDEHHQDLTLLKALVRQQLPEKYKEIFFDQSKNGYAGYIDGGASQEEFYKFIKPILEKMDGTEELLVKLNREDLLRKQRTFDNGSIPHQIHLGELHAILRRQEDFYPFLKDNREKIEKILTFRIPYYVGPLARGNSRFAWMTRKSEETITPWNFEEVVDKGASAQSFIERMTNFDKNLPNEKVLPKHSLLYEYFTVYNELTKVKYVTEGMRKPAFLSGEQKKAIVDLLFKTNRKVTVKQLKEDYFKKIECFDSVEISGVEDRFNASLGTYHDLLKIIKDKDFLDNEENEDILEDIVLTLTLFEDREMIEERLKTYAHLFDDKVMKQLKRRRYTGWGRLSRKLINGIRDKQSGKTILDFLKSDGFANRNFMQLIHDDSLTFKEDIQKAQVSGQGDSLHEHIANLAGSPAIKKGILQTVKVVDELVKVMGRHKPENIVIEMARENQTTQKGQKNSRERMKRIEEGIKELGSQILKEHPVENTQLQNEKLYLYYLQNGRDMYVDQELDINRLSDYDVDHIVPQSFLKDDSIDNKVLTRSDKARGKSDNVPSEEVVKKMKNYWRQLLNAKLITQRKFDNLTKAERGGLSELDKAGFIKRQLVETRQITKHVAQILDSRMNTKYDENDKLIREVKVITLKSKLVSDFRKDFQFYKVREINNYHHAHDAYLNAVVGTALIKKYPKLESEFVYGDYKVYDVRKMIAKSEQEIGKATAKYFFYSNIMNFFKTEITLANGEIRKRPLIETNGETGEIVWDKGRDFATVRKVLSMPQVNIVKKTEVQTGGFSKESILPKRNSDKLIARKKDWDPKKYGGFDSPTVAYSVLVVAKVEKGKSKKLKSVKELLGITIMERSSFEKNPIDFLEAKGYKEVKKDLIIKLPKYSLFELENGRKRMLASAGELQKGNELALPSKYVNFLYLASHYEKLKGSPEDNEQKQLFVEQHKHYLDEIIEQISEFSKRVILADANLDKVLSAYNKHRDKPIREQAENIIHLFTLTNLGAPAAFKYFDTTIDRKRYTSTKEVLDATLIHQSITGLYETRIDLSQLGGDGGGSSGSSGSSGSSGSSGGMDPLQLLQPLEAEIKGTKLKAHWNSGATITCVPEAFLEDERPIQTMLIKTIHGEKQQDVYYLTFKVQGRKVEAEVLASPYDYILLNPSDVPWLMKKPLQLTVLVPLHEYQERLLQQTALPKEQKELLQKLFLKYDALWQHWENQVGHRRIKPHNIATGTLAPRPQKQYPINPKAKPSIQIVIDDLLKQGVLIQQNSTMNTPVYPVPKPDGKWRMVLDYREVNKTIPLIAAQNQHSAGILSSIYRGKYKTTLDLTNGFWAHPITPESYWLTAFTWQGKQYCWTRLPQGFLNSPALFNADVVDLLKEIPNVQAYVDDIYISHDDPQEHLEQLEKIFSILLNAGYVVSLKKSEIAQREVEFLGFNITKEGRGLTDTFKQKLLNITPPKDLKQLQSILGLLNFARNFIPNYSELVKPLYTIVAPANGKFISWTEDNSNQLQHIISVLNQADNLEERNPETRLIIKVNSSPSAGYIRYYNEGSKRPIMYVNYIFSKAEAKFTQTEKLLTTMHKGLIKAMDLAMGQEILVYSPIVSMTKIQRTPLPERKALPVRWITWMTYLEDPRIQFHYDKSLPELQQIPNVTEDVIAKTKHPSEFAMVFYTDGSAIKHPDVNKSHSAGMGIAQVQFIPEYKIVHQWSIPLGDHTAQLAEIAAVEFACKKALKISGPVLIVTDSFYVAESANKELPYWKSNGFLNNKKKPLRHVSKWKSIAECLQLKPDIIIMHEKGHQQPMTTLHTEGNNLADKLATQGSYVVHAGKRTADGSEFEKRTADGSEFESPKKKAKVE

SEQ ID NO: 462 - protein, 2176 aa, synthetic construct
MPAAKRVKLDGGDKKYSIGLDIGTNSVGWAVITDEYKVPSKKFKVLGNTDRHSIKKNLIGALLFDSGETAEATRLKRTARRRYTRRKNRICYLQEIFSNEMAKVDDSFFHRLEESFLVEEDKKHERHPIFGNIVDEVAYHEKYPTIYHLRKKLVDSTDKADLRLIYLALAHMIKFRGHFLIEGDLNPDNSDVDKLFIQLVQTYNQLFEENPINASGVDAKAILSARLSKSRRLENLIAQLPGEKKNGLFGNLIALSLGLTPNFKSNFDLAEDAKLQLSKDTYDDDLDNLLAQIGDQYADLFLAAKNLSDAILLSDILRVNTEITKAPLSASMIKRYDEHHQDLTLLKALVRQQLPEKYKEIFFDQSKNGYAGYIDGGASQEEFYKFIKPILEKMDGTEELLVKLNREDLLRKQRTFDNGSIPHQIHLGELHAILRRQEDFYPFLKDNREKIEKILTFRIPYYVGPLARGNSRFAWMTRKSEETITPWNFEEVVDKGASAQSFIERMTNFDKNLPNEKVLPKHSLLYEYFTVYNELTKVKYVTEGMRKPAFLSGEQKKAIVDLLFKTNRKVTVKQLKEDYFKKIECFDSVEISGVEDRFNASLGTYHDLLKIIKDKDFLDNEENEDILEDIVLTLTLFEDREMIEERLKTYAHLFDDKVMKQLKRRRYTGWGRLSRKLINGIRDKQSGKTILDFLKSDGFANRNFMQLIHDDSLTFKEDIQKAQVSGQGDSLHEHIANLAGSPAIKKGILQTVKVVDELVKVMGRHKPENIVIEMARENQTTQKGQKNSRERMKRIEEGIKELGSQILKEHPVENTQLQNEKLYLYYLQNGRDMYVDQELDINRLSDYDVDHIVPQSFLKDDSIDNKVLTRSDKARGKSDNVPSEEVVKKMKNYWRQLLNAKLITQRKFDNLTKAERGGLSELDKAGFIKRQLVETRQITKHVAQILDSRMNTKYDENDKLIREVKVITLKSKLVSDFRKDFQFYKVREINNYHHAHDAYLNAVVGTALIKKYPKLESEFVYGDYKVYDVRKMIAKSEQEIGKATAKYFFYSNIMNFFKTEITLANGEIRKRPLIETNGETGEIVWDKGRDFATVRKVLSMPQVNIVKKTEVQTGGFSKESILPKRNSDKLIARKKDWDPKKYGGFDSPTVAYSVLVVAKVEKGKSKKLKSVKELLGITIMERSSFEKNPIDFLEAKGYKEVKKDLIIKLPKYSLFELENGRKRMLASAGELQKGNELALPSKYVNFLYLASHYEKLKGSPEDNEQKQLFVEQHKHYLDEIIEQISEFSKRVILADANLDKVLSAYNKHRDKPIREQAENIIHLFTLTNLGAPAAFKYFDTTIDRKRYTSTKEVLDATLIHQSITGLYETRIDLSQLGGDGGGGGEAAAKGSSGGMDPLQLLQPLEAEIKGTKLKAHWNSGATITCVPEAFLEDERPIQTMLIKTIHGEKQQDVYYLTFKVQGRKVEAEVLASPYDYILLNPSDVPWLMKKPLQLTVLVPLHEYQERLLQQTALPKEQKELLQKLFLKYDALWQHWENQVGHRRIKPHNIATGTLAPRPQKQYPINPKAKPSIQIVIDDLLKQGVLIQQNSTMNTPVYPVPKPDGKWRMVLDYREVNKTIPLIAAQNQHSAGILSSIYRGKYKTTLDLTNGFWAHPITPESYWLTAFTWQGKQYCWTRLPQGFLNSPALFNADVVDLLKEIPNVQAYVDDIYISHDDPQEHLEQLEKIFSILLNAGYVVSLKKSEIAQREVEFLGFNITKEGRGLTDTFKQKLLNITPPKDLKQLQSILGLLNFARNFIPNYSELVKPLYTIVAPANGKFISWTEDNSNQLQHIISVLNQADNLEERNPETRLIIKVNSSPSAGYIRYYNEGSKRPIMYVNYIFSKAEAKFTQTEKLLTTMHKGLIKAMDLAMGQEILVYSPIVSMTKIQRTPLPERKALPVRWITWMTYLEDPRIQFHYDKSLPELQQIPNVTEDVIAKTKHPSEFAMVFYTDGSAIKHPDVNKSHSAGMGIAQVQFIPEYKIVHQWSIPLGDHTAQLAEIAAVEFACKKALKISGPVLIVTDSFYVAESANKELPYWKSNGFLNNKKKPLRHVSKWKSIAECLQLKPDIIIMHEKGHQQPMTTLHTEGNNLADKLATQGSYVVHAGKRTADGSEFEKRTADGSEFESPKKKAKVE

SEQ ID NO: 463 - protein, 2176 aa, synthetic construct
MPAAKRVKLDGGDKKYSIGLDIGTNSVGWAVITDEYKVPSKKFKVLGNTDRHSIKKNLIGALLFDSGETAEATRLKRTARRRYTRRKNRICYLQEIFSNEMAKVDDSFFHRLEESFLVEEDKKHERHPIFGNIVDEVAYHEKYPTIYHLRKKLVDSTDKADLRLIYLALAHMIKFRGHFLIEGDLNPDNSDVDKLFIQLVQTYNQLFEENPINASGVDAKAILSARLSKSRRLENLIAQLPGEKKNGLFGNLIALSLGLTPNFKSNFDLAEDAKLQLSKDTYDDDLDNLLAQIGDQYADLFLAAKNLSDAILLSDILRVNTEITKAPLSASMIKRYDEHHQDLTLLKALVRQQLPEKYKEIFFDQSKNGYAGYIDGGASQEEFYKFIKPILEKMDGTEELLVKLNREDLLRKQRTFDNGSIPHQIHLGELHAILRRQEDFYPFLKDNREKIEKILTFRIPYYVGPLARGNSRFAWMTRKSEETITPWNFEEVVDKGASAQSFIERMTNFDKNLPNEKVLPKHSLLYEYFTVYNELTKVKYVTEGMRKPAFLSGEQKKAIVDLLFKTNRKVTVKQLKEDYFKKIECFDSVEISGVEDRFNASLGTYHDLLKIIKDKDFLDNEENEDILEDIVLTLTLFEDREMIEERLKTYAHLFDDKVMKQLKRRRYTGWGRLSRKLINGIRDKQSGKTILDFLKSDGFANRNFMQLIHDDSLTFKEDIQKAQVSGQGDSLHEHIANLAGSPAIKKGILQTVKVVDELVKVMGRHKPENIVIEMARENQTTQKGQKNSRERMKRIEEGIKELGSQILKEHPVENTQLQNEKLYLYYLQNGRDMYVDQELDINRLSDYDVDHIVPQSFLKDDSIDNKVLTRSDKARGKSDNVPSEEVVKKMKNYWRQLLNAKLITQRKFDNLTKAERGGLSELDKAGFIKRQLVETRQITKHVAQILDSRMNTKYDENDKLIREVKVITLKSKLVSDFRKDFQFYKVREINNYHHAHDAYLNAVVGTALIKKYPKLESEFVYGDYKVYDVRKMIAKSEQEIGKATAKYFFYSNIMNFFKTEITLANGEIRKRPLIETNGETGEIVWDKGRDFATVRKVLSMPQVNIVKKTEVQTGGFSKESILPKRNSDKLIARKKDWDPKKYGGFDSPTVAYSVLVVAKVEKGKSKKLKSVKELLGITIMERSSFEKNPIDFLEAKGYKEVKKDLIIKLPKYSLFELENGRKRMLASAGELQKGNELALPSKYVNFLYLASHYEKLKGSPEDNEQKQLFVEQHKHYLDEIIEQISEFSKRVILADANLDKVLSAYNKHRDKPIREQAENIIHLFTLTNLGAPAAFKYFDTTIDRKRYTSTKEVLDATLIHQSITGLYETRIDLSQLGGDGGGGGEAAAKPAPGGMDPLQLLQPLEAEIKGTKLKAHWNSGATITCVPEAFLEDERPIQTMLIKTIHGEKQQDVYYLTFKVQGRKVEAEVLASPYDYILLNPSDVPWLMKKPLQLTVLVPLHEYQERLLQQTALPKEQKELLQKLFLKYDALWQHWENQVGHRRIKPHNIATGTLAPRPQKQYPINPKAKPSIQIVIDDLLKQGVLIQQNSTMNTPVYPVPKPDGKWRMVLDYREVNKTIPLIAAQNQHSAGILSSIYRGKYKTTLDLTNGFWAHPITPESYWLTAFTWQGKQYCWTRLPQGFLNSPALFNADVVDLLKEIPNVQAYVDDIYISHDDPQEHLEQLEKIFSILLNAGYVVSLKKSEIAQREVEFLGFNITKEGRGLTDTFKQKLLNITPPKDLKQLQSILGLLNFARNFIPNYSELVKPLYTIVAPANGKFISWTEDNSNQLQHIISVLNQADNLEERNPETRLIIKVNSSPSAGYIRYYNEGSKRPIMYVNYIFSKAEAKFTQTEKLLTTMHKGLIKAMDLAMGQEILVYSPIVSMTKIQRTPLPERKALPVRWITWMTYLEDPRIQFHYDKSLPELQQIPNVTEDVIAKTKHPSEFAMVFYTDGSAIKHPDVNKSHSAGMGIAQVQFIPEYKIVHQWSIPLGDHTAQLAEIAAVEFACKKALKISGPVLIVTDSFYVAESANKELPYWKSNGFLNNKKKPLRHVSKWKSIAECLQLKPDIIIMHEKGHQQPMTTLHTEGNNLADKLATQGSYVVHAGKRTADGSEFEKRTADGSEFESPKKKAKVE

SEQ ID NO: 464 - protein, 2176 aa, synthetic construct
MPAAKRVKLDGGDKKYSIGLDIGTNSVGWAVITDEYKVPSKKFKVLGNTDRHSIKKNLIGALLFDSGETAEATRLKRTARRRYTRRKNRICYLQEIFSNEMAKVDDSFFHRLEESFLVEEDKKHERHPIFGNIVDEVAYHEKYPTIYHLRKKLVDSTDKADLRLIYLALAHMIKFRGHFLIEGDLNPDNSDVDKLFIQLVQTYNQLFEENPINASGVDAKAILSARLSKSRRLENLIAQLPGEKKNGLFGNLIALSLGLTPNFKSNFDLAEDAKLQLSKDTYDDDLDNLLAQIGDQYADLFLAAKNLSDAILLSDILRVNTEITKAPLSASMIKRYDEHHQDLTLLKALVRQQLPEKYKEIFFDQSKNGYAGYIDGGASQEEFYKFIKPILEKMDGTEELLVKLNREDLLRKQRTFDNGSIPHQIHLGELHAILRRQEDFYPFLKDNREKIEKILTFRIPYYVGPLARGNSRFAWMTRKSEETITPWNFEEVVDKGASAQSFIERMTNFDKNLPNEKVLPKHSLLYEYFTVYNELTKVKYVTEGMRKPAFLSGEQKKAIVDLLFKTNRKVTVKQLKEDYFKKIECFDSVEISGVEDRFNASLGTYHDLLKIIKDKDFLDNEENEDILEDIVLTLTLFEDREMIEERLKTYAHLFDDKVMKQLKRRRYTGWGRLSRKLINGIRDKQSGKTILDFLKSDGFANRNFMQLIHDDSLTFKEDIQKAQVSGQGDSLHEHIANLAGSPAIKKGILQTVKVVDELVKVMGRHKPENIVIEMARENQTTQKGQKNSRERMKRIEEGIKELGSQILKEHPVENTQLQNEKLYLYYLQNGRDMYVDQELDINRLSDYDVDHIVPQSFLKDDSIDNKVLTRSDKARGKSDNVPSEEVVKKMKNYWRQLLNAKLITQRKFDNLTKAERGGLSELDKAGFIKRQLVETRQITKHVAQILDSRMNTKYDENDKLIREVKVITLKSKLVSDFRKDFQFYKVREINNYHHAHDAYLNAVVGTALIKKYPKLESEFVYGDYKVYDVRKMIAKSEQEIGKATAKYFFYSNIMNFFKTEITLANGEIRKRPLIETNGETGEIVWDKGRDFATVRKVLSMPQVNIVKKTEVQTGGFSKESILPKRNSDKLIARKKDWDPKKYGGFDSPTVAYSVLVVAKVEKGKSKKLKSVKELLGITIMERSSFEKNPIDFLEAKGYKEVKKDLIIKLPKYSLFELENGRKRMLASAGELQKGNELALPSKYVNFLYLASHYEKLKGSPEDNEQKQLFVEQHKHYLDEIIEQISEFSKRVILADANLDKVLSAYNKHRDKPIREQAENIIHLFTLTNLGAPAAFKYFDTTIDRKRYTSTKEVLDATLIHQSITGLYETRIDLSQLGGDGGGGSEAAAKPAPGGMDPLQLLQPLEAEIKGTKLKAHWNSGATITCVPEAFLEDERPIQTMLIKTIHGEKQQDVYYLTFKVQGRKVEAEVLASPYDYILLNPSDVPWLMKKPLQLTVLVPLHEYQERLLQQTALPKEQKELLQKLFLKYDALWQHWENQVGHRRIKPHNIATGTLAPRPQKQYPINPKAKPSIQIVIDDLLKQGVLIQQNSTMNTPVYPVPKPDGKWRMVLDYREVNKTIPLIAAQNQHSAGILSSIYRGKYKTTLDLTNGFWAHPITPESYWLTAFTWQGKQYCWTRLPQGFLNSPALFNADVVDLLKEIPNVQAYVDDIYISHDDPQEHLEQLEKIFSILLNAGYVVSLKKSEIAQREVEFLGFNITKEGRGLTDTFKQKLLNITPPKDLKQLQSILGLLNFARNFIPNYSELVKPLYTIVAPANGKFISWTEDNSNQLQHIISVLNQADNLEERNPETRLIIKVNSSPSAGYIRYYNEGSKRPIMYVNYIFSKAEAKFTQTEKLLTTMHKGLIKAMDLAMGQEILVYSPIVSMTKIQRTPLPERKALPVRWITWMTYLEDPRIQFHYDKSLPELQQIPNVTEDVIAKTKHPSEFAMVFYTDGSAIKHPDVNKSHSAGMGIAQVQFIPEYKIVHQWSIPLGDHTAQLAEIAAVEFACKKALKISGPVLIVTDSFYVAESANKELPYWKSNGFLNNKKKPLRHVSKWKSIAECLQLKPDIIIMHEKGHQQPMTTLHTEGNNLADKLATQGSYVVHAGKRTADGSEFEKRTADGSEFESPKKKAKVE

SEQ ID NO: 465 - protein, 2170 aa, synthetic construct
MPAAKRVKLDGGDKKYSIGLDIGTNSVGWAVITDEYKVPSKKFKVLGNTDRHSIKKNLIGALLFDSGETAEATRLKRTARRRYTRRKNRICYLQEIFSNEMAKVDDSFFHRLEESFLVEEDKKHERHPIFGNIVDEVAYHEKYPTIYHLRKKLVDSTDKADLRLIYLALAHMIKFRGHFLIEGDLNPDNSDVDKLFIQLVQTYNQLFEENPINASGVDAKAILSARLSKSRRLENLIAQLPGEKKNGLFGNLIALSLGLTPNFKSNFDLAEDAKLQLSKDTYDDDLDNLLAQIGDQYADLFLAAKNLSDAILLSDILRVNTEITKAPLSASMIKRYDEHHQDLTLLKALVRQQLPEKYKEIFFDQSKNGYAGYIDGGASQEEFYKFIKPILEKMDGTEELLVKLNREDLLRKQRTFDNGSIPHQIHLGELHAILRRQEDFYPFLKDNREKIEKILTFRIPYYVGPLARGNSRFAWMTRKSEETITPWNFEEVVDKGASAQSFIERMTNFDKNLPNEKVLPKHSLLYEYFTVYNELTKVKYVTEGMRKPAFLSGEQKKAIVDLLFKTNRKVTVKQLKEDYFKKIECFDSVEISGVEDRFNASLGTYHDLLKIIKDKDFLDNEENEDILEDIVLTLTLFEDREMIEERLKTYAHLFDDKVMKQLKRRRYTGWGRLSRKLINGIRDKQSGKTILDFLKSDGFANRNFMQLIHDDSLTFKEDIQKAQVSGQGDSLHEHIANLAGSPAIKKGILQTVKVVDELVKVMGRHKPENIVIEMARENQTTQKGQKNSRERMKRIEEGIKELGSQILKEHPVENTQLQNEKLYLYYLQNGRDMYVDQELDINRLSDYDVDHIVPQSFLKDDSIDNKVLTRSDKARGKSDNVPSEEVVKKMKNYWRQLLNAKLITQRKFDNLTKAERGGLSELDKAGFIKRQLVETRQITKHVAQILDSRMNTKYDENDKLIREVKVITLKSKLVSDFRKDFQFYKVREINNYHHAHDAYLNAVVGTALIKKYPKLESEFVYGDYKVYDVRKMIAKSEQEIGKATAKYFFYSNIMNFFKTEITLANGEIRKRPLIETNGETGEIVWDKGRDFATVRKVLSMPQVNIVKKTEVQTGGFSKESILPKRNSDKLIARKKDWDPKKYGGFDSPTVAYSVLVVAKVEKGKSKKLKSVKELLGITIMERSSFEKNPIDFLEAKGYKEVKKDLIIKLPKYSLFELENGRKRMLASAGELQKGNELALPSKYVNFLYLASHYEKLKGSPEDNEQKQLFVEQHKHYLDEIIEQISEFSKRVILADANLDKVLSAYNKHRDKPIREQAENIIHLFTLTNLGAPAAFKYFDTTIDRKRYTSTKEVLDATLIHQSITGLYETRIDLSQLGGDGGEAAAKGGMDPLQLLQPLEAEIKGTKLKAHWNSGATITCVPEAFLEDERPIQTMLIKTIHGEKQQDVYYLTFKVQGRKVEAEVLASPYDYILLNPSDVPWLMKKPLQLTVLVPLHEYQERLLQQTALPKEQKELLQKLFLKYDALWQHWENQVGHRRIKPHNIATGTLAPRPQKQYPINPKAKPSIQIVIDDLLKQGVLIQQNSTMNTPVYPVPKPDGKWRMVLDYREVNKTIPLIAAQNQHSAGILSSIYRGKYKTTLDLTNGFWAHPITPESYWLTAFTWQGKQYCWTRLPQGFLNSPALFNADVVDLLKEIPNVQAYVDDIYISHDDPQEHLEQLEKIFSILLNAGYVVSLKKSEIAQREVEFLGFNITKEGRGLTDTFKQKLLNITPPKDLKQLQSILGLLNFARNFIPNYSELVKPLYTIVAPANGKFISWTEDNSNQLQHIISVLNQADNLEERNPETRLIIKVNSSPSAGYIRYYNEGSKRPIMYVNYIFSKAEAKFTQTEKLLTTMHKGLIKAMDLAMGQEILVYSPIVSMTKIQRTPLPERKALPVRWITWMTYLEDPRIQFHYDKSLPELQQIPNVTEDVIAKTKHPSEFAMVFYTDGSAIKHPDVNKSHSAGMGIAQVQFIPEYKIVHQWSIPLGDHTAQLAEIAAVEFACKKALKISGPVLIVTDSFYVAESANKELPYWKSNGFLNNKKKPLRHVSKWKSIAECLQLKPDIIIMHEKGHQQPMTTLHTEGNNLADKLATQGSYVVHAGKRTADGSEFEKRTADGSEFESPKKKAKVE

SEQ ID NO: 466 - protein, 2176 aa, synthetic construct
MPAAKRVKLDGGDKKYSIGLDIGTNSVGWAVITDEYKVPSKKFKVLGNTDRHSIKKNLIGALLFDSGETAEATRLKRTARRRYTRRKNRICYLQEIFSNEMAKVDDSFFHRLEESFLVEEDKKHERHPIFGNIVDEVAYHEKYPTIYHLRKKLVDSTDKADLRLIYLALAHMIKFRGHFLIEGDLNPDNSDVDKLFIQLVQTYNQLFEENPINASGVDAKAILSARLSKSRRLENLIAQLPGEKKNGLFGNLIALSLGLTPNFKSNFDLAEDAKLQLSKDTYDDDLDNLLAQIGDQYADLFLAAKNLSDAILLSDILRVNTEITKAPLSASMIKRYDEHHQDLTLLKALVRQQLPEKYKEIFFDQSKNGYAGYIDGGASQEEFYKFIKPILEKMDGTEELLVKLNREDLLRKQRTFDNGSIPHQIHLGELHAILRRQEDFYPFLKDNREKIEKILTFRIPYYVGPLARGNSRFAWMTRKSEETITPWNFEEVVDKGASAQSFIERMTNFDKNLPNEKVLPKHSLLYEYFTVYNELTKVKYVTEGMRKPAFLSGEQKKAIVDLLFKTNRKVTVKQLKEDYFKKIECFDSVEISGVEDRFNASLGTYHDLLKIIKDKDFLDNEENEDILEDIVLTLTLFEDREMIEERLKTYAHLFDDKVMKQLKRRRYTGWGRLSRKLINGIRDKQSGKTILDFLKSDGFANRNFMQLIHDDSLTFKEDIQKAQVSGQGDSLHEHIANLAGSPAIKKGILQTVKVVDELVKVMGRHKPENIVIEMARENQTTQKGQKNSRERMKRIEEGIKELGSQILKEHPVENTQLQNEKLYLYYLQNGRDMYVDQELDINRLSDYDVDHIVPQSFLKDDSIDNKVLTRSDKARGKSDNVPSEEVVKKMKNYWRQLLNAKLITQRKFDNLTKAERGGLSELDKAGFIKRQLVETRQITKHVAQILDSRMNTKYDENDKLIREVKVITLKSKLVSDFRKDFQFYKVREINNYHHAHDAYLNAVVGTALIKKYPKLESEFVYGDYKVYDVRKMIAKSEQEIGKATAKYFFYSNIMNFFKTEITLANGEIRKRPLIETNGETGEIVWDKGRDFATVRKVLSMPQVNIVKKTEVQTGGFSKESILPKRNSDKLIARKKDWDPKKYGGFDSPTVAYSVLVVAKVEKGKSKKLKSVKELLGITIMERSSFEKNPIDFLEAKGYKEVKKDLIIKLPKYSLFELENGRKRMLASAGELQKGNELALPSKYVNFLYLASHYEKLKGSPEDNEQKQLFVEQHKHYLDEIIEQISEFSKRVILADANLDKVLSAYNKHRDKPIREQAENIIHLFTLTNLGAPAAFKYFDTTIDRKRYTSTKEVLDATLIHQSITGLYETRIDLSQLGGDGGGGSGSSEAAAKGGMDPLQLLQPLEAEIKGTKLKAHWNSGATITCVPEAFLEDERPIQTMLIKTIHGEKQQDVYYLTFKVQGRKVEAEVLASPYDYILLNPSDVPWLMKKPLQLTVLVPLHEYQERLLQQTALPKEQKELLQKLFLKYDALWQHWENQVGHRRIKPHNIATGTLAPRPQKQYPINPKAKPSIQIVIDDLLKQGVLIQQNSTMNTPVYPVPKPDGKWRMVLDYREVNKTIPLIAAQNQHSAGILSSIYRGKYKTTLDLTNGFWAHPITPESYWLTAFTWQGKQYCWTRLPQGFLNSPALFNADVVDLLKEIPNVQAYVDDIYISHDDPQEHLEQLEKIFSILLNAGYVVSLKKSEIAQREVEFLGFNITKEGRGLTDTFKQKLLNITPPKDLKQLQSILGLLNFARNFIPNYSELVKPLYTIVAPANGKFISWTEDNSNQLQHIISVLNQADNLEERNPETRLIIKVNSSPSAGYIRYYNEGSKRPIMYVNYIFSKAEAKFTQTEKLLTTMHKGLIKAMDLAMGQEILVYSPIVSMTKIQRTPLPERKALPVRWITWMTYLEDPRIQFHYDKSLPELQQIPNVTEDVIAKTKHPSEFAMVFYTDGSAIKHPDVNKSHSAGMGIAQVQFIPEYKIVHQWSIPLGDHTAQLAEIAAVEFACKKALKISGPVLIVTDSFYVAESANKELPYWKSNGFLNNKKKPLRHVSKWKSIAECLQLKPDIIIMHEKGHQQPMTTLHTEGNNLADKLATQGSYVVHAGKRTADGSEFEKRTADGSEFESPKKKAKVE

SEQ ID NO: 467 - protein, 2177 aa, synthetic construct
MPAAKRVKLDGGDKKYSIGLDIGTNSVGWAVITDEYKVPSKKFKVLGNTDRHSIKKNLIGALLFDSGETAEATRLKRTARRRYTRRKNRICYLQEIFSNEMAKVDDSFFHRLEESFLVEEDKKHERHPIFGNIVDEVAYHEKYPTIYHLRKKLVDSTDKADLRLIYLALAHMIKFRGHFLIEGDLNPDNSDVDKLFIQLVQTYNQLFEENPINASGVDAKAILSARLSKSRRLENLIAQLPGEKKNGLFGNLIALSLGLTPNFKSNFDLAEDAKLQLSKDTYDDDLDNLLAQIGDQYADLFLAAKNLSDAILLSDILRVNTEITKAPLSASMIKRYDEHHQDLTLLKALVRQQLPEKYKEIFFDQSKNGYAGYIDGGASQEEFYKFIKPILEKMDGTEELLVKLNREDLLRKQRTFDNGSIPHQIHLGELHAILRRQEDFYPFLKDNREKIEKILTFRIPYYVGPLARGNSRFAWMTRKSEETITPWNFEEVVDKGASAQSFIERMTNFDKNLPNEKVLPKHSLLYEYFTVYNELTKVKYVTEGMRKPAFLSGEQKKAIVDLLFKTNRKVTVKQLKEDYFKKIECFDSVEISGVEDRFNASLGTYHDLLKIIKDKDFLDNEENEDILEDIVLTLTLFEDREMIEERLKTYAHLFDDKVMKQLKRRRYTGWGRLSRKLINGIRDKQSGKTILDFLKSDGFANRNFMQLIHDDSLTFKEDIQKAQVSGQGDSLHEHIANLAGSPAIKKGILQTVKVVDELVKVMGRHKPENIVIEMARENQTTQKGQKNSRERMKRIEEGIKELGSQILKEHPVENTQLQNEKLYLYYLQNGRDMYVDQELDINRLSDYDVDHIVPQSFLKDDSIDNKVLTRSDKARGKSDNVPSEEVVKKMKNYWRQLLNAKLITQRKFDNLTKAERGGLSELDKAGFIKRQLVETRQITKHVAQILDSRMNTKYDENDKLIREVKVITLKSKLVSDFRKDFQFYKVREINNYHHAHDAYLNAVVGTALIKKYPKLESEFVYGDYKVYDVRKMIAKSEQEIGKATAKYFFYSNIMNFFKTEITLANGEIRKRPLIETNGETGEIVWDKGRDFATVRKVLSMPQVNIVKKTEVQTGGFSKESILPKRNSDKLIARKKDWDPKKYGGFDSPTVAYSVLVVAKVEKGKSKKLKSVKELLGITIMERSSFEKNPIDFLEAKGYKEVKKDLIIKLPKYSLFELENGRKRMLASAGELQKGNELALPSKYVNFLYLASHYEKLKGSPEDNEQKQLFVEQHKHYLDEIIEQISEFSKRVILADANLDKVLSAYNKHRDKPIREQAENIIHLFTLTNLGAPAAFKYFDTTIDRKRYTSTKEVLDATLIHQSITGLYETRIDLSQLGGDGGGSSGSSGSSGSSGGMDPLQLLQPLEAEIKGTKLKAHWNSGATITCVPEAFLEDERPIQTMLIKTIHGEKQQDVYYLTFKVQGRKVEAEVLASPYDYILLNPSDVPWLMKKPLQLTVLVPLHEYQERLLQQTALPKEQKELLQKLFLKYDALWQHWENQVGHRRIKPHNIATGTLAPRPQKQYPINPKAKPSIQIVIDDLLKQGVLIQQNSTMNTPVYPVPKPDGKWRMVLDYREVNKTIPLIAAQNQHSAGILSSIYRGKYKTTLDLTNGFWAHPITPESYWLTAFTWQGKQYCWTRLPQGFLNSPALFNADVVDLLKEIPNVQAYVDDIYISHDDPQEHLEQLEKIFSILLNAGYVVSLKKSEIAQREVEFLGFNITKEGRGLTDTFKQKLLNITPPKDLKQLQSILGLLNFARNFIPNYSELVKPLYTIVAPANGKFISWTEDNSNQLQHIISVLNQADNLEERNPETRLIIKVNSSPSAGYIRYYNEGSKRPIMYVNYIFSKAEAKFTQTEKLLTTMHKGLIKAMDLAMGQEILVYSPIVSMTKIQRTPLPERKALPVRWITWMTYLEDPRIQFHYDKSLPELQQIPNVTEDVIAKTKHPSEFAMVFYTDGSAIKHPDVNKSHSAGMGIAQVQFIPEYKIVHQWSIPLGDHTAQLAEIAAVEFACKKALKISGPVLIVTDSFYVAESANKELPYWKSNGFLNNKKKPLRHVSKWKSIAECLQLKPDIIIMHEKGHQQPMTTLHTEGNNLADKLATQGSYVVHAGKRTADGSEFEKRTADGSEFESPKKKAKVE

SEQ ID NO: 468 - protein, 2177 aa, synthetic construct
MPAAKRVKLDGGDKKYSIGLDIGTNSVGWAVITDEYKVPSKKFKVLGNTDRHSIKKNLIGALLFDSGETAEATRLKRTARRRYTRRKNRICYLQEIFSNEMAKVDDSFFHRLEESFLVEEDKKHERHPIFGNIVDEVAYHEKYPTIYHLRKKLVDSTDKADLRLIYLALAHMIKFRGHFLIEGDLNPDNSDVDKLFIQLVQTYNQLFEENPINASGVDAKAILSARLSKSRRLENLIAQLPGEKKNGLFGNLIALSLGLTPNFKSNFDLAEDAKLQLSKDTYDDDLDNLLAQIGDQYADLFLAAKNLSDAILLSDILRVNTEITKAPLSASMIKRYDEHHQDLTLLKALVRQQLPEKYKEIFFDQSKNGYAGYIDGGASQEEFYKFIKPILEKMDGTEELLVKLNREDLLRKQRTFDNGSIPHQIHLGELHAILRRQEDFYPFLKDNREKIEKILTFRIPYYVGPLARGNSRFAWMTRKSEETITPWNFEEVVDKGASAQSFIERMTNFDKNLPNEKVLPKHSLLYEYFTVYNELTKVKYVTEGMRKPAFLSGEQKKAIVDLLFKTNRKVTVKQLKEDYFKKIECFDSVEISGVEDRFNASLGTYHDLLKIIKDKDFLDNEENEDILEDIVLTLTLFEDREMIEERLKTYAHLFDDKVMKQLKRRRYTGWGRLSRKLINGIRDKQSGKTILDFLKSDGFANRNFMQLIHDDSLTFKEDIQKAQVSGQGDSLHEHIANLAGSPAIKKGILQTVKVVDELVKVMGRHKPENIVIEMARENQTTQKGQKNSRERMKRIEEGIKELGSQILKEHPVENTQLQNEKLYLYYLQNGRDMYVDQELDINRLSDYDVDHIVPQSFLKDDSIDNKVLTRSDKARGKSDNVPSEEVVKKMKNYWRQLLNAKLITQRKFDNLTKAERGGLSELDKAGFIKRQLVETRQITKHVAQILDSRMNTKYDENDKLIREVKVITLKSKLVSDFRKDFQFYKVREINNYHHAHDAYLNAVVGTALIKKYPKLESEFVYGDYKVYDVRKMIAKSEQEIGKATAKYFFYSNIMNFFKTEITLANGEIRKRPLIETNGETGEIVWDKGRDFATVRKVLSMPQVNIVKKTEVQTGGFSKESILPKRNSDKLIARKKDWDPKKYGGFDSPTVAYSVLVVAKVEKGKSKKLKSVKELLGITIMERSSFEKNPIDFLEAKGYKEVKKDLIIKLPKYSLFELENGRKRMLASAGELQKGNELALPSKYVNFLYLASHYEKLKGSPEDNEQKQLFVEQHKHYLDEIIEQISEFSKRVILADANLDKVLSAYNKHRDKPIREQAENIIHLFTLTNLGAPAAFKYFDTTIDRKRYTSTKEVLDATLIHQSITGLYETRIDLSQLGGDGGGSAGSAAGSGEFGGMDPLQLLQPLEAEIKGTKLKAHWNSGATITCVPEAFLEDERPIQTMLIKTIHGEKQQDVYYLTFKVQGRKVEAEVLASPYDYILLNPSDVPWLMKKPLQLTVLVPLHEYQERLLQQTALPKEQKELLQKLFLKYDALWQHWENQVGHRRIKPHNIATGTLAPRPQKQYPINPKAKPSIQIVIDDLLKQGVLIQQNSTMNTPVYPVPKPDGKWRMVLDYREVNKTIPLIAAQNQHSAGILSSIYRGKYKTTLDLTNGFWAHPITPESYWLTAFTWQGKQYCWTRLPQGFLNSPALFNADVVDLLKEIPNVQAYVDDIYISHDDPQEHLEQLEKIFSILLNAGYVVSLKKSEIAQREVEFLGFNITKEGRGLTDTFKQKLLNITPPKDLKQLQSILGLLNFARNFIPNYSELVKPLYTIVAPANGKFISWTEDNSNQLQHIISVLNQADNLEERNPETRLIIKVNSSPSAGYIRYYNEGSKRPIMYVNYIFSKAEAKFTQTEKLLTTMHKGLIKAMDLAMGQEILVYSPIVSMTKIQRTPLPERKALPVRWITWMTYLEDPRIQFHYDKSLPELQQIPNVTEDVIAKTKHPSEFAMVFYTDGSAIKHPDVNKSHSAGMGIAQVQFIPEYKIVHQWSIPLGDHTAQLAEIAAVEFACKKALKISGPVLIVTDSFYVAESANKELPYWKSNGFLNNKKKPLRHVSKWKSIAECLQLKPDIIIMHEKGHQQPMTTLHTEGNNLADKLATQGSYVVHAGKRTADGSEFEKRTADGSEFESPKKKAKVE

SEQ ID NO: 469 - protein, 2171 aa, synthetic construct
MPAAKRVKLDGGDKKYSIGLDIGTNSVGWAVITDEYKVPSKKFKVLGNTDRHSIKKNLIGALLFDSGETAEATRLKRTARRRYTRRKNRICYLQEIFSNEMAKVDDSFFHRLEESFLVEEDKKHERHPIFGNIVDEVAYHEKYPTIYHLRKKLVDSTDKADLRLIYLALAHMIKFRGHFLIEGDLNPDNSDVDKLFIQLVQTYNQLFEENPINASGVDAKAILSARLSKSRRLENLIAQLPGEKKNGLFGNLIALSLGLTPNFKSNFDLAEDAKLQLSKDTYDDDLDNLLAQIGDQYADLFLAAKNLSDAILLSDILRVNTEITKAPLSASMIKRYDEHHQDLTLLKALVRQQLPEKYKEIFFDQSKNGYAGYIDGGASQEEFYKFIKPILEKMDGTEELLVKLNREDLLRKQRTFDNGSIPHQIHLGELHAILRRQEDFYPFLKDNREKIEKILTFRIPYYVGPLARGNSRFAWMTRKSEETITPWNFEEVVDKGASAQSFIERMTNFDKNLPNEKVLPKHSLLYEYFTVYNELTKVKYVTEGMRKPAFLSGEQKKAIVDLLFKTNRKVTVKQLKEDYFKKIECFDSVEISGVEDRFNASLGTYHDLLKIIKDKDFLDNEENEDILEDIVLTLTLFEDREMIEERLKTYAHLFDDKVMKQLKRRRYTGWGRLSRKLINGIRDKQSGKTILDFLKSDGFANRNFMQLIHDDSLTFKEDIQKAQVSGQGDSLHEHIANLAGSPAIKKGILQTVKVVDELVKVMGRHKPENIVIEMARENQTTQKGQKNSRERMKRIEEGIKELGSQILKEHPVENTQLQNEKLYLYYLQNGRDMYVDQELDINRLSDYDVDHIVPQSFLKDDSIDNKVLTRSDKARGKSDNVPSEEVVKKMKNYWRQLLNAKLITQRKFDNLTKAERGGLSELDKAGFIKRQLVETRQITKHVAQILDSRMNTKYDENDKLIREVKVITLKSKLVSDFRKDFQFYKVREINNYHHAHDAYLNAVVGTALIKKYPKLESEFVYGDYKVYDVRKMIAKSEQEIGKATAKYFFYSNIMNFFKTEITLANGEIRKRPLIETNGETGEIVWDKGRDFATVRKVLSMPQVNIVKKTEVQTGGFSKESILPKRNSDKLIARKKDWDPKKYGGFDSPTVAYSVLVVAKVEKGKSKKLKSVKELLGITIMERSSFEKNPIDFLEAKGYKEVKKDLIIKLPKYSLFELENGRKRMLASAGELQKGNELALPSKYVNFLYLASHYEKLKGSPEDNEQKQLFVEQHKHYLDEIIEQISEFSKRVILADANLDKVLSAYNKHRDKPIREQAENIIHLFTLTNLGAPAAFKYFDTTIDRKRYTSTKEVLDATLIHQSITGLYETRIDLSQLGGDGGGGSGGSGGMDPLQLLQPLEAEIKGTKLKAHWNSGATITCVPEAFLEDERPIQTMLIKTIHGEKQQDVYYLTFKVQGRKVEAEVLASPYDYILLNPSDVPWLMKKPLQLTVLVPLHEYQERLLQQTALPKEQKELLQKLFLKYDALWQHWENQVGHRRIKPHNIATGTLAPRPQKQYPINPKAKPSIQIVIDDLLKQGVLIQQNSTMNTPVYPVPKPDGKWRMVLDYREVNKTIPLIAAQNQHSAGILSSIYRGKYKTTLDLTNGFWAHPITPESYWLTAFTWQGKQYCWTRLPQGFLNSPALFNADVVDLLKEIPNVQAYVDDIYISHDDPQEHLEQLEKIFSILLNAGYVVSLKKSEIAQREVEFLGFNITKEGRGLTDTFKQKLLNITPPKDLKQLQSILGLLNFARNFIPNYSELVKPLYTIVAPANGKFISWTEDNSNQLQHIISVLNQADNLEERNPETRLIIKVNSSPSAGYIRYYNEGSKRPIMYVNYIFSKAEAKFTQTEKLLTTMHKGLIKAMDLAMGQEILVYSPIVSMTKIQRTPLPERKALPVRWITWMTYLEDPRIQFHYDKSLPELQQIPNVTEDVIAKTKHPSEFAMVFYTDGSAIKHPDVNKSHSAGMGIAQVQFIPEYKIVHQWSIPLGDHTAQLAEIAAVEFACKKALKISGPVLIVTDSFYVAESANKELPYWKSNGFLNNKKKPLRHVSKWKSIAECLQLKPDIIIMHEKGHQQPMTTLHTEGNNLADKLATQGSYVVHAGKRTADGSEFEKRTADGSEFESPKKKAKVE

SEQ ID NO: 470 - protein, 2176 aa, synthetic construct
MPAAKRVKLDGGDKKYSIGLDIGTNSVGWAVITDEYKVPSKKFKVLGNTDRHSIKKNLIGALLFDSGETAEATRLKRTARRRYTRRKNRICYLQEIFSNEMAKVDDSFFHRLEESFLVEEDKKHERHPIFGNIVDEVAYHEKYPTIYHLRKKLVDSTDKADLRLIYLALAHMIKFRGHFLIEGDLNPDNSDVDKLFIQLVQTYNQLFEENPINASGVDAKAILSARLSKSRRLENLIAQLPGEKKNGLFGNLIALSLGLTPNFKSNFDLAEDAKLQLSKDTYDDDLDNLLAQIGDQYADLFLAAKNLSDAILLSDILRVNTEITKAPLSASMIKRYDEHHQDLTLLKALVRQQLPEKYKEIFFDQSKNGYAGYIDGGASQEEFYKFIKPILEKMDGTEELLVKLNREDLLRKQRTFDNGSIPHQIHLGELHAILRRQEDFYPFLKDNREKIEKILTFRIPYYVGPLARGNSRFAWMTRKSEETITPWNFEEVVDKGASAQSFIERMTNFDKNLPNEKVLPKHSLLYEYFTVYNELTKVKYVTEGMRKPAFLSGEQKKAIVDLLFKTNRKVTVKQLKEDYFKKIECFDSVEISGVEDRFNASLGTYHDLLKIIKDKDFLDNEENEDILEDIVLTLTLFEDREMIEERLKTYAHLFDDKVMKQLKRRRYTGWGRLSRKLINGIRDKQSGKTILDFLKSDGFANRNFMQLIHDDSLTFKEDIQKAQVSGQGDSLHEHIANLAGSPAIKKGILQTVKVVDELVKVMGRHKPENIVIEMARENQTTQKGQKNSRERMKRIEEGIKELGSQILKEHPVENTQLQNEKLYLYYLQNGRDMYVDQELDINRLSDYDVDHIVPQSFLKDDSIDNKVLTRSDKARGKSDNVPSEEVVKKMKNYWRQLLNAKLITQRKFDNLTKAERGGLSELDKAGFIKRQLVETRQITKHVAQILDSRMNTKYDENDKLIREVKVITLKSKLVSDFRKDFQFYKVREINNYHHAHDAYLNAVVGTALIKKYPKLESEFVYGDYKVYDVRKMIAKSEQEIGKATAKYFFYSNIMNFFKTEITLANGEIRKRPLIETNGETGEIVWDKGRDFATVRKVLSMPQVNIVKKTEVQTGGFSKESILPKRNSDKLIARKKDWDPKKYGGFDSPTVAYSVLVVAKVEKGKSKKLKSVKELLGITIMERSSFEKNPIDFLEAKGYKEVKKDLIIKLPKYSLFELENGRKRMLASAGELQKGNELALPSKYVNFLYLASHYEKLKGSPEDNEQKQLFVEQHKHYLDEIIEQISEFSKRVILADANLDKVLSAYNKHRDKPIREQAENIIHLFTLTNLGAPAAFKYFDTTIDRKRYTSTKEVLDATLIHQSITGLYETRIDLSQLGGDGGGGGEAAAKGGSGGMDPLQLLQPLEAEIKGTKLKAHWNSGATITCVPEAFLEDERPIQTMLIKTIHGEKQQDVYYLTFKVQGRKVEAEVLASPYDYILLNPSDVPWLMKKPLQLTVLVPLHEYQERLLQQTALPKEQKELLQKLFLKYDALWQHWENQVGHRRIKPHNIATGTLAPRPQKQYPINPKAKPSIQIVIDDLLKQGVLIQQNSTMNTPVYPVPKPDGKWRMVLDYREVNKTIPLIAAQNQHSAGILSSIYRGKYKTTLDLTNGFWAHPITPESYWLTAFTWQGKQYCWTRLPQGFLNSPALFNADVVDLLKEIPNVQAYVDDIYISHDDPQEHLEQLEKIFSILLNAGYVVSLKKSEIAQREVEFLGFNITKEGRGLTDTFKQKLLNITPPKDLKQLQSILGLLNFARNFIPNYSELVKPLYTIVAPANGKFISWTEDNSNQLQHIISVLNQADNLEERNPETRLIIKVNSSPSAGYIRYYNEGSKRPIMYVNYIFSKAEAKFTQTEKLLTTMHKGLIKAMDLAMGQEILVYSPIVSMTKIQRTPLPERKALPVRWITWMTYLEDPRIQFHYDKSLPELQQIPNVTEDVIAKTKHPSEFAMVFYTDGSAIKHPDVNKSHSAGMGIAQVQFIPEYKIVHQWSIPLGDHTAQLAEIAAVEFACKKALKISGPVLIVTDSFYVAESANKELPYWKSNGFLNNKKKPLRHVSKWKSIAECLQLKPDIIIMHEKGHQQPMTTLHTEGNNLADKLATQGSYVVHAGKRTADGSEFEKRTADGSEFESPKKKAKVE

SEQ ID NO: 471 - protein, 2174 aa, synthetic construct
MPAAKRVKLDGGDKKYSIGLDIGTNSVGWAVITDEYKVPSKKFKVLGNTDRHSIKKNLIGALLFDSGETAEATRLKRTARRRYTRRKNRICYLQEIFSNEMAKVDDSFFHRLEESFLVEEDKKHERHPIFGNIVDEVAYHEKYPTIYHLRKKLVDSTDKADLRLIYLALAHMIKFRGHFLIEGDLNPDNSDVDKLFIQLVQTYNQLFEENPINASGVDAKAILSARLSKSRRLENLIAQLPGEKKNGLFGNLIALSLGLTPNFKSNFDLAEDAKLQLSKDTYDDDLDNLLAQIGDQYADLFLAAKNLSDAILLSDILRVNTEITKAPLSASMIKRYDEHHQDLTLLKALVRQQLPEKYKEIFFDQSKNGYAGYIDGGASQEEFYKFIKPILEKMDGTEELLVKLNREDLLRKQRTFDNGSIPHQIHLGELHAILRRQEDFYPFLKDNREKIEKILTFRIPYYVGPLARGNSRFAWMTRKSEETITPWNFEEVVDKGASAQSFIERMTNFDKNLPNEKVLPKHSLLYEYFTVYNELTKVKYVTEGMRKPAFLSGEQKKAIVDLLFKTNRKVTVKQLKEDYFKKIECFDSVEISGVEDRFNASLGTYHDLLKIIKDKDFLDNEENEDILEDIVLTLTLFEDREMIEERLKTYAHLFDDKVMKQLKRRRYTGWGRLSRKLINGIRDKQSGKTILDFLKSDGFANRNFMQLIHDDSLTFKEDIQKAQVSGQGDSLHEHIANLAGSPAIKKGILQTVKVVDELVKVMGRHKPENIVIEMARENQTTQKGQKNSRERMKRIEEGIKELGSQILKEHPVENTQLQNEKLYLYYLQNGRDMYVDQELDINRLSDYDVDHIVPQSFLKDDSIDNKVLTRSDKARGKSDNVPSEEVVKKMKNYWRQLLNAKLITQRKFDNLTKAERGGLSELDKAGFIKRQLVETRQITKHVAQILDSRMNTKYDENDKLIREVKVITLKSKLVSDFRKDFQFYKVREINNYHHAHDAYLNAVVGTALIKKYPKLESEFVYGDYKVYDVRKMIAKSEQEIGKATAKYFFYSNIMNFFKTEITLANGEIRKRPLIETNGETGEIVWDKGRDFATVRKVLSMPQVNIVKKTEVQTGGFSKESILPKRNSDKLIARKKDWDPKKYGGFDSPTVAYSVLVVAKVEKGKSKKLKSVKELLGITIMERSSFEKNPIDFLEAKGYKEVKKDLIIKLPKYSLFELENGRKRMLASAGELQKGNELALPSKYVNFLYLASHYEKLKGSPEDNEQKQLFVEQHKHYLDEIIEQISEFSKRVILADANLDKVLSAYNKHRDKPIREQAENIIHLFTLTNLGAPAAFKYFDTTIDRKRYTSTKEVLDATLIHQSITGLYETRIDLSQLGGDGGPAPAPAPAPGGMDPLQLLQPLEAEIKGTKLKAHWNSGATITCVPEAFLEDERPIQTMLIKTIHGEKQQDVYYLTFKVQGRKVEAEVLASPYDYILLNPSDVPWLMKKPLQLTVLVPLHEYQERLLQQTALPKEQKELLQKLFLKYDALWQHWENQVGHRRIKPHNIATGTLAPRPQKQYPINPKAKPSIQIVIDDLLKQGVLIQQNSTMNTPVYPVPKPDGKWRMVLDYREVNKTIPLIAAQNQHSAGILSSIYRGKYKTTLDLTNGFWAHPITPESYWLTAFTWQGKQYCWTRLPQGFLNSPALFNADVVDLLKEIPNVQAYVDDIYISHDDPQEHLEQLEKIFSILLNAGYVVSLKKSEIAQREVEFLGFNITKEGRGLTDTFKQKLLNITPPKDLKQLQSILGLLNFARNFIPNYSELVKPLYTIVAPANGKFISWTEDNSNQLQHIISVLNQADNLEERNPETRLIIKVNSSPSAGYIRYYNEGSKRPIMYVNYIFSKAEAKFTQTEKLLTTMHKGLIKAMDLAMGQEILVYSPIVSMTKIQRTPLPERKALPVRWITWMTYLEDPRIQFHYDKSLPELQQIPNVTEDVIAKTKHPSEFAMVFYTDGSAIKHPDVNKSHSAGMGIAQVQFIPEYKIVHQWSIPLGDHTAQLAEIAAVEFACKKALKISGPVLIVTDSFYVAESANKELPYWKSNGFLNNKKKPLRHVSKWKSIAECLQLKPDIIIMHEKGHQQPMTTLHTEGNNLADKLATQGSYVVHAGKRTADGSEFEKRTADGSEFESPKKKAKVE

SEQ ID NO: 472 - protein, 2174 aa, synthetic construct
MPAAKRVKLDGGDKKYSIGLDIGTNSVGWAVITDEYKVPSKKFKVLGNTDRHSIKKNLIGALLFDSGETAEATRLKRTARRRYTRRKNRICYLQEIFSNEMAKVDDSFFHRLEESFLVEEDKKHERHPIFGNIVDEVAYHEKYPTIYHLRKKLVDSTDKADLRLIYLALAHMIKFRGHFLIEGDLNPDNSDVDKLFIQLVQTYNQLFEENPINASGVDAKAILSARLSKSRRLENLIAQLPGEKKNGLFGNLIALSLGLTPNFKSNFDLAEDAKLQLSKDTYDDDLDNLLAQIGDQYADLFLAAKNLSDAILLSDILRVNTEITKAPLSASMIKRYDEHHQDLTLLKALVRQQLPEKYKEIFFDQSKNGYAGYIDGGASQEEFYKFIKPILEKMDGTEELLVKLNREDLLRKQRTFDNGSIPHQIHLGELHAILRRQEDFYPFLKDNREKIEKILTFRIPYYVGPLARGNSRFAWMTRKSEETITPWNFEEVVDKGASAQSFIERMTNFDKNLPNEKVLPKHSLLYEYFTVYNELTKVKYVTEGMRKPAFLSGEQKKAIVDLLFKTNRKVTVKQLKEDYFKKIECFDSVEISGVEDRFNASLGTYHDLLKIIKDKDFLDNEENEDILEDIVLTLTLFEDREMIEERLKTYAHLFDDKVMKQLKRRRYTGWGRLSRKLINGIRDKQSGKTILDFLKSDGFANRNFMQLIHDDSLTFKEDIQKAQVSGQGDSLHEHIANLAGSPAIKKGILQTVKVVDELVKVMGRHKPENIVIEMARENQTTQKGQKNSRERMKRIEEGIKELGSQILKEHPVENTQLQNEKLYLYYLQNGRDMYVDQELDINRLSDYDVDHIVPQSFLKDDSIDNKVLTRSDKARGKSDNVPSEEVVKKMKNYWRQLLNAKLITQRKFDNLTKAERGGLSELDKAGFIKRQLVETRQITKHVAQILDSRMNTKYDENDKLIREVKVITLKSKLVSDFRKDFQFYKVREINNYHHAHDAYLNAVVGTALIKKYPKLESEFVYGDYKVYDVRKMIAKSEQEIGKATAKYFFYSNIMNFFKTEITLANGEIRKRPLIETNGETGEIVWDKGRDFATVRKVLSMPQVNIVKKTEVQTGGFSKESILPKRNSDKLIARKKDWDPKKYGGFDSPTVAYSVLVVAKVEKGKSKKLKSVKELLGITIMERSSFEKNPIDFLEAKGYKEVKKDLIIKLPKYSLFELENGRKRMLASAGELQKGNELALPSKYVNFLYLASHYEKLKGSPEDNEQKQLFVEQHKHYLDEIIEQISEFSKRVILADANLDKVLSAYNKHRDKPIREQAENIIHLFTLTNLGAPAAFKYFDTTIDRKRYTSTKEVLDATLIHQSITGLYETRIDLSQLGGDGGGSSGGSGGGGGMDPLQLLQPLEAEIKGTKLKAHWNSGATITCVPEAFLEDERPIQTMLIKTIHGEKQQDVYYLTFKVQGRKVEAEVLASPYDYILLNPSDVPWLMKKPLQLTVLVPLHEYQERLLQQTALPKEQKELLQKLFLKYDALWQHWENQVGHRRIKPHNIATGTLAPRPQKQYPINPKAKPSIQIVIDDLLKQGVLIQQNSTMNTPVYPVPKPDGKWRMVLDYREVNKTIPLIAAQNQHSAGILSSIYRGKYKTTLDLTNGFWAHPITPESYWLTAFTWQGKQYCWTRLPQGFLNSPALFNADVVDLLKEIPNVQAYVDDIYISHDDPQEHLEQLEKIFSILLNAGYVVSLKKSEIAQREVEFLGFNITKEGRGLTDTFKQKLLNITPPKDLKQLQSILGLLNFARNFIPNYSELVKPLYTIVAPANGKFISWTEDNSNQLQHIISVLNQADNLEERNPETRLIIKVNSSPSAGYIRYYNEGSKRPIMYVNYIFSKAEAKFTQTEKLLTTMHKGLIKAMDLAMGQEILVYSPIVSMTKIQRTPLPERKALPVRWITWMTYLEDPRIQFHYDKSLPELQQIPNVTEDVIAKTKHPSEFAMVFYTDGSAIKHPDVNKSHSAGMGIAQVQFIPEYKIVHQWSIPLGDHTAQLAEIAAVEFACKKALKISGPVLIVTDSFYVAESANKELPYWKSNGFLNNKKKPLRHVSKWKSIAECLQLKPDIIIMHEKGHQQPMTTLHTEGNNLADKLATQGSYVVHAGKRTADGSEFEKRTADGSEFESPKKKAKVE

SEQ ID NO: 473 - protein, 2174 aa, synthetic construct
MPAAKRVKLDGGDKKYSIGLDIGTNSVGWAVITDEYKVPSKKFKVLGNTDRHSIKKNLIGALLFDSGETAEATRLKRTARRRYTRRKNRICYLQEIFSNEMAKVDDSFFHRLEESFLVEEDKKHERHPIFGNIVDEVAYHEKYPTIYHLRKKLVDSTDKADLRLIYLALAHMIKFRGHFLIEGDLNPDNSDVDKLFIQLVQTYNQLFEENPINASGVDAKAILSARLSKSRRLENLIAQLPGEKKNGLFGNLIALSLGLTPNFKSNFDLAEDAKLQLSKDTYDDDLDNLLAQIGDQYADLFLAAKNLSDAILLSDILRVNTEITKAPLSASMIKRYDEHHQDLTLLKALVRQQLPEKYKEIFFDQSKNGYAGYIDGGASQEEFYKFIKPILEKMDGTEELLVKLNREDLLRKQRTFDNGSIPHQIHLGELHAILRRQEDFYPFLKDNREKIEKILTFRIPYYVGPLARGNSRFAWMTRKSEETITPWNFEEVVDKGASAQSFIERMTNFDKNLPNEKVLPKHSLLYEYFTVYNELTKVKYVTEGMRKPAFLSGEQKKAIVDLLFKTNRKVTVKQLKEDYFKKIECFDSVEISGVEDRFNASLGTYHDLLKIIKDKDFLDNEENEDILEDIVLTLTLFEDREMIEERLKTYAHLFDDKVMKQLKRRRYTGWGRLSRKLINGIRDKQSGKTILDFLKSDGFANRNFMQLIHDDSLTFKEDIQKAQVSGQGDSLHEHIANLAGSPAIKKGILQTVKVVDELVKVMGRHKPENIVIEMARENQTTQKGQKNSRERMKRIEEGIKELGSQILKEHPVENTQLQNEKLYLYYLQNGRDMYVDQELDINRLSDYDVDHIVPQSFLKDDSIDNKVLTRSDKARGKSDNVPSEEVVKKMKNYWRQLLNAKLITQRKFDNLTKAERGGLSELDKAGFIKRQLVETRQITKHVAQILDSRMNTKYDENDKLIREVKVITLKSKLVSDFRKDFQFYKVREINNYHHAHDAYLNAVVGTALIKKYPKLESEFVYGDYKVYDVRKMIAKSEQEIGKATAKYFFYSNIMNFFKTEITLANGEIRKRPLIETNGETGEIVWDKGRDFATVRKVLSMPQVNIVKKTEVQTGGFSKESILPKRNSDKLIARKKDWDPKKYGGFDSPTVAYSVLVVAKVEKGKSKKLKSVKELLGITIMERSSFEKNPIDFLEAKGYKEVKKDLIIKLPKYSLFELENGRKRMLASAGELQKGNELALPSKYVNFLYLASHYEKLKGSPEDNEQKQLFVEQHKHYLDEIIEQISEFSKRVILADANLDKVLSAYNKHRDKPIREQAENIIHLFTLTNLGAPAAFKYFDTTIDRKRYTSTKEVLDATLIHQSITGLYETRIDLSQLGGDGGPAPGSSGGSGGMDPLQLLQPLEAEIKGTKLKAHWNSGATITCVPEAFLEDERPIQTMLIKTIHGEKQQDVYYLTFKVQGRKVEAEVLASPYDYILLNPSDVPWLMKKPLQLTVLVPLHEYQERLLQQTALPKEQKELLQKLFLKYDALWQHWENQVGHRRIKPHNIATGTLAPRPQKQYPINPKAKPSIQIVIDDLLKQGVLIQQNSTMNTPVYPVPKPDGKWRMVLDYREVNKTIPLIAAQNQHSAGILSSIYRGKYKTTLDLTNGFWAHPITPESYWLTAFTWQGKQYCWTRLPQGFLNSPALFNADVVDLLKEIPNVQAYVDDIYISHDDPQEHLEQLEKIFSILLNAGYVVSLKKSEIAQREVEFLGFNITKEGRGLTDTFKQKLLNITPPKDLKQLQSILGLLNFARNFIPNYSELVKPLYTIVAPANGKFISWTEDNSNQLQHIISVLNQADNLEERNPETRLIIKVNSSPSAGYIRYYNEGSKRPIMYVNYIFSKAEAKFTQTEKLLTTMHKGLIKAMDLAMGQEILVYSPIVSMTKIQRTPLPERKALPVRWITWMTYLEDPRIQFHYDKSLPELQQIPNVTEDVIAKTKHPSEFAMVFYTDGSAIKHPDVNKSHSAGMGIAQVQFIPEYKIVHQWSIPLGDHTAQLAEIAAVEFACKKALKISGPVLIVTDSFYVAESANKELPYWKSNGFLNNKKKPLRHVSKWKSIAECLQLKPDIIIMHEKGHQQPMTTLHTEGNNLADKLATQGSYVVHAGKRTADGSEFEKRTADGSEFESPKKKAKVE

SEQ ID NO: 474 - protein, 2176 aa, synthetic construct
MPAAKRVKLDGGDKKYSIGLDIGTNSVGWAVITDEYKVPSKKFKVLGNTDRHSIKKNLIGALLFDSGETAEATRLKRTARRRYTRRKNRICYLQEIFSNEMAKVDDSFFHRLEESFLVEEDKKHERHPIFGNIVDEVAYHEKYPTIYHLRKKLVDSTDKADLRLIYLALAHMIKFRGHFLIEGDLNPDNSDVDKLFIQLVQTYNQLFEENPINASGVDAKAILSARLSKSRRLENLIAQLPGEKKNGLFGNLIALSLGLTPNFKSNFDLAEDAKLQLSKDTYDDDLDNLLAQIGDQYADLFLAAKNLSDAILLSDILRVNTEITKAPLSASMIKRYDEHHQDLTLLKALVRQQLPEKYKEIFFDQSKNGYAGYIDGGASQEEFYKFIKPILEKMDGTEELLVKLNREDLLRKQRTFDNGSIPHQIHLGELHAILRRQEDFYPFLKDNREKIEKILTFRIPYYVGPLARGNSRFAWMTRKSEETITPWNFEEVVDKGASAQSFIERMTNFDKNLPNEKVLPKHSLLYEYFTVYNELTKVKYVTEGMRKPAFLSGEQKKAIVDLLFKTNRKVTVKQLKEDYFKKIECFDSVEISGVEDRFNASLGTYHDLLKIIKDKDFLDNEENEDILEDIVLTLTLFEDREMIEERLKTYAHLFDDKVMKQLKRRRYTGWGRLSRKLINGIRDKQSGKTILDFLKSDGFANRNFMQLIHDDSLTFKEDIQKAQVSGQGDSLHEHIANLAGSPAIKKGILQTVKVVDELVKVMGRHKPENIVIEMARENQTTQKGQKNSRERMKRIEEGIKELGSQILKEHPVENTQLQNEKLYLYYLQNGRDMYVDQELDINRLSDYDVDHIVPQSFLKDDSIDNKVLTRSDKARGKSDNVPSEEVVKKMKNYWRQLLNAKLITQRKFDNLTKAERGGLSELDKAGFIKRQLVETRQITKHVAQILDSRMNTKYDENDKLIREVKVITLKSKLVSDFRKDFQFYKVREINNYHHAHDAYLNAVVGTALIKKYPKLESEFVYGDYKVYDVRKMIAKSEQEIGKATAKYFFYSNIMNFFKTEITLANGEIRKRPLIETNGETGEIVWDKGRDFATVRKVLSMPQVNIVKKTEVQTGGFSKESILPKRNSDKLIARKKDWDPKKYGGFDSPTVAYSVLVVAKVEKGKSKKLKSVKELLGITIMERSSFEKNPIDFLEAKGYKEVKKDLIIKLPKYSLFELENGRKRMLASAGELQKGNELALPSKYVNFLYLASHYEKLKGSPEDNEQKQLFVEQHKHYLDEIIEQISEFSKRVILADANLDKVLSAYNKHRDKPIREQAENIIHLFTLTNLGAPAAFKYFDTTIDRKRYTSTKEVLDATLIHQSITGLYETRIDLSQLGGDGGPAPGGSEAAAKGGMDPLQLLQPLEAEIKGTKLKAHWNSGATITCVPEAFLEDERPIQTMLIKTIHGEKQQDVYYLTFKVQGRKVEAEVLASPYDYILLNPSDVPWLMKKPLQLTVLVPLHEYQERLLQQTALPKEQKELLQKLFLKYDALWQHWENQVGHRRIKPHNIATGTLAPRPQKQYPINPKAKPSIQIVIDDLLKQGVLIQQNSTMNTPVYPVPKPDGKWRMVLDYREVNKTIPLIAAQNQHSAGILSSIYRGKYKTTLDLTNGFWAHPITPESYWLTAFTWQGKQYCWTRLPQGFLNSPALFNADVVDLLKEIPNVQAYVDDIYISHDDPQEHLEQLEKIFSILLNAGYVVSLKKSEIAQREVEFLGFNITKEGRGLTDTFKQKLLNITPPKDLKQLQSILGLLNFARNFIPNYSELVKPLYTIVAPANGKFISWTEDNSNQLQHIISVLNQADNLEERNPETRLIIKVNSSPSAGYIRYYNEGSKRPIMYVNYIFSKAEAKFTQTEKLLTTMHKGLIKAMDLAMGQEILVYSPIVSMTKIQRTPLPERKALPVRWITWMTYLEDPRIQFHYDKSLPELQQIPNVTEDVIAKTKHPSEFAMVFYTDGSAIKHPDVNKSHSAGMGIAQVQFIPEYKIVHQWSIPLGDHTAQLAEIAAVEFACKKALKISGPVLIVTDSFYVAESANKELPYWKSNGFLNNKKKPLRHVSKWKSIAECLQLKPDIIIMHEKGHQQPMTTLHTEGNNLADKLATQGSYVVHAGKRTADGSEFEKRTADGSEFESPKKKAKVE

SEQ ID NO: 475 - protein, 2176 aa, synthetic construct
MPAAKRVKLDGGDKKYSIGLDIGTNSVGWAVITDEYKVPSKKFKVLGNTDRHSIKKNLIGALLFDSGETAEATRLKRTARRRYTRRKNRICYLQEIFSNEMAKVDDSFFHRLEESFLVEEDKKHERHPIFGNIVDEVAYHEKYPTIYHLRKKLVDSTDKADLRLIYLALAHMIKFRGHFLIEGDLNPDNSDVDKLFIQLVQTYNQLFEENPINASGVDAKAILSARLSKSRRLENLIAQLPGEKKNGLFGNLIALSLGLTPNFKSNFDLAEDAKLQLSKDTYDDDLDNLLAQIGDQYADLFLAAKNLSDAILLSDILRVNTEITKAPLSASMIKRYDEHHQDLTLLKALVRQQLPEKYKEIFFDQSKNGYAGYIDGGASQEEFYKFIKPILEKMDGTEELLVKLNREDLLRKQRTFDNGSIPHQIHLGELHAILRRQEDFYPFLKDNREKIEKILTFRIPYYVGPLARGNSRFAWMTRKSEETITPWNFEEVVDKGASAQSFIERMTNFDKNLPNEKVLPKHSLLYEYFTVYNELTKVKYVTEGMRKPAFLSGEQKKAIVDLLFKTNRKVTVKQLKEDYFKKIECFDSVEISGVEDRFNASLGTYHDLLKIIKDKDFLDNEENEDILEDIVLTLTLFEDREMIEERLKTYAHLFDDKVMKQLKRRRYTGWGRLSRKLINGIRDKQSGKTILDFLKSDGFANRNFMQLIHDDSLTFKEDIQKAQVSGQGDSLHEHIANLAGSPAIKKGILQTVKVVDELVKVMGRHKPENIVIEMARENQTTQKGQKNSRERMKRIEEGIKELGSQILKEHPVENTQLQNEKLYLYYLQNGRDMYVDQELDINRLSDYDVDHIVPQSFLKDDSIDNKVLTRSDKARGKSDNVPSEEVVKKMKNYWRQLLNAKLITQRKFDNLTKAERGGLSELDKAGFIKRQLVETRQITKHVAQILDSRMNTKYDENDKLIREVKVITLKSKLVSDFRKDFQFYKVREINNYHHAHDAYLNAVVGTALIKKYPKLESEFVYGDYKVYDVRKMIAKSEQEIGKATAKYFFYSNIMNFFKTEITLANGEIRKRPLIETNGETGEIVWDKGRDFATVRKVLSMPQVNIVKKTEVQTGGFSKESILPKRNSDKLIARKKDWDPKKYGGFDSPTVAYSVLVVAKVEKGKSKKLKSVKELLGITIMERSSFEKNPIDFLEAKGYKEVKKDLIIKLPKYSLFELENGRKRMLASAGELQKGNELALPSKYVNFLYLASHYEKLKGSPEDNEQKQLFVEQHKHYLDEIIEQISEFSKRVILADANLDKVLSAYNKHRDKPIREQAENIIHLFTLTNLGAPAAFKYFDTTIDRKRYTSTKEVLDATLIHQSITGLYETRIDLSQLGGDGGEAAAKGGGGSSGGMDPLQLLQPLEAEIKGTKLKAHWNSGATITCVPEAFLEDERPIQTMLIKTIHGEKQQDVYYLTFKVQGRKVEAEVLASPYDYILLNPSDVPWLMKKPLQLTVLVPLHEYQERLLQQTALPKEQKELLQKLFLKYDALWQHWENQVGHRRIKPHNIATGTLAPRPQKQYPINPKAKPSIQIVIDDLLKQGVLIQQNSTMNTPVYPVPKPDGKWRMVLDYREVNKTIPLIAAQNQHSAGILSSIYRGKYKTTLDLTNGFWAHPITPESYWLTAFTWQGKQYCWTRLPQGFLNSPALFNADVVDLLKEIPNVQAYVDDIYISHDDPQEHLEQLEKIFSILLNAGYVVSLKKSEIAQREVEFLGFNITKEGRGLTDTFKQKLLNITPPKDLKQLQSILGLLNFARNFIPNYSELVKPLYTIVAPANGKFISWTEDNSNQLQHIISVLNQADNLEERNPETRLIIKVNSSPSAGYIRYYNEGSKRPIMYVNYIFSKAEAKFTQTEKLLTTMHKGLIKAMDLAMGQEILVYSPIVSMTKIQRTPLPERKALPVRWITWMTYLEDPRIQFHYDKSLPELQQIPNVTEDVIAKTKHPSEFAMVFYTDGSAIKHPDVNKSHSAGMGIAQVQFIPEYKIVHQWSIPLGDHTAQLAEIAAVEFACKKALKISGPVLIVTDSFYVAESANKELPYWKSNGFLNNKKKPLRHVSKWKSIAECLQLKPDIIIMHEKGHQQPMTTLHTEGNNLADKLATQGSYVVHAGKRTADGSEFEKRTADGSEFESPKKKAKVE

SEQ ID NO: 476 - protein, 2174 aa, synthetic construct
MPAAKRVKLDGGDKKYSIGLDIGTNSVGWAVITDEYKVPSKKFKVLGNTDRHSIKKNLIGALLFDSGETAEATRLKRTARRRYTRRKNRICYLQEIFSNEMAKVDDSFFHRLEESFLVEEDKKHERHPIFGNIVDEVAYHEKYPTIYHLRKKLVDSTDKADLRLIYLALAHMIKFRGHFLIEGDLNPDNSDVDKLFIQLVQTYNQLFEENPINASGVDAKAILSARLSKSRRLENLIAQLPGEKKNGLFGNLIALSLGLTPNFKSNFDLAEDAKLQLSKDTYDDDLDNLLAQIGDQYADLFLAAKNLSDAILLSDILRVNTEITKAPLSASMIKRYDEHHQDLTLLKALVRQQLPEKYKEIFFDQSKNGYAGYIDGGASQEEFYKFIKPILEKMDGTEELLVKLNREDLLRKQRTFDNGSIPHQIHLGELHAILRRQEDFYPFLKDNREKIEKILTFRIPYYVGPLARGNSRFAWMTRKSEETITPWNFEEVVDKGASAQSFIERMTNFDKNLPNEKVLPKHSLLYEYFTVYNELTKVKYVTEGMRKPAFLSGEQKKAIVDLLFKTNRKVTVKQLKEDYFKKIECFDSVEISGVEDRFNASLGTYHDLLKIIKDKDFLDNEENEDILEDIVLTLTLFEDREMIEERLKTYAHLFDDKVMKQLKRRRYTGWGRLSRKLINGIRDKQSGKTILDFLKSDGFANRNFMQLIHDDSLTFKEDIQKAQVSGQGDSLHEHIANLAGSPAIKKGILQTVKVVDELVKVMGRHKPENIVIEMARENQTTQKGQKNSRERMKRIEEGIKELGSQILKEHPVENTQLQNEKLYLYYLQNGRDMYVDQELDINRLSDYDVDHIVPQSFLKDDSIDNKVLTRSDKARGKSDNVPSEEVVKKMKNYWRQLLNAKLITQRKFDNLTKAERGGLSELDKAGFIKRQLVETRQITKHVAQILDSRMNTKYDENDKLIREVKVITLKSKLVSDFRKDFQFYKVREINNYHHAHDAYLNAVVGTALIKKYPKLESEFVYGDYKVYDVRKMIAKSEQEIGKATAKYFFYSNIMNFFKTEITLANGEIRKRPLIETNGETGEIVWDKGRDFATVRKVLSMPQVNIVKKTEVQTGGFSKESILPKRNSDKLIARKKDWDPKKYGGFDSPTVAYSVLVVAKVEKGKSKKLKSVKELLGITIMERSSFEKNPIDFLEAKGYKEVKKDLIIKLPKYSLFELENGRKRMLASAGELQKGNELALPSKYVNFLYLASHYEKLKGSPEDNEQKQLFVEQHKHYLDEIIEQISEFSKRVILADANLDKVLSAYNKHRDKPIREQAENIIHLFTLTNLGAPAAFKYFDTTIDRKRYTSTKEVLDATLIHQSITGLYETRIDLSQLGGDGGGSSGGGGGSGGMDPLQLLQPLEAEIKGTKLKAHWNSGATITCVPEAFLEDERPIQTMLIKTIHGEKQQDVYYLTFKVQGRKVEAEVLASPYDYILLNPSDVPWLMKKPLQLTVLVPLHEYQERLLQQTALPKEQKELLQKLFLKYDALWQHWENQVGHRRIKPHNIATGTLAPRPQKQYPINPKAKPSIQIVIDDLLKQGVLIQQNSTMNTPVYPVPKPDGKWRMVLDYREVNKTIPLIAAQNQHSAGILSSIYRGKYKTTLDLTNGFWAHPITPESYWLTAFTWQGKQYCWTRLPQGFLNSPALFNADVVDLLKEIPNVQAYVDDIYISHDDPQEHLEQLEKIFSILLNAGYVVSLKKSEIAQREVEFLGFNITKEGRGLTDTFKQKLLNITPPKDLKQLQSILGLLNFARNFIPNYSELVKPLYTIVAPANGKFISWTEDNSNQLQHIISVLNQADNLEERNPETRLIIKVNSSPSAGYIRYYNEGSKRPIMYVNYIFSKAEAKFTQTEKLLTTMHKGLIKAMDLAMGQEILVYSPIVSMTKIQRTPLPERKALPVRWITWMTYLEDPRIQFHYDKSLPELQQIPNVTEDVIAKTKHPSEFAMVFYTDGSAIKHPDVNKSHSAGMGIAQVQFIPEYKIVHQWSIPLGDHTAQLAEIAAVEFACKKALKISGPVLIVTDSFYVAESANKELPYWKSNGFLNNKKKPLRHVSKWKSIAECLQLKPDIIIMHEKGHQQPMTTLHTEGNNLADKLATQGSYVVHAGKRTADGSEFEKRTADGSEFESPKKKAKVE

SEQ ID NO: 477 - protein, 2171 aa, synthetic construct
MPAAKRVKLDGGDKKYSIGLDIGTNSVGWAVITDEYKVPSKKFKVLGNTDRHSIKKNLIGALLFDSGETAEATRLKRTARRRYTRRKNRICYLQEIFSNEMAKVDDSFFHRLEESFLVEEDKKHERHPIFGNIVDEVAYHEKYPTIYHLRKKLVDSTDKADLRLIYLALAHMIKFRGHFLIEGDLNPDNSDVDKLFIQLVQTYNQLFEENPINASGVDAKAILSARLSKSRRLENLIAQLPGEKKNGLFGNLIALSLGLTPNFKSNFDLAEDAKLQLSKDTYDDDLDNLLAQIGDQYADLFLAAKNLSDAILLSDILRVNTEITKAPLSASMIKRYDEHHQDLTLLKALVRQQLPEKYKEIFFDQSKNGYAGYIDGGASQEEFYKFIKPILEKMDGTEELLVKLNREDLLRKQRTFDNGSIPHQIHLGELHAILRRQEDFYPFLKDNREKIEKILTFRIPYYVGPLARGNSRFAWMTRKSEETITPWNFEEVVDKGASAQSFIERMTNFDKNLPNEKVLPKHSLLYEYFTVYNELTKVKYVTEGMRKPAFLSGEQKKAIVDLLFKTNRKVTVKQLKEDYFKKIECFDSVEISGVEDRFNASLGTYHDLLKIIKDKDFLDNEENEDILEDIVLTLTLFEDREMIEERLKTYAHLFDDKVMKQLKRRRYTGWGRLSRKLINGIRDKQSGKTILDFLKSDGFANRNFMQLIHDDSLTFKEDIQKAQVSGQGDSLHEHIANLAGSPAIKKGILQTVKVVDELVKVMGRHKPENIVIEMARENQTTQKGQKNSRERMKRIEEGIKELGSQILKEHPVENTQLQNEKLYLYYLQNGRDMYVDQELDINRLSDYDVDHIVPQSFLKDDSIDNKVLTRSDKARGKSDNVPSEEVVKKMKNYWRQLLNAKLITQRKFDNLTKAERGGLSELDKAGFIKRQLVETRQITKHVAQILDSRMNTKYDENDKLIREVKVITLKSKLVSDFRKDFQFYKVREINNYHHAHDAYLNAVVGTALIKKYPKLESEFVYGDYKVYDVRKMIAKSEQEIGKATAKYFFYSNIMNFFKTEITLANGEIRKRPLIETNGETGEIVWDKGRDFATVRKVLSMPQVNIVKKTEVQTGGFSKESILPKRNSDKLIARKKDWDPKKYGGFDSPTVAYSVLVVAKVEKGKSKKLKSVKELLGITIMERSSFEKNPIDFLEAKGYKEVKKDLIIKLPKYSLFELENGRKRMLASAGELQKGNELALPSKYVNFLYLASHYEKLKGSPEDNEQKQLFVEQHKHYLDEIIEQISEFSKRVILADANLDKVLSAYNKHRDKPIREQAENIIHLFTLTNLGAPAAFKYFDTTIDRKRYTSTKEVLDATLIHQSITGLYETRIDLSQLGGDGGGSSPAPGGMDPLQLLQPLEAEIKGTKLKAHWNSGATITCVPEAFLEDERPIQTMLIKTIHGEKQQDVYYLTFKVQGRKVEAEVLASPYDYILLNPSDVPWLMKKPLQLTVLVPLHEYQERLLQQTALPKEQKELLQKLFLKYDALWQHWENQVGHRRIKPHNIATGTLAPRPQKQYPINPKAKPSIQIVIDDLLKQGVLIQQNSTMNTPVYPVPKPDGKWRMVLDYREVNKTIPLIAAQNQHSAGILSSIYRGKYKTTLDLTNGFWAHPITPESYWLTAFTWQGKQYCWTRLPQGFLNSPALFNADVVDLLKEIPNVQAYVDDIYISHDDPQEHLEQLEKIFSILLNAGYVVSLKKSEIAQREVEFLGFNITKEGRGLTDTFKQKLLNITPPKDLKQLQSILGLLNFARNFIPNYSELVKPLYTIVAPANGKFISWTEDNSNQLQHIISVLNQADNLEERNPETRLIIKVNSSPSAGYIRYYNEGSKRPIMYVNYIFSKAEAKFTQTEKLLTTMHKGLIKAMDLAMGQEILVYSPIVSMTKIQRTPLPERKALPVRWITWMTYLEDPRIQFHYDKSLPELQQIPNVTEDVIAKTKHPSEFAMVFYTDGSAIKHPDVNKSHSAGMGIAQVQFIPEYKIVHQWSIPLGDHTAQLAEIAAVEFACKKALKISGPVLIVTDSFYVAESANKELPYWKSNGFLNNKKKPLRHVSKWKSIAECLQLKPDIIIMHEKGHQQPMTTLHTEGNNLADKLATQGSYVVHAGKRTADGSEFEKRTADGSEFESPKKKAKVE

SEQ ID NO: 478 - protein, 2178 aa, synthetic construct
MPAAKRVKLDGGDKKYSIGLDIGTNSVGWAVITDEYKVPSKKFKVLGNTDRHSIKKNLIGALLFDSGETAEATRLKRTARRRYTRRKNRICYLQEIFSNEMAKVDDSFFHRLEESFLVEEDKKHERHPIFGNIVDEVAYHEKYPTIYHLRKKLVDSTDKADLRLIYLALAHMIKFRGHFLIEGDLNPDNSDVDKLFIQLVQTYNQLFEENPINASGVDAKAILSARLSKSRRLENLIAQLPGEKKNGLFGNLIALSLGLTPNFKSNFDLAEDAKLQLSKDTYDDDLDNLLAQIGDQYADLFLAAKNLSDAILLSDILRVNTEITKAPLSASMIKRYDEHHQDLTLLKALVRQQLPEKYKEIFFDQSKNGYAGYIDGGASQEEFYKFIKPILEKMDGTEELLVKLNREDLLRKQRTFDNGSIPHQIHLGELHAILRRQEDFYPFLKDNREKIEKILTFRIPYYVGPLARGNSRFAWMTRKSEETITPWNFEEVVDKGASAQSFIERMTNFDKNLPNEKVLPKHSLLYEYFTVYNELTKVKYVTEGMRKPAFLSGEQKKAIVDLLFKTNRKVTVKQLKEDYFKKIECFDSVEISGVEDRFNASLGTYHDLLKIIKDKDFLDNEENEDILEDIVLTLTLFEDREMIEERLKTYAHLFDDKVMKQLKRRRYTGWGRLSRKLINGIRDKQSGKTILDFLKSDGFANRNFMQLIHDDSLTFKEDIQKAQVSGQGDSLHEHIANLAGSPAIKKGILQTVKVVDELVKVMGRHKPENIVIEMARENQTTQKGQKNSRERMKRIEEGIKELGSQILKEHPVENTQLQNEKLYLYYLQNGRDMYVDQELDINRLSDYDVDHIVPQSFLKDDSIDNKVLTRSDKARGKSDNVPSEEVVKKMKNYWRQLLNAKLITQRKFDNLTKAERGGLSELDKAGFIKRQLVETRQITKHVAQILDSRMNTKYDENDKLIREVKVITLKSKLVSDFRKDFQFYKVREINNYHHAHDAYLNAVVGTALIKKYPKLESEFVYGDYKVYDVRKMIAKSEQEIGKATAKYFFYSNIMNFFKTEITLANGEIRKRPLIETNGETGEIVWDKGRDFATVRKVLSMPQVNIVKKTEVQTGGFSKESILPKRNSDKLIARKKDWDPKKYGGFDSPTVAYSVLVVAKVEKGKSKKLKSVKELLGITIMERSSFEKNPIDFLEAKGYKEVKKDLIIKLPKYSLFELENGRKRMLASAGELQKGNELALPSKYVNFLYLASHYEKLKGSPEDNEQKQLFVEQHKHYLDEIIEQISEFSKRVILADANLDKVLSAYNKHRDKPIREQAENIIHLFTLTNLGAPAAFKYFDTTIDRKRYTSTKEVLDATLIHQSITGLYETRIDLSQLGGDGGPAPAPAPAPAPAPGGMDPLQLLQPLEAEIKGTKLKAHWNSGATITCVPEAFLEDERPIQTMLIKTIHGEKQQDVYYLTFKVQGRKVEAEVLASPYDYILLNPSDVPWLMKKPLQLTVLVPLHEYQERLLQQTALPKEQKELLQKLFLKYDALWQHWENQVGHRRIKPHNIATGTLAPRPQKQYPINPKAKPSIQIVIDDLLKQGVLIQQNSTMNTPVYPVPKPDGKWRMVLDYREVNKTIPLIAAQNQHSAGILSSIYRGKYKTTLDLTNGFWAHPITPESYWLTAFTWQGKQYCWTRLPQGFLNSPALFNADVVDLLKEIPNVQAYVDDIYISHDDPQEHLEQLEKIFSILLNAGYVVSLKKSEIAQREVEFLGFNITKEGRGLTDTFKQKLLNITPPKDLKQLQSILGLLNFARNFIPNYSELVKPLYTIVAPANGKFISWTEDNSNQLQHIISVLNQADNLEERNPETRLIIKVNSSPSAGYIRYYNEGSKRPIMYVNYIFSKAEAKFTQTEKLLTTMHKGLIKAMDLAMGQEILVYSPIVSMTKIQRTPLPERKALPVRWITWMTYLEDPRIQFHYDKSLPELQQIPNVTEDVIAKTKHPSEFAMVFYTDGSAIKHPDVNKSHSAGMGIAQVQFIPEYKIVHQWSIPLGDHTAQLAEIAAVEFACKKALKISGPVLIVTDSFYVAESANKELPYWKSNGFLNNKKKPLRHVSKWKSIAECLQLKPDIIIMHEKGHQQPMTTLHTEGNNLADKLATQGSYVVHAGKRTADGSEFEKRTADGSEFESPKKKAKVE

SEQ ID NO: 479 - protein, 2170 aa, synthetic construct
MPAAKRVKLDGGDKKYSIGLDIGTNSVGWAVITDEYKVPSKKFKVLGNTDRHSIKKNLIGALLFDSGETAEATRLKRTARRRYTRRKNRICYLQEIFSNEMAKVDDSFFHRLEESFLVEEDKKHERHPIFGNIVDEVAYHEKYPTIYHLRKKLVDSTDKADLRLIYLALAHMIKFRGHFLIEGDLNPDNSDVDKLFIQLVQTYNQLFEENPINASGVDAKAILSARLSKSRRLENLIAQLPGEKKNGLFGNLIALSLGLTPNFKSNFDLAEDAKLQLSKDTYDDDLDNLLAQIGDQYADLFLAAKNLSDAILLSDILRVNTEITKAPLSASMIKRYDEHHQDLTLLKALVRQQLPEKYKEIFFDQSKNGYAGYIDGGASQEEFYKFIKPILEKMDGTEELLVKLNREDLLRKQRTFDNGSIPHQIHLGELHAILRRQEDFYPFLKDNREKIEKILTFRIPYYVGPLARGNSRFAWMTRKSEETITPWNFEEVVDKGASAQSFIERMTNFDKNLPNEKVLPKHSLLYEYFTVYNELTKVKYVTEGMRKPAFLSGEQKKAIVDLLFKTNRKVTVKQLKEDYFKKIECFDSVEISGVEDRFNASLGTYHDLLKIIKDKDFLDNEENEDILEDIVLTLTLFEDREMIEERLKTYAHLFDDKVMKQLKRRRYTGWGRLSRKLINGIRDKQSGKTILDFLKSDGFANRNFMQLIHDDSLTFKEDIQKAQVSGQGDSLHEHIANLAGSPAIKKGILQTVKVVDELVKVMGRHKPENIVIEMARENQTTQKGQKNSRERMKRIEEGIKELGSQILKEHPVENTQLQNEKLYLYYLQNGRDMYVDQELDINRLSDYDVDHIVPQSFLKDDSIDNKVLTRSDKARGKSDNVPSEEVVKKMKNYWRQLLNAKLITQRKFDNLTKAERGGLSELDKAGFIKRQLVETRQITKHVAQILDSRMNTKYDENDKLIREVKVITLKSKLVSDFRKDFQFYKVREINNYHHAHDAYLNAVVGTALIKKYPKLESEFVYGDYKVYDVRKMIAKSEQEIGKATAKYFFYSNIMNFFKTEITLANGEIRKRPLIETNGETGEIVWDKGRDFATVRKVLSMPQVNIVKKTEVQTGGFSKESILPKRNSDKLIARKKDWDPKKYGGFDSPTVAYSVLVVAKVEKGKSKKLKSVKELLGITIMERSSFEKNPIDFLEAKGYKEVKKDLIIKLPKYSLFELENGRKRMLASAGELQKGNELALPSKYVNFLYLASHYEKLKGSPEDNEQKQLFVEQHKHYLDEIIEQISEFSKRVILADANLDKVLSAYNKHRDKPIREQAENIIHLFTLTNLGAPAAFKYFDTTIDRKRYTSTKEVLDATLIHQSITGLYETRIDLSQLGGDGGGGGGGGGMDPLQLLQPLEAEIKGTKLKAHWNSGATITCVPEAFLEDERPIQTMLIKTIHGEKQQDVYYLTFKVQGRKVEAEVLASPYDYILLNPSDVPWLMKKPLQLTVLVPLHEYQERLLQQTALPKEQKELLQKLFLKYDALWQHWENQVGHRRIKPHNIATGTLAPRPQKQYPINPKAKPSIQIVIDDLLKQGVLIQQNSTMNTPVYPVPKPDGKWRMVLDYREVNKTIPLIAAQNQHSAGILSSIYRGKYKTTLDLTNGFWAHPITPESYWLTAFTWQGKQYCWTRLPQGFLNSPALFNADVVDLLKEIPNVQAYVDDIYISHDDPQEHLEQLEKIFSILLNAGYVVSLKKSEIAQREVEFLGFNITKEGRGLTDTFKQKLLNITPPKDLKQLQSILGLLNFARNFIPNYSELVKPLYTIVAPANGKFISWTEDNSNQLQHIISVLNQADNLEERNPETRLIIKVNSSPSAGYIRYYNEGSKRPIMYVNYIFSKAEAKFTQTEKLLTTMHKGLIKAMDLAMGQEILVYSPIVSMTKIQRTPLPERKALPVRWITWMTYLEDPRIQFHYDKSLPELQQIPNVTEDVIAKTKHPSEFAMVFYTDGSAIKHPDVNKSHSAGMGIAQVQFIPEYKIVHQWSIPLGDHTAQLAEIAAVEFACKKALKISGPVLIVTDSFYVAESANKELPYWKSNGFLNNKKKPLRHVSKWKSIAECLQLKPDIIIMHEKGHQQPMTTLHTEGNNLADKLATQGSYVVHAGKRTADGSEFEKRTADGSEFESPKKKAKVE

SEQ ID NO: 480 - protein, 2211 aa, synthetic construct
MPAAKRVKLDGGDKKYSIGLDIGTNSVGWAVITDEYKVPSKKFKVLGNTDRHSIKKNLIGALLFDSGETAEATRLKRTARRRYTRRKNRICYLQEIFSNEMAKVDDSFFHRLEESFLVEEDKKHERHPIFGNIVDEVAYHEKYPTIYHLRKKLVDSTDKADLRLIYLALAHMIKFRGHFLIEGDLNPDNSDVDKLFIQLVQTYNQLFEENPINASGVDAKAILSARLSKSRRLENLIAQLPGEKKNGLFGNLIALSLGLTPNFKSNFDLAEDAKLQLSKDTYDDDLDNLLAQIGDQYADLFLAAKNLSDAILLSDILRVNTEITKAPLSASMIKRYDEHHQDLTLLKALVRQQLPEKYKEIFFDQSKNGYAGYIDGGASQEEFYKFIKPILEKMDGTEELLVKLNREDLLRKQRTFDNGSIPHQIHLGELHAILRRQEDFYPFLKDNREKIEKILTFRIPYYVGPLARGNSRFAWMTRKSEETITPWNFEEVVDKGASAQSFIERMTNFDKNLPNEKVLPKHSLLYEYFTVYNELTKVKYVTEGMRKPAFLSGEQKKAIVDLLFKTNRKVTVKQLKEDYFKKIECFDSVEISGVEDRFNASLGTYHDLLKIIKDKDFLDNEENEDILEDIVLTLTLFEDREMIEERLKTYAHLFDDKVMKQLKRRRYTGWGRLSRKLINGIRDKQSGKTILDFLKSDGFANRNFMQLIHDDSLTFKEDIQKAQVSGQGDSLHEHIANLAGSPAIKKGILQTVKVVDELVKVMGRHKPENIVIEMARENQTTQKGQKNSRERMKRIEEGIKELGSQILKEHPVENTQLQNEKLYLYYLQNGRDMYVDQELDINRLSDYDVDHIVPQSFLKDDSIDNKVLTRSDKARGKSDNVPSEEVVKKMKNYWRQLLNAKLITQRKFDNLTKAERGGLSELDKAGFIKRQLVETRQITKHVAQILDSRMNTKYDENDKLIREVKVITLKSKLVSDFRKDFQFYKVREINNYHHAHDAYLNAVVGTALIKKYPKLESEFVYGDYKVYDVRKMIAKSEQEIGKATAKYFFYSNIMNFFKTEITLANGEIRKRPLIETNGETGEIVWDKGRDFATVRKVLSMPQVNIVKKTEVQTGGFSKESILPKRNSDKLIARKKDWDPKKYGGFDSPTVAYSVLVVAKVEKGKSKKLKSVKELLGITIMERSSFEKNPIDFLEAKGYKEVKKDLIIKLPKYSLFELENGRKRMLASAGELQKGNELALPSKYVNFLYLASHYEKLKGSPEDNEQKQLFVEQHKHYLDEIIEQISEFSKRVILADANLDKVLSAYNKHRDKPIREQAENIIHLFTLTNLGAPAAFKYFDTTIDRKRYTSTKEVLDATLIHQSITGLYETRIDLSQLGGDGGAEAAAKEAAAKEAAAKEAAAKALEAEAAAKEAAAKEAAAKEAAAKAGGMDPLQLLQPLEAEIKGTKLKAHWNSGATITCVPEAFLEDERPIQTMLIKTIHGEKQQDVYYLTFKVQGRKVEAEVLASPYDYILLNPSDVPWLMKKPLQLTVLVPLHEYQERLLQQTALPKEQKELLQKLFLKYDALWQHWENQVGHRRIKPHNIATGTLAPRPQKQYPINPKAKPSIQIVIDDLLKQGVLIQQNSTMNTPVYPVPKPDGKWRMVLDYREVNKTIPLIAAQNQHSAGILSSIYRGKYKTTLDLTNGFWAHPITPESYWLTAFTWQGKQYCWTRLPQGFLNSPALFNADVVDLLKEIPNVQAYVDDIYISHDDPQEHLEQLEKIFSILLNAGYVVSLKKSEIAQREVEFLGFNITKEGRGLTDTFKQKLLNITPPKDLKQLQSILGKLNFARNFIPNYSELVKPLYTIVAPANGKFISWTEDNSNQLQHIISVLNQADNLEERNPETRLIIKVNSSPSAGYIRYYNEGSKRPIMYVNYIFSKAEAKFTQTEKLLTTMHKGLIKAMDLAMGQEILVYSPIVSMTKIQRTPLPERKALPVRWITWMTYLEDPRIQFHYDKSLPELQQIPNVTEDVIAKTKHPSEFAMVFYTDGSAIKHPDVNKSHSAGMGIAQVQFIPEYKIVHQWSIPLGDHTAQLAEIAAVEFACKKALKISGPVLIVTDSFYVAESANKELPYWKSNGFLNNKKKPLRHVSKWKSIAECLQLKPDIIIMHEKGHQQPMTTLHTEGNNLADKLATQGSYVVHAGKRTADGSEFEKRTADGSEFESPKKKAKVE

SEQ ID NO: 481 - protein, 2195 aa, synthetic construct
MPAAKRVKLDGGDKKYSIGLDIGTNSVGWAVITDEYKVPSKKFKVLGNTDRHSIKKNLIGALLFDSGETAEATRLKRTARRRYTRRKNRICYLQEIFSNEMAKVDDSFFHRLEESFLVEEDKKHERHPIFGNIVDEVAYHEKYPTIYHLRKKLVDSTDKADLRLIYLALAHMIKFRGHFLIEGDLNPDNSDVDKLFIQLVQTYNQLFEENPINASGVDAKAILSARLSKSRRLENLIAQLPGEKKNGLFGNLIALSLGLTPNFKSNFDLAEDAKLQLSKDTYDDDLDNLLAQIGDQYADLFLAAKNLSDAILLSDILRVNTEITKAPLSASMIKRYDEHHQDLTLLKALVRQQLPEKYKEIFFDQSKNGYAGYIDGGASQEEFYKFIKPILEKMDGTEELLVKLNREDLLRKQRTFDNGSIPHQIHLGELHAILRRQEDFYPFLKDNREKIEKILTFRIPYYVGPLARGNSRFAWMTRKSEETITPWNFEEVVDKGASAQSFIERMTNFDKNLPNEKVLPKHSLLYEYFTVYNELTKVKYVTEGMRKPAFLSGEQKKAIVDLLFKTNRKVTVKQLKEDYFKKIECFDSVEISGVEDRFNASLGTYHDLLKIIKDKDFLDNEENEDILEDIVLTLTLFEDREMIEERLKTYAHLFDDKVMKQLKRRRYTGWGRLSRKLINGIRDKQSGKTILDFLKSDGFANRNFMQLIHDDSLTFKEDIQKAQVSGQGDSLHEHIANLAGSPAIKKGILQTVKVVDELVKVMGRHKPENIVIEMARENQTTQKGQKNSRERMKRIEEGIKELGSQILKEHPVENTQLQNEKLYLYYLQNGRDMYVDQELDINRLSDYDVDHIVPQSFLKDDSIDNKVLTRSDKARGKSDNVPSEEVVKKMKNYWRQLLNAKLITQRKFDNLTKAERGGLSELDKAGFIKRQLVETRQITKHVAQILDSRMNTKYDENDKLIREVKVITLKSKLVSDFRKDFQFYKVREINNYHHAHDAYLNAVVGTALIKKYPKLESEFVYGDYKVYDVRKMIAKSEQEIGKATAKYFFYSNIMNFFKTEITLANGEIRKRPLIETNGETGEIVWDKGRDFATVRKVLSMPQVNIVKKTEVQTGGFSKESILPKRNSDKLIARKKDWDPKKYGGFDSPTVAYSVLVVAKVEKGKSKKLKSVKELLGITIMERSSFEKNPIDFLEAKGYKEVKKDLIIKLPKYSLFELENGRKRMLASAGELQKGNELALPSKYVNFLYLASHYEKLKGSPEDNEQKQLFVEQHKHYLDEIIEQISEFSKRVILADANLDKVLSAYNKHRDKPIREQAENIIHLFTLTNLGAPAAFKYFDTTIDRKRYTSTKEVLDATLIHQSITGLYETRIDLSQLGGDGGEAAAKEAAAKEAAAKEAAAKEAAAKEAAAKGGMDPLQLLQPLEAEIKGTKLKAHWNSGATITCVPEAFLEDERPIQTMLIKTIHGEKQQDVYYLTFKVQGRKVEAEVLASPYDYILLNPSDVPWLMKKPLQLTVLVPLHEYQERLLQQTALPKEQKELLQKLFLKYDALWQHWENQVGHRRIKPHNIATGTLAPRPQKQYPINPKAKPSIQIVIDDLLKQGVLIQQNSTMNTPVYPVPKPDGKWRMVLDYREVNKTIPLIAAQNQHSAGILSSIYRGKYKTTLDLTNGFWAHPITPESYWLTAFTWQGKQYCWTRLPQGFLNSPALFNADVVDLLKEIPNVQAYVDDIYISHDDPQEHLEQLEKIFSILLNAGYVVSLKKSEIAQREVEFLGFNITKEGRGLTDTFKQKLLNITPPKDLKQLQSILGKLNFARNFIPNYSELVKPLYTIVAPANGKFISWTEDNSNQLQHIISVLNQADNLEERNPETRLIIKVNSSPSAGYIRYYNEGSKRPIMYVNYIFSKAEAKFTQTEKLLTTMHKGLIKAMDLAMGQEILVYSPIVSMTKIQRTPLPERKALPVRWITWMTYLEDPRIQFHYDKSLPELQQIPNVTEDVIAKTKHPSEFAMVFYTDGSAIKHPDVNKSHSAGMGIAQVQFIPEYKIVHQWSIPLGDHTAQLAEIAAVEFACKKALKISGPVLIVTDSFYVAESANKELPYWKSNGFLNNKKKPLRHVSKWKSIAECLQLKPDIIIMHEKGHQQPMTTLHTEGNNLADKLATQGSYVVHAGKRTADGSEFEKRTADGSEFESPKKKAKVE

SEQ ID NO: 482 - protein, 2176 aa, synthetic construct
MPAAKRVKLDGGDKKYSIGLDIGTNSVGWAVITDEYKVPSKKFKVLGNTDRHSIKKNLIGALLFDSGETAEATRLKRTARRRYTRRKNRICYLQEIFSNEMAKVDDSFFHRLEESFLVEEDKKHERHPIFGNIVDEVAYHEKYPTIYHLRKKLVDSTDKADLRLIYLALAHMIKFRGHFLIEGDLNPDNSDVDKLFIQLVQTYNQLFEENPINASGVDAKAILSARLSKSRRLENLIAQLPGEKKNGLFGNLIALSLGLTPNFKSNFDLAEDAKLQLSKDTYDDDLDNLLAQIGDQYADLFLAAKNLSDAILLSDILRVNTEITKAPLSASMIKRYDEHHQDLTLLKALVRQQLPEKYKEIFFDQSKNGYAGYIDGGASQEEFYKFIKPILEKMDGTEELLVKLNREDLLRKQRTFDNGSIPHQIHLGELHAILRRQEDFYPFLKDNREKIEKILTFRIPYYVGPLARGNSRFAWMTRKSEETITPWNFEEVVDKGASAQSFIERMTNFDKNLPNEKVLPKHSLLYEYFTVYNELTKVKYVTEGMRKPAFLSGEQKKAIVDLLFKTNRKVTVKQLKEDYFKKIECFDSVEISGVEDRFNASLGTYHDLLKIIKDKDFLDNEENEDILEDIVLTLTLFEDREMIEERLKTYAHLFDDKVMKQLKRRRYTGWGRLSRKLINGIRDKQSGKTILDFLKSDGFANRNFMQLIHDDSLTFKEDIQKAQVSGQGDSLHEHIANLAGSPAIKKGILQTVKVVDELVKVMGRHKPENIVIEMARENQTTQKGQKNSRERMKRIEEGIKELGSQILKEHPVENTQLQNEKLYLYYLQNGRDMYVDQELDINRLSDYDVDHIVPQSFLKDDSIDNKVLTRSDKARGKSDNVPSEEVVKKMKNYWRQLLNAKLITQRKFDNLTKAERGGLSELDKAGFIKRQLVETRQITKHVAQILDSRMNTKYDENDKLIREVKVITLKSKLVSDFRKDFQFYKVREINNYHHAHDAYLNAVVGTALIKKYPKLESEFVYGDYKVYDVRKMIAKSEQEIGKATAKYFFYSNIMNFFKTEITLANGEIRKRPLIETNGETGEIVWDKGRDFATVRKVLSMPQVNIVKKTEVQTGGFSKESILPKRNSDKLIARKKDWDPKKYGGFDSPTVAYSVLVVAKVEKGKSKKLKSVKELLGITIMERSSFEKNPIDFLEAKGYKEVKKDLIIKLPKYSLFELENGRKRMLASAGELQKGNELALPSKYVNFLYLASHYEKLKGSPEDNEQKQLFVEQHKHYLDEIIEQISEFSKRVILADANLDKVLSAYNKHRDKPIREQAENIIHLFTLTNLGAPAAFKYFDTTIDRKRYTSTKEVLDATLIHQSITGLYETRIDLSQLGGDGGEAAAKGGSPAPGGMDPLQLLQPLEAEIKGTKLKAHWNSGATITCVPEAFLEDERPIQTMLIKTIHGEKQQDVYYLTFKVQGRKVEAEVLASPYDYILLNPSDVPWLMKKPLQLTVLVPLHEYQERLLQQTALPKEQKELLQKLFLKYDALWQHWENQVGHRRIKPHNIATGTLAPRPQKQYPINPKAKPSIQIVIDDLLKQGVLIQQNSTMNTPVYPVPKPDGKWRMVLDYREVNKTIPLIAAQNQHSAGILSSIYRGKYKTTLDLTNGFWAHPITPESYWLTAFTWQGKQYCWTRLPQGFLNSPALFNADVVDLLKEIPNVQAYVDDIYISHDDPQEHLEQLEKIFSILLNAGYVVSLKKSEIAQREVEFLGFNITKEGRGLTDTFKQKLLNITPPKDLKQLQSILGKLNFARNFIPNYSELVKPLYTIVAPANGKFISWTEDNSNQLQHIISVLNQADNLEERNPETRLIIKVNSSPSAGYIRYYNEGSKRPIMYVNYIFSKAEAKFTQTEKLLTTMHKGLIKAMDLAMGQEILVYSPIVSMTKIQRTPLPERKALPVRWITWMTYLEDPRIQFHYDKSLPELQQIPNVTEDVIAKTKHPSEFAMVFYTDGSAIKHPDVNKSHSAGMGIAQVQFIPEYKIVHQWSIPLGDHTAQLAEIAAVEFACKKALKISGPVLIVTDSFYVAESANKELPYWKSNGFLNNKKKPLRHVSKWKSIAECLQLKPDIIIMHEKGHQQPMTTLHTEGNNLADKLATQGSYVVHAGKRTADGSEFEKRTADGSEFESPKKKAKVE

SEQ ID NO: 483 - protein, 2174 aa, synthetic construct
MPAAKRVKLDGGDKKYSIGLDIGTNSVGWAVITDEYKVPSKKFKVLGNTDRHSIKKNLIGALLFDSGETAEATRLKRTARRRYTRRKNRICYLQEIFSNEMAKVDDSFFHRLEESFLVEEDKKHERHPIFGNIVDEVAYHEKYPTIYHLRKKLVDSTDKADLRLIYLALAHMIKFRGHFLIEGDLNPDNSDVDKLFIQLVQTYNQLFEENPINASGVDAKAILSARLSKSRRLENLIAQLPGEKKNGLFGNLIALSLGLTPNFKSNFDLAEDAKLQLSKDTYDDDLDNLLAQIGDQYADLFLAAKNLSDAILLSDILRVNTEITKAPLSASMIKRYDEHHQDLTLLKALVRQQLPEKYKEIFFDQSKNGYAGYIDGGASQEEFYKFIKPILEKMDGTEELLVKLNREDLLRKQRTFDNGSIPHQIHLGELHAILRRQEDFYPFLKDNREKIEKILTFRIPYYVGPLARGNSRFAWMTRKSEETITPWNFEEVVDKGASAQSFIERMTNFDKNLPNEKVLPKHSLLYEYFTVYNELTKVKYVTEGMRKPAFLSGEQKKAIVDLLFKTNRKVTVKQLKEDYFKKIECFDSVEISGVEDRFNASLGTYHDLLKIIKDKDFLDNEENEDILEDIVLTLTLFEDREMIEERLKTYAHLFDDKVMKQLKRRRYTGWGRLSRKLINGIRDKQSGKTILDFLKSDGFANRNFMQLIHDDSLTFKEDIQKAQVSGQGDSLHEHIANLAGSPAIKKGILQTVKVVDELVKVMGRHKPENIVIEMARENQTTQKGQKNSRERMKRIEEGIKELGSQILKEHPVENTQLQNEKLYLYYLQNGRDMYVDQELDINRLSDYDVDHIVPQSFLKDDSIDNKVLTRSDKARGKSDNVPSEEVVKKMKNYWRQLLNAKLITQRKFDNLTKAERGGLSELDKAGFIKRQLVETRQITKHVAQILDSRMNTKYDENDKLIREVKVITLKSKLVSDFRKDFQFYKVREINNYHHAHDAYLNAVVGTALIKKYPKLESEFVYGDYKVYDVRKMIAKSEQEIGKATAKYFFYSNIMNFFKTEITLANGEIRKRPLIETNGETGEIVWDKGRDFATVRKVLSMPQVNIVKKTEVQTGGFSKESILPKRNSDKLIARKKDWDPKKYGGFDSPTVAYSVLVVAKVEKGKSKKLKSVKELLGITIMERSSFEKNPIDFLEAKGYKEVKKDLIIKLPKYSLFELENGRKRMLASAGELQKGNELALPSKYVNFLYLASHYEKLKGSPEDNEQKQLFVEQHKHYLDEIIEQISEFSKRVILADANLDKVLSAYNKHRDKPIREQAENIIHLFTLTNLGAPAAFKYFDTTIDRKRYTSTKEVLDATLIHQSITGLYETRIDLSQLGGDGGGGSGSSPAPGGMDPLQLLQPLEAEIKGTKLKAHWNSGATITCVPEAFLEDERPIQTMLIKTIHGEKQQDVYYLTFKVQGRKVEAEVLASPYDYILLNPSDVPWLMKKPLQLTVLVPLHEYQERLLQQTALPKEQKELLQKLFLKYDALWQHWENQVGHRRIKPHNIATGTLAPRPQKQYPINPKAKPSIQIVIDDLLKQGVLIQQNSTMNTPVYPVPKPDGKWRMVLDYREVNKTIPLIAAQNQHSAGILSSIYRGKYKTTLDLTNGFWAHPITPESYWLTAFTWQGKQYCWTRLPQGFLNSPALFNADVVDLLKEIPNVQAYVDDIYISHDDPQEHLEQLEKIFSILLNAGYVVSLKKSEIAQREVEFLGFNITKEGRGLTDTFKQKLLNITPPKDLKQLQSILGKLNFARNFIPNYSELVKPLYTIVAPANGKFISWTEDNSNQLQHIISVLNQADNLEERNPETRLIIKVNSSPSAGYIRYYNEGSKRPIMYVNYIFSKAEAKFTQTEKLLTTMHKGLIKAMDLAMGQEILVYSPIVSMTKIQRTPLPERKALPVRWITWMTYLEDPRIQFHYDKSLPELQQIPNVTEDVIAKTKHPSEFAMVFYTDGSAIKHPDVNKSHSAGMGIAQVQFIPEYKIVHQWSIPLGDHTAQLAEIAAVEFACKKALKISGPVLIVTDSFYVAESANKELPYWKSNGFLNNKKKPLRHVSKWKSIAECLQLKPDIIIMHEKGHQQPMTTLHTEGNNLADKLATQGSYVVHAGKRTADGSEFEKRTADGSEFESPKKKAKVE

SEQ ID NO: 484 - protein, 2171 aa, synthetic construct
MPAAKRVKLDGGDKKYSIGLDIGTNSVGWAVITDEYKVPSKKFKVLGNTDRHSIKKNLIGALLFDSGETAEATRLKRTARRRYTRRKNRICYLQEIFSNEMAKVDDSFFHRLEESFLVEEDKKHERHPIFGNIVDEVAYHEKYPTIYHLRKKLVDSTDKADLRLIYLALAHMIKFRGHFLIEGDLNPDNSDVDKLFIQLVQTYNQLFEENPINASGVDAKAILSARLSKSRRLENLIAQLPGEKKNGLFGNLIALSLGLTPNFKSNFDLAEDAKLQLSKDTYDDDLDNLLAQIGDQYADLFLAAKNLSDAILLSDILRVNTEITKAPLSASMIKRYDEHHQDLTLLKALVRQQLPEKYKEIFFDQSKNGYAGYIDGGASQEEFYKFIKPILEKMDGTEELLVKLNREDLLRKQRTFDNGSIPHQIHLGELHAILRRQEDFYPFLKDNREKIEKILTFRIPYYVGPLARGNSRFAWMTRKSEETITPWNFEEVVDKGASAQSFIERMTNFDKNLPNEKVLPKHSLLYEYFTVYNELTKVKYVTEGMRKPAFLSGEQKKAIVDLLFKTNRKVTVKQLKEDYFKKIECFDSVEISGVEDRFNASLGTYHDLLKIIKDKDFLDNEENEDILEDIVLTLTLFEDREMIEERLKTYAHLFDDKVMKQLKRRRYTGWGRLSRKLINGIRDKQSGKTILDFLKSDGFANRNFMQLIHDDSLTFKEDIQKAQVSGQGDSLHEHIANLAGSPAIKKGILQTVKVVDELVKVMGRHKPENIVIEMARENQTTQKGQKNSRERMKRIEEGIKELGSQILKEHPVENTQLQNEKLYLYYLQNGRDMYVDQELDINRLSDYDVDHIVPQSFLKDDSIDNKVLTRSDKARGKSDNVPSEEVVKKMKNYWRQLLNAKLITQRKFDNLTKAERGGLSELDKAGFIKRQLVETRQITKHVAQILDSRMNTKYDENDKLIREVKVITLKSKLVSDFRKDFQFYKVREINNYHHAHDAYLNAVVGTALIKKYPKLESEFVYGDYKVYDVRKMIAKSEQEIGKATAKYFFYSNIMNFFKTEITLANGEIRKRPLIETNGETGEIVWDKGRDFATVRKVLSMPQVNIVKKTEVQTGGFSKESILPKRNSDKLIARKKDWDPKKYGGFDSPTVAYSVLVVAKVEKGKSKKLKSVKELLGITIMERSSFEKNPIDFLEAKGYKEVKKDLIIKLPKYSLFELENGRKRMLASAGELQKGNELALPSKYVNFLYLASHYEKLKGSPEDNEQKQLFVEQHKHYLDEIIEQISEFSKRVILADANLDKVLSAYNKHRDKPIREQAENIIHLFTLTNLGAPAAFKYFDTTIDRKRYTSTKEVLDATLIHQSITGLYETRIDLSQLGGDGGGGGGGGGGMDPLQLLQPLEAEIKGTKLKAHWNSGATITCVPEAFLEDERPIQTMLIKTIHGEKQQDVYYLTFKVQGRKVEAEVLASPYDYILLNPSDVPWLMKKPLQLTVLVPLHEYQERLLQQTALPKEQKELLQKLFLKYDALWQHWENQVGHRRIKPHNIATGTLAPRPQKQYPINPKAKPSIQIVIDDLLKQGVLIQQNSTMNTPVYPVPKPDGKWRMVLDYREVNKTIPLIAAQNQHSAGILSSIYRGKYKTTLDLTNGFWAHPITPESYWLTAFTWQGKQYCWTRLPQGFLNSPALFNADVVDLLKEIPNVQAYVDDIYISHDDPQEHLEQLEKIFSILLNAGYVVSLKKSEIAQREVEFLGFNITKEGRGLTDTFKQKLLNITPPKDLKQLQSILGKLNFARNFIPNYSELVKPLYTIVAPANGKFISWTEDNSNQLQHIISVLNQADNLEERNPETRLIIKVNSSPSAGYIRYYNEGSKRPIMYVNYIFSKAEAKFTQTEKLLTTMHKGLIKAMDLAMGQEILVYSPIVSMTKIQRTPLPERKALPVRWITWMTYLEDPRIQFHYDKSLPELQQIPNVTEDVIAKTKHPSEFAMVFYTDGSAIKHPDVNKSHSAGMGIAQVQFIPEYKIVHQWSIPLGDHTAQLAEIAAVEFACKKALKISGPVLIVTDSFYVAESANKELPYWKSNGFLNNKKKPLRHVSKWKSIAECLQLKPDIIIMHEKGHQQPMTTLHTEGNNLADKLATQGSYVVHAGKRTADGSEFEKRTADGSEFESPKKKAKVE

SEQ ID NO: 485 - protein, 2176 aa, synthetic construct
MPAAKRVKLDGGDKKYSIGLDIGTNSVGWAVITDEYKVPSKKFKVLGNTDRHSIKKNLIGALLFDSGETAEATRLKRTARRRYTRRKNRICYLQEIFSNEMAKVDDSFFHRLEESFLVEEDKKHERHPIFGNIVDEVAYHEKYPTIYHLRKKLVDSTDKADLRLIYLALAHMIKFRGHFLIEGDLNPDNSDVDKLFIQLVQTYNQLFEENPINASGVDAKAILSARLSKSRRLENLIAQLPGEKKNGLFGNLIALSLGLTPNFKSNFDLAEDAKLQLSKDTYDDDLDNLLAQIGDQYADLFLAAKNLSDAILLSDILRVNTEITKAPLSASMIKRYDEHHQDLTLLKALVRQQLPEKYKEIFFDQSKNGYAGYIDGGASQEEFYKFIKPILEKMDGTEELLVKLNREDLLRKQRTFDNGSIPHQIHLGELHAILRRQEDFYPFLKDNREKIEKILTFRIPYYVGPLARGNSRFAWMTRKSEETITPWNFEEVVDKGASAQSFIERMTNFDKNLPNEKVLPKHSLLYEYFTVYNELTKVKYVTEGMRKPAFLSGEQKKAIVDLLFKTNRKVTVKQLKEDYFKKIECFDSVEISGVEDRFNASLGTYHDLLKIIKDKDFLDNEENEDILEDIVLTLTLFEDREMIEERLKTYAHLFDDKVMKQLKRRRYTGWGRLSRKLINGIRDKQSGKTILDFLKSDGFANRNFMQLIHDDSLTFKEDIQKAQVSGQGDSLHEHIANLAGSPAIKKGILQTVKVVDELVKVMGRHKPENIVIEMARENQTTQKGQKNSRERMKRIEEGIKELGSQILKEHPVENTQLQNEKLYLYYLQNGRDMYVDQELDINRLSDYDVDHIVPQSFLKDDSIDNKVLTRSDKARGKSDNVPSEEVVKKMKNYWRQLLNAKLITQRKFDNLTKAERGGLSELDKAGFIKRQLVETRQITKHVAQILDSRMNTKYDENDKLIREVKVITLKSKLVSDFRKDFQFYKVREINNYHHAHDAYLNAVVGTALIKKYPKLESEFVYGDYKVYDVRKMIAKSEQEIGKATAKYFFYSNIMNFFKTEITLANGEIRKRPLIETNGETGEIVWDKGRDFATVRKVLSMPQVNIVKKTEVQTGGFSKESILPKRNSDKLIARKKDWDPKKYGGFDSPTVAYSVLVVAKVEKGKSKKLKSVKELLGITIMERSSFEKNPIDFLEAKGYKEVKKDLIIKLPKYSLFELENGRKRMLASAGELQKGNELALPSKYVNFLYLASHYEKLKGSPEDNEQKQLFVEQHKHYLDEIIEQISEFSKRVILADANLDKVLSAYNKHRDKPIREQAENIIHLFTLTNLGAPAAFKYFDTTIDRKRYTSTKEVLDATLIHQSITGLYETRIDLSQLGGDGGGSSGGGEAAAKGGMDPLQLLQPLEAEIKGTKLKAHWNSGATITCVPEAFLEDERPIQTMLIKTIHGEKQQDVYYLTFKVQGRKVEAEVLASPYDYILLNPSDVPWLMKKPLQLTVLVPLHEYQERLLQQTALPKEQKELLQKLFLKYDALWQHWENQVGHRRIKPHNIATGTLAPRPQKQYPINPKAKPSIQIVIDDLLKQGVLIQQNSTMNTPVYPVPKPDGKWRMVLDYREVNKTIPLIAAQNQHSAGILSSIYRGKYKTTLDLTNGFWAHPITPESYWLTAFTWQGKQYCWTRLPQGFLNSPALFNADVVDLLKEIPNVQAYVDDIYISHDDPQEHLEQLEKIFSILLNAGYVVSLKKSEIAQREVEFLGFNITKEGRGLTDTFKQKLLNITPPKDLKQLQSILGKLNFARNFIPNYSELVKPLYTIVAPANGKFISWTEDNSNQLQHIISVLNQADNLEERNPETRLIIKVNSSPSAGYIRYYNEGSKRPIMYVNYIFSKAEAKFTQTEKLLTTMHKGLIKAMDLAMGQEILVYSPIVSMTKIQRTPLPERKALPVRWITWMTYLEDPRIQFHYDKSLPELQQIPNVTEDVIAKTKHPSEFAMVFYTDGSAIKHPDVNKSHSAGMGIAQVQFIPEYKIVHQWSIPLGDHTAQLAEIAAVEFACKKALKISGPVLIVTDSFYVAESANKELPYWKSNGFLNNKKKPLRHVSKWKSIAECLQLKPDIIIMHEKGHQQPMTTLHTEGNNLADKLATQGSYVVHAGKRTADGSEFEKRTADGSEFESPKKKAKVE

SEQ ID NO: 486 - protein, 2176 aa, synthetic construct
MPAAKRVKLDGGDKKYSIGLDIGTNSVGWAVITDEYKVPSKKFKVLGNTDRHSIKKNLIGALLFDSGETAEATRLKRTARRRYTRRKNRICYLQEIFSNEMAKVDDSFFHRLEESFLVEEDKKHERHPIFGNIVDEVAYHEKYPTIYHLRKKLVDSTDKADLRLIYLALAHMIKFRGHFLIEGDLNPDNSDVDKLFIQLVQTYNQLFEENPINASGVDAKAILSARLSKSRRLENLIAQLPGEKKNGLFGNLIALSLGLTPNFKSNFDLAEDAKLQLSKDTYDDDLDNLLAQIGDQYADLFLAAKNLSDAILLSDILRVNTEITKAPLSASMIKRYDEHHQDLTLLKALVRQQLPEKYKEIFFDQSKNGYAGYIDGGASQEEFYKFIKPILEKMDGTEELLVKLNREDLLRKQRTFDNGSIPHQIHLGELHAILRRQEDFYPFLKDNREKIEKILTFRIPYYVGPLARGNSRFAWMTRKSEETITPWNFEEVVDKGASAQSFIERMTNFDKNLPNEKVLPKHSLLYEYFTVYNELTKVKYVTEGMRKPAFLSGEQKKAIVDLLFKTNRKVTVKQLKEDYFKKIECFDSVEISGVEDRFNASLGTYHDLLKIIKDKDFLDNEENEDILEDIVLTLTLFEDREMIEERLKTYAHLFDDKVMKQLKRRRYTGWGRLSRKLINGIRDKQSGKTILDFLKSDGFANRNFMQLIHDDSLTFKEDIQKAQVSGQGDSLHEHIANLAGSPAIKKGILQTVKVVDELVKVMGRHKPENIVIEMARENQTTQKGQKNSRERMKRIEEGIKELGSQILKEHPVENTQLQNEKLYLYYLQNGRDMYVDQELDINRLSDYDVDHIVPQSFLKDDSIDNKVLTRSDKARGKSDNVPSEEVVKKMKNYWRQLLNAKLITQRKFDNLTKAERGGLSELDKAGFIKRQLVETRQITKHVAQILDSRMNTKYDENDKLIREVKVITLKSKLVSDFRKDFQFYKVREINNYHHAHDAYLNAVVGTALIKKYPKLESEFVYGDYKVYDVRKMIAKSEQEIGKATAKYFFYSNIMNFFKTEITLANGEIRKRPLIETNGETGEIVWDKGRDFATVRKVLSMPQVNIVKKTEVQTGGFSKESILPKRNSDKLIARKKDWDPKKYGGFDSPTVAYSVLVVAKVEKGKSKKLKSVKELLGITIMERSSFEKNPIDFLEAKGYKEVKKDLIIKLPKYSLFELENGRKRMLASAGELQKGNELALPSKYVNFLYLASHYEKLKGSPEDNEQKQLFVEQHKHYLDEIIEQISEFSKRVILADANLDKVLSAYNKHRDKPIREQAENIIHLFTLTNLGAPAAFKYFDTTIDRKRYTSTKEVLDATLIHQSITGLYETRIDLSQLGGDGGPAPAPAPAPAPGGMDPLQLLQPLEAEIKGTKLKAHWNSGATITCVPEAFLEDERPIQTMLIKTIHGEKQQDVYYLTFKVQGRKVEAEVLASPYDYILLNPSDVPWLMKKPLQLTVLVPLHEYQERLLQQTALPKEQKELLQKLFLKYDALWQHWENQVGHRRIKPHNIATGTLAPRPQKQYPINPKAKPSIQIVIDDLLKQGVLIQQNSTMNTPVYPVPKPDGKWRMVLDYREVNKTIPLIAAQNQHSAGILSSIYRGKYKTTLDLTNGFWAHPITPESYWLTAFTWQGKQYCWTRLPQGFLNSPALFNADVVDLLKEIPNVQAYVDDIYISHDDPQEHLEQLEKIFSILLNAGYVVSLKKSEIAQREVEFLGFNITKEGRGLTDTFKQKLLNITPPKDLKQLQSILGKLNFARNFIPNYSELVKPLYTIVAPANGKFISWTEDNSNQLQHIISVLNQADNLEERNPETRLIIKVNSSPSAGYIRYYNEGSKRPIMYVNYIFSKAEAKFTQTEKLLTTMHKGLIKAMDLAMGQEILVYSPIVSMTKIQRTPLPERKALPVRWITWMTYLEDPRIQFHYDKSLPELQQIPNVTEDVIAKTKHPSEFAMVFYTDGSAIKHPDVNKSHSAGMGIAQVQFIPEYKIVHQWSIPLGDHTAQLAEIAAVEFACKKALKISGPVLIVTDSFYVAESANKELPYWKSNGFLNNKKKPLRHVSKWKSIAECLQLKPDIIIMHEKGHQQPMTTLHTEGNNLADKLATQGSYVVHAGKRTADGSEFEKRTADGSEFESPKKKAKVE

SEQ ID NO: 487 - protein, 2177 aa, synthetic construct
MPAAKRVKLDGGDKKYSIGLDIGTNSVGWAVITDEYKVPSKKFKVLGNTDRHSIKKNLIGALLFDSGETAEATRLKRTARRRYTRRKNRICYLQEIFSNEMAKVDDSFFHRLEESFLVEEDKKHERHPIFGNIVDEVAYHEKYPTIYHLRKKLVDSTDKADLRLIYLALAHMIKFRGHFLIEGDLNPDNSDVDKLFIQLVQTYNQLFEENPINASGVDAKAILSARLSKSRRLENLIAQLPGEKKNGLFGNLIALSLGLTPNFKSNFDLAEDAKLQLSKDTYDDDLDNLLAQIGDQYADLFLAAKNLSDAILLSDILRVNTEITKAPLSASMIKRYDEHHQDLTLLKALVRQQLPEKYKEIFFDQSKNGYAGYIDGGASQEEFYKFIKPILEKMDGTEELLVKLNREDLLRKQRTFDNGSIPHQIHLGELHAILRRQEDFYPFLKDNREKIEKILTFRIPYYVGPLARGNSRFAWMTRKSEETITPWNFEEVVDKGASAQSFIERMTNFDKNLPNEKVLPKHSLLYEYFTVYNELTKVKYVTEGMRKPAFLSGEQKKAIVDLLFKTNRKVTVKQLKEDYFKKIECFDSVEISGVEDRFNASLGTYHDLLKIIKDKDFLDNEENEDILEDIVLTLTLFEDREMIEERLKTYAHLFDDKVMKQLKRRRYTGWGRLSRKLINGIRDKQSGKTILDFLKSDGFANRNFMQLIHDDSLTFKEDIQKAQVSGQGDSLHEHIANLAGSPAIKKGILQTVKVVDELVKVMGRHKPENIVIEMARENQTTQKGQKNSRERMKRIEEGIKELGSQILKEHPVENTQLQNEKLYLYYLQNGRDMYVDQELDINRLSDYDVDHIVPQSFLKDDSIDNKVLTRSDKARGKSDNVPSEEVVKKMKNYWRQLLNAKLITQRKFDNLTKAERGGLSELDKAGFIKRQLVETRQITKHVAQILDSRMNTKYDENDKLIREVKVITLKSKLVSDFRKDFQFYKVREINNYHHAHDAYLNAVVGTALIKKYPKLESEFVYGDYKVYDVRKMIAKSEQEIGKATAKYFFYSNIMNFFKTEITLANGEIRKRPLIETNGETGEIVWDKGRDFATVRKVLSMPQVNIVKKTEVQTGGFSKESILPKRNSDKLIARKKDWDPKKYGGFDSPTVAYSVLVVAKVEKGKSKKLKSVKELLGITIMERSSFEKNPIDFLEAKGYKEVKKDLIIKLPKYSLFELENGRKRMLASAGELQKGNELALPSKYVNFLYLASHYEKLKGSPEDNEQKQLFVEQHKHYLDEIIEQISEFSKRVILADANLDKVLSAYNKHRDKPIREQAENIIHLFTLTNLGAPAAFKYFDTTIDRKRYTSTKEVLDATLIHQSITGLYETRIDLSQLGGDGGGGSGGSGGSGGSGGMDPLQLLQPLEAEIKGTKLKAHWNSGATITCVPEAFLEDERPIQTMLIKTIHGEKQQDVYYLTFKVQGRKVEAEVLASPYDYILLNPSDVPWLMKKPLQLTVLVPLHEYQERLLQQTALPKEQKELLQKLFLKYDALWQHWENQVGHRRIKPHNIATGTLAPRPQKQYPINPKAKPSIQIVIDDLLKQGVLIQQNSTMNTPVYPVPKPDGKWRMVLDYREVNKTIPLIAAQNQHSAGILSSIYRGKYKTTLDLTNGFWAHPITPESYWLTAFTWQGKQYCWTRLPQGFLNSPALFNADVVDLLKEIPNVQAYVDDIYISHDDPQEHLEQLEKIFSILLNAGYVVSLKKSEIAQREVEFLGFNITKEGRGLTDTFKQKLLNITPPKDLKQLQSILGKLNFARNFIPNYSELVKPLYTIVAPANGKFISWTEDNSNQLQHIISVLNQADNLEERNPETRLIIKVNSSPSAGYIRYYNEGSKRPIMYVNYIFSKAEAKFTQTEKLLTTMHKGLIKAMDLAMGQEILVYSPIVSMTKIQRTPLPERKALPVRWITWMTYLEDPRIQFHYDKSLPELQQIPNVTEDVIAKTKHPSEFAMVFYTDGSAIKHPDVNKSHSAGMGIAQVQFIPEYKIVHQWSIPLGDHTAQLAEIAAVEFACKKALKISGPVLIVTDSFYVAESANKELPYWKSNGFLNNKKKPLRHVSKWKSIAECLQLKPDIIIMHEKGHQQPMTTLHTEGNNLADKLATQGSYVVHAGKRTADGSEFEKRTADGSEFESPKKKAKVE

SEQ ID NO: 488 - protein, 2171 aa, synthetic construct
MPAAKRVKLDGGDKKYSIGLDIGTNSVGWAVITDEYKVPSKKFKVLGNTDRHSIKKNLIGALLFDSGETAEATRLKRTARRRYTRRKNRICYLQEIFSNEMAKVDDSFFHRLEESFLVEEDKKHERHPIFGNIVDEVAYHEKYPTIYHLRKKLVDSTDKADLRLIYLALAHMIKFRGHFLIEGDLNPDNSDVDKLFIQLVQTYNQLFEENPINASGVDAKAILSARLSKSRRLENLIAQLPGEKKNGLFGNLIALSLGLTPNFKSNFDLAEDAKLQLSKDTYDDDLDNLLAQIGDQYADLFLAAKNLSDAILLSDILRVNTEITKAPLSASMIKRYDEHHQDLTLLKALVRQQLPEKYKEIFFDQSKNGYAGYIDGGASQEEFYKFIKPILEKMDGTEELLVKLNREDLLRKQRTFDNGSIPHQIHLGELHAILRRQEDFYPFLKDNREKIEKILTFRIPYYVGPLARGNSRFAWMTRKSEETITPWNFEEVVDKGASAQSFIERMTNFDKNLPNEKVLPKHSLLYEYFTVYNELTKVKYVTEGMRKPAFLSGEQKKAIVDLLFKTNRKVTVKQLKEDYFKKIECFDSVEISGVEDRFNASLGTYHDLLKIIKDKDFLDNEENEDILEDIVLTLTLFEDREMIEERLKTYAHLFDDKVMKQLKRRRYTGWGRLSRKLINGIRDKQSGKTILDFLKSDGFANRNFMQLIHDDSLTFKEDIQKAQVSGQGDSLHEHIANLAGSPAIKKGILQTVKVVDELVKVMGRHKPENIVIEMARENQTTQKGQKNSRERMKRIEEGIKELGSQILKEHPVENTQLQNEKLYLYYLQNGRDMYVDQELDINRLSDYDVDHIVPQSFLKDDSIDNKVLTRSDKARGKSDNVPSEEVVKKMKNYWRQLLNAKLITQRKFDNLTKAERGGLSELDKAGFIKRQLVETRQITKHVAQILDSRMNTKYDENDKLIREVKVITLKSKLVSDFRKDFQFYKVREINNYHHAHDAYLNAVVGTALIKKYPKLESEFVYGDYKVYDVRKMIAKSEQEIGKATAKYFFYSNIMNFFKTEITLANGEIRKRPLIETNGETGEIVWDKGRDFATVRKVLSMPQVNIVKKTEVQTGGFSKESILPKRNSDKLIARKKDWDPKKYGGFDSPTVAYSVLVVAKVEKGKSKKLKSVKELLGITIMERSSFEKNPIDFLEAKGYKEVKKDLIIKLPKYSLFELENGRKRMLASAGELQKGNELALPSKYVNFLYLASHYEKLKGSPEDNEQKQLFVEQHKHYLDEIIEQISEFSKRVILADANLDKVLSAYNKHRDKPIREQAENIIHLFTLTNLGAPAAFKYFDTTIDRKRYTSTKEVLDATLIHQSITGLYETRIDLSQLGGDGGGGGGGSGGMDPLQLLQPLEAEIKGTKLKAHWNSGATITCVPEAFLEDERPIQTMLIKTIHGEKQQDVYYLTFKVQGRKVEAEVLASPYDYILLNPSDVPWLMKKPLQLTVLVPLHEYQERLLQQTALPKEQKELLQKLFLKYDALWQHWENQVGHRRIKPHNIATGTLAPRPQKQYPINPKAKPSIQIVIDDLLKQGVLIQQNSTMNTPVYPVPKPDGKWRMVLDYREVNKTIPLIAAQNQHSAGILSSIYRGKYKTTLDLTNGFWAHPITPESYWLTAFTWQGKQYCWTRLPQGFLNSPALFNADVVDLLKEIPNVQAYVDDIYISHDDPQEHLEQLEKIFSILLNAGYVVSLKKSEIAQREVEFLGFNITKEGRGLTDTFKQKLLNITPPKDLKQLQSILGKLNFARNFIPNYSELVKPLYTIVAPANGKFISWTEDNSNQLQHIISVLNQADNLEERNPETRLIIKVNSSPSAGYIRYYNEGSKRPIMYVNYIFSKAEAKFTQTEKLLTTMHKGLIKAMDLAMGQEILVYSPIVSMTKIQRTPLPERKALPVRWITWMTYLEDPRIQFHYDKSLPELQQIPNVTEDVIAKTKHPSEFAMVFYTDGSAIKHPDVNKSHSAGMGIAQVQFIPEYKIVHQWSIPLGDHTAQLAEIAAVEFACKKALKISGPVLIVTDSFYVAESANKELPYWKSNGFLNNKKKPLRHVSKWKSIAECLQLKPDIIIMHEKGHQQPMTTLHTEGNNLADKLATQGSYVVHAGKRTADGSEFEKRTADGSEFESPKKKAKVE

SEQ ID NO: 489 - protein, 2211 aa, synthetic construct
MPAAKRVKLDGGDKKYSIGLDIGTNSVGWAVITDEYKVPSKKFKVLGNTDRHSIKKNLIGALLFDSGETAEATRLKRTARRRYTRRKNRICYLQEIFSNEMAKVDDSFFHRLEESFLVEEDKKHERHPIFGNIVDEVAYHEKYPTIYHLRKKLVDSTDKADLRLIYLALAHMIKFRGHFLIEGDLNPDNSDVDKLFIQLVQTYNQLFEENPINASGVDAKAILSARLSKSRRLENLIAQLPGEKKNGLFGNLIALSLGLTPNFKSNFDLAEDAKLQLSKDTYDDDLDNLLAQIGDQYADLFLAAKNLSDAILLSDILRVNTEITKAPLSASMIKRYDEHHQDLTLLKALVRQQLPEKYKEIFFDQSKNGYAGYIDGGASQEEFYKFIKPILEKMDGTEELLVKLNREDLLRKQRTFDNGSIPHQIHLGELHAILRRQEDFYPFLKDNREKIEKILTFRIPYYVGPLARGNSRFAWMTRKSEETITPWNFEEVVDKGASAQSFIERMTNFDKNLPNEKVLPKHSLLYEYFTVYNELTKVKYVTEGMRKPAFLSGEQKKAIVDLLFKTNRKVTVKQLKEDYFKKIECFDSVEISGVEDRFNASLGTYHDLLKIIKDKDFLDNEENEDILEDIVLTLTLFEDREMIEERLKTYAHLFDDKVMKQLKRRRYTGWGRLSRKLINGIRDKQSGKTILDFLKSDGFANRNFMQLIHDDSLTFKEDIQKAQVSGQGDSLHEHIANLAGSPAIKKGILQTVKVVDELVKVMGRHKPENIVIEMARENQTTQKGQKNSRERMKRIEEGIKELGSQILKEHPVENTQLQNEKLYLYYLQNGRDMYVDQELDINRLSDYDVDHIVPQSFLKDDSIDNKVLTRSDKARGKSDNVPSEEVVKKMKNYWRQLLNAKLITQRKFDNLTKAERGGLSELDKAGFIKRQLVETRQITKHVAQILDSRMNTKYDENDKLIREVKVITLKSKLVSDFRKDFQFYKVREINNYHHAHDAYLNAVVGTALIKKYPKLESEFVYGDYKVYDVRKMIAKSEQEIGKATAKYFFYSNIMNFFKTEITLANGEIRKRPLIETNGETGEIVWDKGRDFATVRKVLSMPQVNIVKKTEVQTGGFSKESILPKRNSDKLIARKKDWDPKKYGGFDSPTVAYSVLVVAKVEKGKSKKLKSVKELLGITIMERSSFEKNPIDFLEAKGYKEVKKDLIIKLPKYSLFELENGRKRMLASAGELQKGNELALPSKYVNFLYLASHYEKLKGSPEDNEQKQLFVEQHKHYLDEIIEQISEFSKRVILADANLDKVLSAYNKHRDKPIREQAENIIHLFTLTNLGAPAAFKYFDTTIDRKRYTSTKEVLDATLIHQSITGLYETRIDLSQLGGDGGAEAAAKEAAAKEAAAKEAAAKALEAEAAAKEAAAKEAAAKEAAAKAGGMDPLQLLQPLEAEIKGTKLKAHWNSGATITCVPQAFLEEEVPIKNIWIKTIHGEKEQPVYYLTFKIQGRKVEAEVISSPYDYILVSPSDIPWLMKKPLQLTTLVPLQEYEERLLKQTMLTGSYKEKLQSLFLKYDALWQHWENQVGHRRIKPHHIATGTVNPRPQKQYPINPKAKASIQTVINDLLKQGVLIQQNSIMNTPVYPVPKPDGKWRMVLDYREVNKTIPLIAAQNQHSAGILSSIFRGKYKTTLDLSNGFWAHSITPESYWLTAFTWLGQQYCWTRLPQGFLNSPALFTADVVDLLKEVPNVQVYVDDIYISHDDPREHLEQLEKVFSLLLNAGYVVSLKKSEIAQHEVEFLGFNITKEGRGLTETFKQKLLNITPPRDLKQLQSILGLLNFARNFIPNFSELVKPLYNIIATANGKYITWTTDNSQQLQNIISMLNSAENLEERNPEVRLIMKVNTSPSAGYIRFYNEFAKRPIMYLNYVYTKAEVKFTNTEKLLTTIHKGLIKALDLGMGQEILVYSPIVSMTKIQKTPLPERKALPIRWITWMSYLEDPRIQFHYDKTLPELQQVPTVTDDIIAKIKHPSEFSMVFYTDGSAIKHPNVNKSHNAGMGIAQVQFKPEFTVINTWSIPLGDHTAQLAEVAAVEFACKKALKIDGPVLIVTDSFYVAESVNKELPYWQSNGFFNNKKKPLKHVSKWKSIADCIQLKPDIIIIHEKGHQPTASTFHTEGNNLADKLATQGSYVVNAGKRTADGSEFEKRTADGSEFESPKKKAKVE

SEQ ID NO: 490 - protein, 2190 aa, synthetic construct
MPAAKRVKLDGGDKKYSIGLDIGTNSVGWAVITDEYKVPSKKFKVLGNTDRHSIKKNLIGALLFDSGETAEATRLKRTARRRYTRRKNRICYLQEIFSNEMAKVDDSFFHRLEESFLVEEDKKHERHPIFGNIVDEVAYHEKYPTIYHLRKKLVDSTDKADLRLIYLALAHMIKFRGHFLIEGDLNPDNSDVDKLFIQLVQTYNQLFEENPINASGVDAKAILSARLSKSRRLENLIAQLPGEKKNGLFGNLIALSLGLTPNFKSNFDLAEDAKLQLSKDTYDDDLDNLLAQIGDQYADLFLAAKNLSDAILLSDILRVNTEITKAPLSASMIKRYDEHHQDLTLLKALVRQQLPEKYKEIFFDQSKNGYAGYIDGGASQEEFYKFIKPILEKMDGTEELLVKLNREDLLRKQRTFDNGSIPHQIHLGELHAILRRQEDFYPFLKDNREKIEKILTFRIPYYVGPLARGNSRFAWMTRKSEETITPWNFEEVVDKGASAQSFIERMTNFDKNLPNEKVLPKHSLLYEYFTVYNELTKVKYVTEGMRKPAFLSGEQKKAIVDLLFKTNRKVTVKQLKEDYFKKIECFDSVEISGVEDRFNASLGTYHDLLKIIKDKDFLDNEENEDILEDIVLTLTLFEDREMIEERLKTYAHLFDDKVMKQLKRRRYTGWGRLSRKLINGIRDKQSGKTILDFLKSDGFANRNFMQLIHDDSLTFKEDIQKAQVSGQGDSLHEHIANLAGSPAIKKGILQTVKVVDELVKVMGRHKPENIVIEMARENQTTQKGQKNSRERMKRIEEGIKELGSQILKEHPVENTQLQNEKLYLYYLQNGRDMYVDQELDINRLSDYDVDHIVPQSFLKDDSIDNKVLTRSDKARGKSDNVPSEEVVKKMKNYWRQLLNAKLITQRKFDNLTKAERGGLSELDKAGFIKRQLVETRQITKHVAQILDSRMNTKYDENDKLIREVKVITLKSKLVSDFRKDFQFYKVREINNYHHAHDAYLNAVVGTALIKKYPKLESEFVYGDYKVYDVRKMIAKSEQEIGKATAKYFFYSNIMNFFKTEITLANGEIRKRPLIETNGETGEIVWDKGRDFATVRKVLSMPQVNIVKKTEVQTGGFSKESILPKRNSDKLIARKKDWDPKKYGGFDSPTVAYSVLVVAKVEKGKSKKLKSVKELLGITIMERSSFEKNPIDFLEAKGYKEVKKDLIIKLPKYSLFELENGRKRMLASAGELQKGNELALPSKYVNFLYLASHYEKLKGSPEDNEQKQLFVEQHKHYLDEIIEQISEFSKRVILADANLDKVLSAYNKHRDKPIREQAENIIHLFTLTNLGAPAAFKYFDTTIDRKRYTSTKEVLDATLIHQSITGLYETRIDLSQLGGDGGEAAAKEAAAKEAAAKEAAAKEAAAKGGMDPLQLLQPLEAEIKGTKLKAHWNSGATITCVPQAFLEEEVPIKNIWIKTIHGEKEQPVYYLTFKIQGRKVEAEVISSPYDYILVSPSDIPWLMKKPLQLTTLVPLQEYEERLLKQTMLTGSYKEKLQSLFLKYDALWQHWENQVGHRRIKPHHIATGTVNPRPQKQYPINPKAKASIQTVINDLLKQGVLIQQNSIMNTPVYPVPKPDGKWRMVLDYREVNKTIPLIAAQNQHSAGILSSIFRGKYKTTLDLSNGFWAHSITPESYWLTAFTWLGQQYCWTRLPQGFLNSPALFTADVVDLLKEVPNVQVYVDDIYISHDDPREHLEQLEKVFSLLLNAGYVVSLKKSEIAQHEVEFLGFNITKEGRGLTETFKQKLLNITPPRDLKQLQSILGLLNFARNFIPNFSELVKPLYNIIATANGKYITWTTDNSQQLQNIISMLNSAENLEERNPEVRLIMKVNTSPSAGYIRFYNEFAKRPIMYLNYVYTKAEVKFTNTEKLLTTIHKGLIKALDLGMGQEILVYSPIVSMTKIQKTPLPERKALPIRWITWMSYLEDPRIQFHYDKTLPELQQVPTVTDDIIAKIKHPSEFSMVFYTDGSAIKHPNVNKSHNAGMGIAQVQFKPEFTVINTWSIPLGDHTAQLAEVAAVEFACKKALKIDGPVLIVTDSFYVAESVNKELPYWQSNGFFNNKKKPLKHVSKWKSIADCIQLKPDIIIIHEKGHQPTASTFHTEGNNLADKLATQGSYVVNAGKRTADGSEFEKRTADGSEFESPKKKAKVE

SEQ ID NO: 491 - protein, 2176 aa, synthetic construct
MPAAKRVKLDGGDKKYSIGLDIGTNSVGWAVITDEYKVPSKKFKVLGNTDRHSIKKNLIGALLFDSGETAEATRLKRTARRRYTRRKNRICYLQEIFSNEMAKVDDSFFHRLEESFLVEEDKKHERHPIFGNIVDEVAYHEKYPTIYHLRKKLVDSTDKADLRLIYLALAHMIKFRGHFLIEGDLNPDNSDVDKLFIQLVQTYNQLFEENPINASGVDAKAILSARLSKSRRLENLIAQLPGEKKNGLFGNLIALSLGLTPNFKSNFDLAEDAKLQLSKDTYDDDLDNLLAQIGDQYADLFLAAKNLSDAILLSDILRVNTEITKAPLSASMIKRYDEHHQDLTLLKALVRQQLPEKYKEIFFDQSKNGYAGYIDGGASQEEFYKFIKPILEKMDGTEELLVKLNREDLLRKQRTFDNGSIPHQIHLGELHAILRRQEDFYPFLKDNREKIEKILTFRIPYYVGPLARGNSRFAWMTRKSEETITPWNFEEVVDKGASAQSFIERMTNFDKNLPNEKVLPKHSLLYEYFTVYNELTKVKYVTEGMRKPAFLSGEQKKAIVDLLFKTNRKVTVKQLKEDYFKKIECFDSVEISGVEDRFNASLGTYHDLLKIIKDKDFLDNEENEDILEDIVLTLTLFEDREMIEERLKTYAHLFDDKVMKQLKRRRYTGWGRLSRKLINGIRDKQSGKTILDFLKSDGFANRNFMQLIHDDSLTFKEDIQKAQVSGQGDSLHEHIANLAGSPAIKKGILQTVKVVDELVKVMGRHKPENIVIEMARENQTTQKGQKNSRERMKRIEEGIKELGSQILKEHPVENTQLQNEKLYLYYLQNGRDMYVDQELDINRLSDYDVDHIVPQSFLKDDSIDNKVLTRSDKARGKSDNVPSEEVVKKMKNYWRQLLNAKLITQRKFDNLTKAERGGLSELDKAGFIKRQLVETRQITKHVAQILDSRMNTKYDENDKLIREVKVITLKSKLVSDFRKDFQFYKVREINNYHHAHDAYLNAVVGTALIKKYPKLESEFVYGDYKVYDVRKMIAKSEQEIGKATAKYFFYSNIMNFFKTEITLANGEIRKRPLIETNGETGEIVWDKGRDFATVRKVLSMPQVNIVKKTEVQTGGFSKESILPKRNSDKLIARKKDWDPKKYGGFDSPTVAYSVLVVAKVEKGKSKKLKSVKELLGITIMERSSFEKNPIDFLEAKGYKEVKKDLIIKLPKYSLFELENGRKRMLASAGELQKGNELALPSKYVNFLYLASHYEKLKGSPEDNEQKQLFVEQHKHYLDEIIEQISEFSKRVILADANLDKVLSAYNKHRDKPIREQAENIIHLFTLTNLGAPAAFKYFDTTIDRKRYTSTKEVLDATLIHQSITGLYETRIDLSQLGGDGGEAAAKGGGPAPGGMDPLQLLQPLEAEIKGTKLKAHWNSGATITCVPQAFLEEEVPIKNIWIKTIHGEKEQPVYYLTFKIQGRKVEAEVISSPYDYILVSPSDIPWLMKKPLQLTTLVPLQEYEERLLKQTMLTGSYKEKLQSLFLKYDALWQHWENQVGHRRIKPHHIATGTVNPRPQKQYPINPKAKASIQTVINDLLKQGVLIQQNSIMNTPVYPVPKPDGKWRMVLDYREVNKTIPLIAAQNQHSAGILSSIFRGKYKTTLDLSNGFWAHSITPESYWLTAFTWLGQQYCWTRLPQGFLNSPALFTADVVDLLKEVPNVQVYVDDIYISHDDPREHLEQLEKVFSLLLNAGYVVSLKKSEIAQHEVEFLGFNITKEGRGLTETFKQKLLNITPPRDLKQLQSILGLLNFARNFIPNFSELVKPLYNIIATANGKYITWTTDNSQQLQNIISMLNSAENLEERNPEVRLIMKVNTSPSAGYIRFYNEFAKRPIMYLNYVYTKAEVKFTNTEKLLTTIHKGLIKALDLGMGQEILVYSPIVSMTKIQKTPLPERKALPIRWITWMSYLEDPRIQFHYDKTLPELQQVPTVTDDIIAKIKHPSEFSMVFYTDGSAIKHPNVNKSHNAGMGIAQVQFKPEFTVINTWSIPLGDHTAQLAEVAAVEFACKKALKIDGPVLIVTDSFYVAESVNKELPYWQSNGFFNNKKKPLKHVSKWKSIADCIQLKPDIIIIHEKGHQPTASTFHTEGNNLADKLATQGSYVVNAGKRTADGSEFEKRTADGSEFESPKKKAKVE

SEQ ID NO: 492 - protein, 2180 aa, synthetic construct
MPAAKRVKLDGGDKKYSIGLDIGTNSVGWAVITDEYKVPSKKFKVLGNTDRHSIKKNLIGALLFDSGETAEATRLKRTARRRYTRRKNRICYLQEIFSNEMAKVDDSFFHRLEESFLVEEDKKHERHPIFGNIVDEVAYHEKYPTIYHLRKKLVDSTDKADLRLIYLALAHMIKFRGHFLIEGDLNPDNSDVDKLFIQLVQTYNQLFEENPINASGVDAKAILSARLSKSRRLENLIAQLPGEKKNGLFGNLIALSLGLTPNFKSNFDLAEDAKLQLSKDTYDDDLDNLLAQIGDQYADLFLAAKNLSDAILLSDILRVNTEITKAPLSASMIKRYDEHHQDLTLLKALVRQQLPEKYKEIFFDQSKNGYAGYIDGGASQEEFYKFIKPILEKMDGTEELLVKLNREDLLRKQRTFDNGSIPHQIHLGELHAILRRQEDFYPFLKDNREKIEKILTFRIPYYVGPLARGNSRFAWMTRKSEETITPWNFEEVVDKGASAQSFIERMTNFDKNLPNEKVLPKHSLLYEYFTVYNELTKVKYVTEGMRKPAFLSGEQKKAIVDLLFKTNRKVTVKQLKEDYFKKIECFDSVEISGVEDRFNASLGTYHDLLKIIKDKDFLDNEENEDILEDIVLTLTLFEDREMIEERLKTYAHLFDDKVMKQLKRRRYTGWGRLSRKLINGIRDKQSGKTILDFLKSDGFANRNFMQLIHDDSLTFKEDIQKAQVSGQGDSLHEHIANLAGSPAIKKGILQTVKVVDELVKVMGRHKPENIVIEMARENQTTQKGQKNSRERMKRIEEGIKELGSQILKEHPVENTQLQNEKLYLYYLQNGRDMYVDQELDINRLSDYDVDHIVPQSFLKDDSIDNKVLTRSDKARGKSDNVPSEEVVKKMKNYWRQLLNAKLITQRKFDNLTKAERGGLSELDKAGFIKRQLVETRQITKHVAQILDSRMNTKYDENDKLIREVKVITLKSKLVSDFRKDFQFYKVREINNYHHAHDAYLNAVVGTALIKKYPKLESEFVYGDYKVYDVRKMIAKSEQEIGKATAKYFFYSNIMNFFKTEITLANGEIRKRPLIETNGETGEIVWDKGRDFATVRKVLSMPQVNIVKKTEVQTGGFSKESILPKRNSDKLIARKKDWDPKKYGGFDSPTVAYSVLVVAKVEKGKSKKLKSVKELLGITIMERSSFEKNPIDFLEAKGYKEVKKDLIIKLPKYSLFELENGRKRMLASAGELQKGNELALPSKYVNFLYLASHYEKLKGSPEDNEQKQLFVEQHKHYLDEIIEQISEFSKRVILADANLDKVLSAYNKHRDKPIREQAENIIHLFTLTNLGAPAAFKYFDTTIDRKRYTSTKEVLDATLIHQSITGLYETRIDLSQLGGDGGGSSGSSGSSGSSGSSGGMDPLQLLQPLEAEIKGTKLKAHWNSGATITCVPQAFLEEEVPIKNIWIKTIHGEKEQPVYYLTFKIQGRKVEAEVISSPYDYILVSPSDIPWLMKKPLQLTTLVPLQEYEERLLKQTMLTGSYKEKLQSLFLKYDALWQHWENQVGHRRIKPHHIATGTVNPRPQKQYPINPKAKASIQTVINDLLKQGVLIQQNSIMNTPVYPVPKPDGKWRMVLDYREVNKTIPLIAAQNQHSAGILSSIFRGKYKTTLDLSNGFWAHSITPESYWLTAFTWLGQQYCWTRLPQGFLNSPALFTADVVDLLKEVPNVQVYVDDIYISHDDPREHLEQLEKVFSLLLNAGYVVSLKKSEIAQHEVEFLGFNITKEGRGLTETFKQKLLNITPPRDLKQLQSILGLLNFARNFIPNFSELVKPLYNIIATANGKYITWTTDNSQQLQNIISMLNSAENLEERNPEVRLIMKVNTSPSAGYIRFYNEFAKRPIMYLNYVYTKAEVKFTNTEKLLTTIHKGLIKALDLGMGQEILVYSPIVSMTKIQKTPLPERKALPIRWITWMSYLEDPRIQFHYDKTLPELQQVPTVTDDIIAKIKHPSEFSMVFYTDGSAIKHPNVNKSHNAGMGIAQVQFKPEFTVINTWSIPLGDHTAQLAEVAAVEFACKKALKIDGPVLIVTDSFYVAESVNKELPYWQSNGFFNNKKKPLKHVSKWKSIADCIQLKPDIIIIHEKGHQPTASTFHTEGNNLADKLATQGSYVVNAGKRTADGSEFEKRTADGSEFESPKKKAKVE

SEQ ID NO: 493 - protein, 2176 aa, synthetic construct
MPAAKRVKLDGGDKKYSIGLDIGTNSVGWAVITDEYKVPSKKFKVLGNTDRHSIKKNLIGALLFDSGETAEATRLKRTARRRYTRRKNRICYLQEIFSNEMAKVDDSFFHRLEESFLVEEDKKHERHPIFGNIVDEVAYHEKYPTIYHLRKKLVDSTDKADLRLIYLALAHMIKFRGHFLIEGDLNPDNSDVDKLFIQLVQTYNQLFEENPINASGVDAKAILSARLSKSRRLENLIAQLPGEKKNGLFGNLIALSLGLTPNFKSNFDLAEDAKLQLSKDTYDDDLDNLLAQIGDQYADLFLAAKNLSDAILLSDILRVNTEITKAPLSASMIKRYDEHHQDLTLLKALVRQQLPEKYKEIFFDQSKNGYAGYIDGGASQEEFYKFIKPILEKMDGTEELLVKLNREDLLRKQRTFDNGSIPHQIHLGELHAILRRQEDFYPFLKDNREKIEKILTFRIPYYVGPLARGNSRFAWMTRKSEETITPWNFEEVVDKGASAQSFIERMTNFDKNLPNEKVLPKHSLLYEYFTVYNELTKVKYVTEGMRKPAFLSGEQKKAIVDLLFKTNRKVTVKQLKEDYFKKIECFDSVEISGVEDRFNASLGTYHDLLKIIKDKDFLDNEENEDILEDIVLTLTLFEDREMIEERLKTYAHLFDDKVMKQLKRRRYTGWGRLSRKLINGIRDKQSGKTILDFLKSDGFANRNFMQLIHDDSLTFKEDIQKAQVSGQGDSLHEHIANLAGSPAIKKGILQTVKVVDELVKVMGRHKPENIVIEMARENQTTQKGQKNSRERMKRIEEGIKELGSQILKEHPVENTQLQNEKLYLYYLQNGRDMYVDQELDINRLSDYDVDHIVPQSFLKDDSIDNKVLTRSDKARGKSDNVPSEEVVKKMKNYWRQLLNAKLITQRKFDNLTKAERGGLSELDKAGFIKRQLVETRQITKHVAQILDSRMNTKYDENDKLIREVKVITLKSKLVSDFRKDFQFYKVREINNYHHAHDAYLNAVVGTALIKKYPKLESEFVYGDYKVYDVRKMIAKSEQEIGKATAKYFFYSNIMNFFKTEITLANGEIRKRPLIETNGETGEIVWDKGRDFATVRKVLSMPQVNIVKKTEVQTGGFSKESILPKRNSDKLIARKKDWDPKKYGGFDSPTVAYSVLVVAKVEKGKSKKLKSVKELLGITIMERSSFEKNPIDFLEAKGYKEVKKDLIIKLPKYSLFELENGRKRMLASAGELQKGNELALPSKYVNFLYLASHYEKLKGSPEDNEQKQLFVEQHKHYLDEIIEQISEFSKRVILADANLDKVLSAYNKHRDKPIREQAENIIHLFTLTNLGAPAAFKYFDTTIDRKRYTSTKEVLDATLIHQSITGLYETRIDLSQLGGDGGEAAAKGGSPAPGGMDPLQLLQPLEAEIKGTKLKAHWNSGATITCVPQAFLEEEVPIKNIWIKTIHGEKEQPVYYLTFKIQGRKVEAEVISSPYDYILVSPSDIPWLMKKPLQLTTLVPLQEYEERLLKQTMLTGSYKEKLQSLFLKYDALWQHWENQVGHRRIKPHHIATGTVNPRPQKQYPINPKAKASIQTVINDLLKQGVLIQQNSIMNTPVYPVPKPDGKWRMVLDYREVNKTIPLIAAQNQHSAGILSSIFRGKYKTTLDLSNGFWAHSITPESYWLTAFTWLGQQYCWTRLPQGFLNSPALFTADVVDLLKEVPNVQVYVDDIYISHDDPREHLEQLEKVFSLLLNAGYVVSLKKSEIAQHEVEFLGFNITKEGRGLTETFKQKLLNITPPRDLKQLQSILGLLNFARNFIPNFSELVKPLYNIIATANGKYITWTTDNSQQLQNIISMLNSAENLEERNPEVRLIMKVNTSPSAGYIRFYNEFAKRPIMYLNYVYTKAEVKFTNTEKLLTTIHKGLIKALDLGMGQEILVYSPIVSMTKIQKTPLPERKALPIRWITWMSYLEDPRIQFHYDKTLPELQQVPTVTDDIIAKIKHPSEFSMVFYTDGSAIKHPNVNKSHNAGMGIAQVQFKPEFTVINTWSIPLGDHTAQLAEVAAVEFACKKALKIDGPVLIVTDSFYVAESVNKELPYWQSNGFFNNKKKPLKHVSKWKSIADCIQLKPDIIIIHEKGHQPTASTFHTEGNNLADKLATQGSYVVNAGKRTADGSEFEKRTADGSEFESPKKKAKVE

SEQ ID NO: 494 - protein, 2181 aa, synthetic construct
MPAAKRVKLDGGDKKYSIGLDIGTNSVGWAVITDEYKVPSKKFKVLGNTDRHSIKKNLIGALLFDSGETAEATRLKRTARRRYTRRKNRICYLQEIFSNEMAKVDDSFFHRLEESFLVEEDKKHERHPIFGNIVDEVAYHEKYPTIYHLRKKLVDSTDKADLRLIYLALAHMIKFRGHFLIEGDLNPDNSDVDKLFIQLVQTYNQLFEENPINASGVDAKAILSARLSKSRRLENLIAQLPGEKKNGLFGNLIALSLGLTPNFKSNFDLAEDAKLQLSKDTYDDDLDNLLAQIGDQYADLFLAAKNLSDAILLSDILRVNTEITKAPLSASMIKRYDEHHQDLTLLKALVRQQLPEKYKEIFFDQSKNGYAGYIDGGASQEEFYKFIKPILEKMDGTEELLVKLNREDLLRKQRTFDNGSIPHQIHLGELHAILRRQEDFYPFLKDNREKIEKILTFRIPYYVGPLARGNSRFAWMTRKSEETITPWNFEEVVDKGASAQSFIERMTNFDKNLPNEKVLPKHSLLYEYFTVYNELTKVKYVTEGMRKPAFLSGEQKKAIVDLLFKTNRKVTVKQLKEDYFKKIECFDSVEISGVEDRFNASLGTYHDLLKIIKDKDFLDNEENEDILEDIVLTLTLFEDREMIEERLKTYAHLFDDKVMKQLKRRRYTGWGRLSRKLINGIRDKQSGKTILDFLKSDGFANRNFMQLIHDDSLTFKEDIQKAQVSGQGDSLHEHIANLAGSPAIKKGILQTVKVVDELVKVMGRHKPENIVIEMARENQTTQKGQKNSRERMKRIEEGIKELGSQILKEHPVENTQLQNEKLYLYYLQNGRDMYVDQELDINRLSDYDVDHIVPQSFLKDDSIDNKVLTRSDKARGKSDNVPSEEVVKKMKNYWRQLLNAKLITQRKFDNLTKAERGGLSELDKAGFIKRQLVETRQITKHVAQILDSRMNTKYDENDKLIREVKVITLKSKLVSDFRKDFQFYKVREINNYHHAHDAYLNAVVGTALIKKYPKLESEFVYGDYKVYDVRKMIAKSEQEIGKATAKYFFYSNIMNFFKTEITLANGEIRKRPLIETNGETGEIVWDKGRDFATVRKVLSMPQVNIVKKTEVQTGGFSKESILPKRNSDKLIARKKDWDPKKYGGFDSPTVAYSVLVVAKVEKGKSKKLKSVKELLGITIMERSSFEKNPIDFLEAKGYKEVKKDLIIKLPKYSLFELENGRKRMLASAGELQKGNELALPSKYVNFLYLASHYEKLKGSPEDNEQKQLFVEQHKHYLDEIIEQISEFSKRVILADANLDKVLSAYNKHRDKPIREQAENIIHLFTLTNLGAPAAFKYFDTTIDRKRYTSTKEVLDATLIHQSITGLYETRIDLSQLGGDGGSGSETPGTSESATPESGGMDPLQLLQPLEAEIKGTKLKAHWNSGATITCVPQAFLEEEVPIKNIWIKTIHGEKEQPVYYLTFKIQGRKVEAEVISSPYDYILVSPSDIPWLMKKPLQLTTLVPLQEYEERLLKQTMLTGSYKEKLQSLFLKYDALWQHWENQVGHRRIKPHHIATGTVNPRPQKQYPINPKAKASIQTVINDLLKQGVLIQQNSIMNTPVYPVPKPDGKWRMVLDYREVNKTIPLIAAQNQHSAGILSSIFRGKYKTTLDLSNGFWAHSITPESYWLTAFTWLGQQYCWTRLPQGFLNSPALFTADVVDLLKEVPNVQVYVDDIYISHDDPREHLEQLEKVFSLLLNAGYVVSLKKSEIAQHEVEFLGFNITKEGRGLTETFKQKLLNITPPRDLKQLQSILGLLNFARNFIPNFSELVKPLYNIIATANGKYITWTTDNSQQLQNIISMLNSAENLEERNPEVRLIMKVNTSPSAGYIRFYNEFAKRPIMYLNYVYTKAEVKFTNTEKLLTTIHKGLIKALDLGMGQEILVYSPIVSMTKIQKTPLPERKALPIRWITWMSYLEDPRIQFHYDKTLPELQQVPTVTDDIIAKIKHPSEFSMVFYTDGSAIKHPNVNKSHNAGMGIAQVQFKPEFTVINTWSIPLGDHTAQLAEVAAVEFACKKALKIDGPVLIVTDSFYVAESVNKELPYWQSNGFFNNKKKPLKHVSKWKSIADCIQLKPDIIIIHEKGHQPTASTFHTEGNNLADKLATQGSYVVNAGKRTADGSEFEKRTADGSEFESPKKKAKVE

SEQ ID NO: 495 - protein, 2176 aa, synthetic construct
MPAAKRVKLDGGDKKYSIGLDIGTNSVGWAVITDEYKVPSKKFKVLGNTDRHSIKKNLIGALLFDSGETAEATRLKRTARRRYTRRKNRICYLQEIFSNEMAKVDDSFFHRLEESFLVEEDKKHERHPIFGNIVDEVAYHEKYPTIYHLRKKLVDSTDKADLRLIYLALAHMIKFRGHFLIEGDLNPDNSDVDKLFIQLVQTYNQLFEENPINASGVDAKAILSARLSKSRRLENLIAQLPGEKKNGLFGNLIALSLGLTPNFKSNFDLAEDAKLQLSKDTYDDDLDNLLAQIGDQYADLFLAAKNLSDAILLSDILRVNTEITKAPLSASMIKRYDEHHQDLTLLKALVRQQLPEKYKEIFFDQSKNGYAGYIDGGASQEEFYKFIKPILEKMDGTEELLVKLNREDLLRKQRTFDNGSIPHQIHLGELHAILRRQEDFYPFLKDNREKIEKILTFRIPYYVGPLARGNSRFAWMTRKSEETITPWNFEEVVDKGASAQSFIERMTNFDKNLPNEKVLPKHSLLYEYFTVYNELTKVKYVTEGMRKPAFLSGEQKKAIVDLLFKTNRKVTVKQLKEDYFKKIECFDSVEISGVEDRFNASLGTYHDLLKIIKDKDFLDNEENEDILEDIVLTLTLFEDREMIEERLKTYAHLFDDKVMKQLKRRRYTGWGRLSRKLINGIRDKQSGKTILDFLKSDGFANRNFMQLIHDDSLTFKEDIQKAQVSGQGDSLHEHIANLAGSPAIKKGILQTVKVVDELVKVMGRHKPENIVIEMARENQTTQKGQKNSRERMKRIEEGIKELGSQILKEHPVENTQLQNEKLYLYYLQNGRDMYVDQELDINRLSDYDVDHIVPQSFLKDDSIDNKVLTRSDKARGKSDNVPSEEVVKKMKNYWRQLLNAKLITQRKFDNLTKAERGGLSELDKAGFIKRQLVETRQITKHVAQILDSRMNTKYDENDKLIREVKVITLKSKLVSDFRKDFQFYKVREINNYHHAHDAYLNAVVGTALIKKYPKLESEFVYGDYKVYDVRKMIAKSEQEIGKATAKYFFYSNIMNFFKTEITLANGEIRKRPLIETNGETGEIVWDKGRDFATVRKVLSMPQVNIVKKTEVQTGGFSKESILPKRNSDKLIARKKDWDPKKYGGFDSPTVAYSVLVVAKVEKGKSKKLKSVKELLGITIMERSSFEKNPIDFLEAKGYKEVKKDLIIKLPKYSLFELENGRKRMLASAGELQKGNELALPSKYVNFLYLASHYEKLKGSPEDNEQKQLFVEQHKHYLDEIIEQISEFSKRVILADANLDKVLSAYNKHRDKPIREQAENIIHLFTLTNLGAPAAFKYFDTTIDRKRYTSTKEVLDATLIHQSITGLYETRIDLSQLGGDGGEAAAKPAPGSSGGMDPLQLLQPLEAEIKGTKLKAHWNSGATITCVPQAFLEEEVPIKNIWIKTIHGEKEQPVYYLTFKIQGRKVEAEVISSPYDYILVSPSDIPWLMKKPLQLTTLVPLQEYEERLLKQTMLTGSYKEKLQSLFLKYDALWQHWENQVGHRRIKPHHIATGTVNPRPQKQYPINPKAKASIQTVINDLLKQGVLIQQNSIMNTPVYPVPKPDGKWRMVLDYREVNKTIPLIAAQNQHSAGILSSIFRGKYKTTLDLSNGFWAHSITPESYWLTAFTWLGQQYCWTRLPQGFLNSPALFTADVVDLLKEVPNVQVYVDDIYISHDDPREHLEQLEKVFSLLLNAGYVVSLKKSEIAQHEVEFLGFNITKEGRGLTETFKQKLLNITPPRDLKQLQSILGLLNFARNFIPNFSELVKPLYNIIATANGKYITWTTDNSQQLQNIISMLNSAENLEERNPEVRLIMKVNTSPSAGYIRFYNEFAKRPIMYLNYVYTKAEVKFTNTEKLLTTIHKGLIKALDLGMGQEILVYSPIVSMTKIQKTPLPERKALPIRWITWMSYLEDPRIQFHYDKTLPELQQVPTVTDDIIAKIKHPSEFSMVFYTDGSAIKHPNVNKSHNAGMGIAQVQFKPEFTVINTWSIPLGDHTAQLAEVAAVEFACKKALKIDGPVLIVTDSFYVAESVNKELPYWQSNGFFNNKKKPLKHVSKWKSIADCIQLKPDIIIIHEKGHQPTASTFHTEGNNLADKLATQGSYVVNAGKRTADGSEFEKRTADGSEFESPKKKAKVE

SEQ ID NO: 496 - protein, 2176 aa, synthetic construct
MPAAKRVKLDGGDKKYSIGLDIGTNSVGWAVITDEYKVPSKKFKVLGNTDRHSIKKNLIGALLFDSGETAEATRLKRTARRRYTRRKNRICYLQEIFSNEMAKVDDSFFHRLEESFLVEEDKKHERHPIFGNIVDEVAYHEKYPTIYHLRKKLVDSTDKADLRLIYLALAHMIKFRGHFLIEGDLNPDNSDVDKLFIQLVQTYNQLFEENPINASGVDAKAILSARLSKSRRLENLIAQLPGEKKNGLFGNLIALSLGLTPNFKSNFDLAEDAKLQLSKDTYDDDLDNLLAQIGDQYADLFLAAKNLSDAILLSDILRVNTEITKAPLSASMIKRYDEHHQDLTLLKALVRQQLPEKYKEIFFDQSKNGYAGYIDGGASQEEFYKFIKPILEKMDGTEELLVKLNREDLLRKQRTFDNGSIPHQIHLGELHAILRRQEDFYPFLKDNREKIEKILTFRIPYYVGPLARGNSRFAWMTRKSEETITPWNFEEVVDKGASAQSFIERMTNFDKNLPNEKVLPKHSLLYEYFTVYNELTKVKYVTEGMRKPAFLSGEQKKAIVDLLFKTNRKVTVKQLKEDYFKKIECFDSVEISGVEDRFNASLGTYHDLLKIIKDKDFLDNEENEDILEDIVLTLTLFEDREMIEERLKTYAHLFDDKVMKQLKRRRYTGWGRLSRKLINGIRDKQSGKTILDFLKSDGFANRNFMQLIHDDSLTFKEDIQKAQVSGQGDSLHEHIANLAGSPAIKKGILQTVKVVDELVKVMGRHKPENIVIEMARENQTTQKGQKNSRERMKRIEEGIKELGSQILKEHPVENTQLQNEKLYLYYLQNGRDMYVDQELDINRLSDYDVDHIVPQSFLKDDSIDNKVLTRSDKARGKSDNVPSEEVVKKMKNYWRQLLNAKLITQRKFDNLTKAERGGLSELDKAGFIKRQLVETRQITKHVAQILDSRMNTKYDENDKLIREVKVITLKSKLVSDFRKDFQFYKVREINNYHHAHDAYLNAVVGTALIKKYPKLESEFVYGDYKVYDVRKMIAKSEQEIGKATAKYFFYSNIMNFFKTEITLANGEIRKRPLIETNGETGEIVWDKGRDFATVRKVLSMPQVNIVKKTEVQTGGFSKESILPKRNSDKLIARKKDWDPKKYGGFDSPTVAYSVLVVAKVEKGKSKKLKSVKELLGITIMERSSFEKNPIDFLEAKGYKEVKKDLIIKLPKYSLFELENGRKRMLASAGELQKGNELALPSKYVNFLYLASHYEKLKGSPEDNEQKQLFVEQHKHYLDEIIEQISEFSKRVILADANLDKVLSAYNKHRDKPIREQAENIIHLFTLTNLGAPAAFKYFDTTIDRKRYTSTKEVLDATLIHQSITGLYETRIDLSQLGGDGGEAAAKGSSPAPGGMDPLQLLQPLEAEIKGTKLKAHWNSGATITCVPQAFLEEEVPIKNIWIKTIHGEKEQPVYYLTFKIQGRKVEAEVISSPYDYILVSPSDIPWLMKKPLQLTTLVPLQEYEERLLKQTMLTGSYKEKLQSLFLKYDALWQHWENQVGHRRIKPHHIATGTVNPRPQKQYPINPKAKASIQTVINDLLKQGVLIQQNSIMNTPVYPVPKPDGKWRMVLDYREVNKTIPLIAAQNQHSAGILSSIFRGKYKTTLDLSNGFWAHSITPESYWLTAFTWLGQQYCWTRLPQGFLNSPALFTADVVDLLKEVPNVQVYVDDIYISHDDPREHLEQLEKVFSLLLNAGYVVSLKKSEIAQHEVEFLGFNITKEGRGLTETFKQKLLNITPPRDLKQLQSILGLLNFARNFIPNFSELVKPLYNIIATANGKYITWTTDNSQQLQNIISMLNSAENLEERNPEVRLIMKVNTSPSAGYIRFYNEFAKRPIMYLNYVYTKAEVKFTNTEKLLTTIHKGLIKALDLGMGQEILVYSPIVSMTKIQKTPLPERKALPIRWITWMSYLEDPRIQFHYDKTLPELQQVPTVTDDIIAKIKHPSEFSMVFYTDGSAIKHPNVNKSHNAGMGIAQVQFKPEFTVINTWSIPLGDHTAQLAEVAAVEFACKKALKIDGPVLIVTDSFYVAESVNKELPYWQSNGFFNNKKKPLKHVSKWKSIADCIQLKPDIIIIHEKGHQPTASTFHTEGNNLADKLATQGSYVVNAGKRTADGSEFEKRTADGSEFESPKKKAKVE

SEQ ID NO: 497 - protein, 2176 aa, synthetic construct
MPAAKRVKLDGGDKKYSIGLDIGTNSVGWAVITDEYKVPSKKFKVLGNTDRHSIKKNLIGALLFDSGETAEATRLKRTARRRYTRRKNRICYLQEIFSNEMAKVDDSFFHRLEESFLVEEDKKHERHPIFGNIVDEVAYHEKYPTIYHLRKKLVDSTDKADLRLIYLALAHMIKFRGHFLIEGDLNPDNSDVDKLFIQLVQTYNQLFEENPINASGVDAKAILSARLSKSRRLENLIAQLPGEKKNGLFGNLIALSLGLTPNFKSNFDLAEDAKLQLSKDTYDDDLDNLLAQIGDQYADLFLAAKNLSDAILLSDILRVNTEITKAPLSASMIKRYDEHHQDLTLLKALVRQQLPEKYKEIFFDQSKNGYAGYIDGGASQEEFYKFIKPILEKMDGTEELLVKLNREDLLRKQRTFDNGSIPHQIHLGELHAILRRQEDFYPFLKDNREKIEKILTFRIPYYVGPLARGNSRFAWMTRKSEETITPWNFEEVVDKGASAQSFIERMTNFDKNLPNEKVLPKHSLLYEYFTVYNELTKVKYVTEGMRKPAFLSGEQKKAIVDLLFKTNRKVTVKQLKEDYFKKIECFDSVEISGVEDRFNASLGTYHDLLKIIKDKDFLDNEENEDILEDIVLTLTLFEDREMIEERLKTYAHLFDDKVMKQLKRRRYTGWGRLSRKLINGIRDKQSGKTILDFLKSDGFANRNFMQLIHDDSLTFKEDIQKAQVSGQGDSLHEHIANLAGSPAIKKGILQTVKVVDELVKVMGRHKPENIVIEMARENQTTQKGQKNSRERMKRIEEGIKELGSQILKEHPVENTQLQNEKLYLYYLQNGRDMYVDQELDINRLSDYDVDHIVPQSFLKDDSIDNKVLTRSDKARGKSDNVPSEEVVKKMKNYWRQLLNAKLITQRKFDNLTKAERGGLSELDKAGFIKRQLVETRQITKHVAQILDSRMNTKYDENDKLIREVKVITLKSKLVSDFRKDFQFYKVREINNYHHAHDAYLNAVVGTALIKKYPKLESEFVYGDYKVYDVRKMIAKSEQEIGKATAKYFFYSNIMNFFKTEITLANGEIRKRPLIETNGETGEIVWDKGRDFATVRKVLSMPQVNIVKKTEVQTGGFSKESILPKRNSDKLIARKKDWDPKKYGGFDSPTVAYSVLVVAKVEKGKSKKLKSVKELLGITIMERSSFEKNPIDFLEAKGYKEVKKDLIIKLPKYSLFELENGRKRMLASAGELQKGNELALPSKYVNFLYLASHYEKLKGSPEDNEQKQLFVEQHKHYLDEIIEQISEFSKRVILADANLDKVLSAYNKHRDKPIREQAENIIHLFTLTNLGAPAAFKYFDTTIDRKRYTSTKEVLDATLIHQSITGLYETRIDLSQLGGDGGPAPGGGEAAAKGGMDPLQLLQPLEAEIKGTKLKAHWNSGATITCVPQAFLEEEVPIKNIWIKTIHGEKEQPVYYLTFKIQGRKVEAEVISSPYDYILVSPSDIPWLMKKPLQLTTLVPLQEYEERLLKQTMLTGSYKEKLQSLFLKYDALWQHWENQVGHRRIKPHHIATGTVNPRPQKQYPINPKAKASIQTVINDLLKQGVLIQQNSIMNTPVYPVPKPDGKWRMVLDYREVNKTIPLIAAQNQHSAGILSSIFRGKYKTTLDLSNGFWAHSITPESYWLTAFTWLGQQYCWTRLPQGFLNSPALFTADVVDLLKEVPNVQVYVDDIYISHDDPREHLEQLEKVFSLLLNAGYVVSLKKSEIAQHEVEFLGFNITKEGRGLTETFKQKLLNITPPRDLKQLQSILGLLNFARNFIPNFSELVKPLYNIIATANGKYITWTTDNSQQLQNIISMLNSAENLEERNPEVRLIMKVNTSPSAGYIRFYNEFAKRPIMYLNYVYTKAEVKFTNTEKLLTTIHKGLIKALDLGMGQEILVYSPIVSMTKIQKTPLPERKALPIRWITWMSYLEDPRIQFHYDKTLPELQQVPTVTDDIIAKIKHPSEFSMVFYTDGSAIKHPNVNKSHNAGMGIAQVQFKPEFTVINTWSIPLGDHTAQLAEVAAVEFACKKALKIDGPVLIVTDSFYVAESVNKELPYWQSNGFFNNKKKPLKHVSKWKSIADCIQLKPDIIIIHEKGHQPTASTFHTEGNNLADKLATQGSYVVNAGKRTADGSEFEKRTADGSEFESPKKKAKVE

SEQ ID NO: 498 - protein, 2180 aa, synthetic construct
MPAAKRVKLDGGDKKYSIGLDIGTNSVGWAVITDEYKVPSKKFKVLGNTDRHSIKKNLIGALLFDSGETAEATRLKRTARRRYTRRKNRICYLQEIFSNEMAKVDDSFFHRLEESFLVEEDKKHERHPIFGNIVDEVAYHEKYPTIYHLRKKLVDSTDKADLRLIYLALAHMIKFRGHFLIEGDLNPDNSDVDKLFIQLVQTYNQLFEENPINASGVDAKAILSARLSKSRRLENLIAQLPGEKKNGLFGNLIALSLGLTPNFKSNFDLAEDAKLQLSKDTYDDDLDNLLAQIGDQYADLFLAAKNLSDAILLSDILRVNTEITKAPLSASMIKRYDEHHQDLTLLKALVRQQLPEKYKEIFFDQSKNGYAGYIDGGASQEEFYKFIKPILEKMDGTEELLVKLNREDLLRKQRTFDNGSIPHQIHLGELHAILRRQEDFYPFLKDNREKIEKILTFRIPYYVGPLARGNSRFAWMTRKSEETITPWNFEEVVDKGASAQSFIERMTNFDKNLPNEKVLPKHSLLYEYFTVYNELTKVKYVTEGMRKPAFLSGEQKKAIVDLLFKTNRKVTVKQLKEDYFKKIECFDSVEISGVEDRFNASLGTYHDLLKIIKDKDFLDNEENEDILEDIVLTLTLFEDREMIEERLKTYAHLFDDKVMKQLKRRRYTGWGRLSRKLINGIRDKQSGKTILDFLKSDGFANRNFMQLIHDDSLTFKEDIQKAQVSGQGDSLHEHIANLAGSPAIKKGILQTVKVVDELVKVMGRHKPENIVIEMARENQTTQKGQKNSRERMKRIEEGIKELGSQILKEHPVENTQLQNEKLYLYYLQNGRDMYVDQELDINRLSDYDVDHIVPQSFLKDDSIDNKVLTRSDKARGKSDNVPSEEVVKKMKNYWRQLLNAKLITQRKFDNLTKAERGGLSELDKAGFIKRQLVETRQITKHVAQILDSRMNTKYDENDKLIREVKVITLKSKLVSDFRKDFQFYKVREINNYHHAHDAYLNAVVGTALIKKYPKLESEFVYGDYKVYDVRKMIAKSEQEIGKATAKYFFYSNIMNFFKTEITLANGEIRKRPLIETNGETGEIVWDKGRDFATVRKVLSMPQVNIVKKTEVQTGGFSKESILPKRNSDKLIARKKDWDPKKYGGFDSPTVAYSVLVVAKVEKGKSKKLKSVKELLGITIMERSSFEKNPIDFLEAKGYKEVKKDLIIKLPKYSLFELENGRKRMLASAGELQKGNELALPSKYVNFLYLASHYEKLKGSPEDNEQKQLFVEQHKHYLDEIIEQISEFSKRVILADANLDKVLSAYNKHRDKPIREQAENIIHLFTLTNLGAPAAFKYFDTTIDRKRYTSTKEVLDATLIHQSITGLYETRIDLSQLGGDGGEAAAKEAAAKEAAAKGGMDPLQLLQPLEAEIKGTKLKAHWNSGATITCVPQAFLEEEVPIKNIWIKTIHGEKEQPVYYLTFKIQGRKVEAEVISSPYDYILVSPSDIPWLMKKPLQLTTLVPLQEYEERLLKQTMLTGSYKEKLQSLFLKYDALWQHWENQVGHRRIKPHHIATGTVNPRPQKQYPINPKAKASIQTVINDLLKQGVLIQQNSIMNTPVYPVPKPDGKWRMVLDYREVNKTIPLIAAQNQHSAGILSSIFRGKYKTTLDLSNGFWAHSITPESYWLTAFTWLGQQYCWTRLPQGFLNSPALFTADVVDLLKEVPNVQVYVDDIYISHDDPREHLEQLEKVFSLLLNAGYVVSLKKSEIAQHEVEFLGFNITKEGRGLTETFKQKLLNITPPRDLKQLQSILGLLNFARNFIPNFSELVKPLYNIIATANGKYITWTTDNSQQLQNIISMLNSAENLEERNPEVRLIMKVNTSPSAGYIRFYNEFAKRPIMYLNYVYTKAEVKFTNTEKLLTTIHKGLIKALDLGMGQEILVYSPIVSMTKIQKTPLPERKALPIRWITWMSYLEDPRIQFHYDKTLPELQQVPTVTDDIIAKIKHPSEFSMVFYTDGSAIKHPNVNKSHNAGMGIAQVQFKPEFTVINTWSIPLGDHTAQLAEVAAVEFACKKALKIDGPVLIVTDSFYVAESVNKELPYWQSNGFFNNKKKPLKHVSKWKSIADCIQLKPDIIIIHEKGHQPTASTFHTEGNNLADKLATQGSYVVNAGKRTADGSEFEKRTADGSEFESPKKKAKVE

SEQ ID NO: 499 - protein, 2176 aa, synthetic construct
MPAAKRVKLDGGDKKYSIGLDIGTNSVGWAVITDEYKVPSKKFKVLGNTDRHSIKKNLIGALLFDSGETAEATRLKRTARRRYTRRKNRICYLQEIFSNEMAKVDDSFFHRLEESFLVEEDKKHERHPIFGNIVDEVAYHEKYPTIYHLRKKLVDSTDKADLRLIYLALAHMIKFRGHFLIEGDLNPDNSDVDKLFIQLVQTYNQLFEENPINASGVDAKAILSARLSKSRRLENLIAQLPGEKKNGLFGNLIALSLGLTPNFKSNFDLAEDAKLQLSKDTYDDDLDNLLAQIGDQYADLFLAAKNLSDAILLSDILRVNTEITKAPLSASMIKRYDEHHQDLTLLKALVRQQLPEKYKEIFFDQSKNGYAGYIDGGASQEEFYKFIKPILEKMDGTEELLVKLNREDLLRKQRTFDNGSIPHQIHLGELHAILRRQEDFYPFLKDNREKIEKILTFRIPYYVGPLARGNSRFAWMTRKSEETITPWNFEEVVDKGASAQSFIERMTNFDKNLPNEKVLPKHSLLYEYFTVYNELTKVKYVTEGMRKPAFLSGEQKKAIVDLLFKTNRKVTVKQLKEDYFKKIECFDSVEISGVEDRFNASLGTYHDLLKIIKDKDFLDNEENEDILEDIVLTLTLFEDREMIEERLKTYAHLFDDKVMKQLKRRRYTGWGRLSRKLINGIRDKQSGKTILDFLKSDGFANRNFMQLIHDDSLTFKEDIQKAQVSGQGDSLHEHIANLAGSPAIKKGILQTVKVVDELVKVMGRHKPENIVIEMARENQTTQKGQKNSRERMKRIEEGIKELGSQILKEHPVENTQLQNEKLYLYYLQNGRDMYVDQELDINRLSDYDVDHIVPQSFLKDDSIDNKVLTRSDKARGKSDNVPSEEVVKKMKNYWRQLLNAKLITQRKFDNLTKAERGGLSELDKAGFIKRQLVETRQITKHVAQILDSRMNTKYDENDKLIREVKVITLKSKLVSDFRKDFQFYKVREINNYHHAHDAYLNAVVGTALIKKYPKLESEFVYGDYKVYDVRKMIAKSEQEIGKATAKYFFYSNIMNFFKTEITLANGEIRKRPLIETNGETGEIVWDKGRDFATVRKVLSMPQVNIVKKTEVQTGGFSKESILPKRNSDKLIARKKDWDPKKYGGFDSPTVAYSVLVVAKVEKGKSKKLKSVKELLGITIMERSSFEKNPIDFLEAKGYKEVKKDLIIKLPKYSLFELENGRKRMLASAGELQKGNELALPSKYVNFLYLASHYEKLKGSPEDNEQKQLFVEQHKHYLDEIIEQISEFSKRVILADANLDKVLSAYNKHRDKPIREQAENIIHLFTLTNLGAPAAFKYFDTTIDRKRYTSTKEVLDATLIHQSITGLYETRIDLSQLGGDGGEAAAKPAPGGSGGMDPLQLLQPLEAEIKGTKLKAHWNSGATITCVPQAFLEEEVPIKNIWIKTIHGEKEQPVYYLTFKIQGRKVEAEVISSPYDYILVSPSDIPWLMKKPLQLTTLVPLQEYEERLLKQTMLTGSYKEKLQSLFLKYDALWQHWENQVGHRRIKPHHIATGTVNPRPQKQYPINPKAKASIQTVINDLLKQGVLIQQNSIMNTPVYPVPKPDGKWRMVLDYREVNKTIPLIAAQNQHSAGILSSIFRGKYKTTLDLSNGFWAHSITPESYWLTAFTWLGQQYCWTRLPQGFLNSPALFTADVVDLLKEVPNVQVYVDDIYISHDDPREHLEQLEKVFSLLLNAGYVVSLKKSEIAQHEVEFLGFNITKEGRGLTETFKQKLLNITPPRDLKQLQSILGLLNFARNFIPNFSELVKPLYNIIATANGKYITWTTDNSQQLQNIISMLNSAENLEERNPEVRLIMKVNTSPSAGYIRFYNEFAKRPIMYLNYVYTKAEVKFTNTEKLLTTIHKGLIKALDLGMGQEILVYSPIVSMTKIQKTPLPERKALPIRWITWMSYLEDPRIQFHYDKTLPELQQVPTVTDDIIAKIKHPSEFSMVFYTDGSAIKHPNVNKSHNAGMGIAQVQFKPEFTVINTWSIPLGDHTAQLAEVAAVEFACKKALKIDGPVLIVTDSFYVAESVNKELPYWQSNGFFNNKKKPLKHVSKWKSIADCIQLKPDIIIIHEKGHQPTASTFHTEGNNLADKLATQGSYVVNAGKRTADGSEFEKRTADGSEFESPKKKAKVE

SEQ ID NO: 500 - protein, 2178 aa, synthetic construct
MPAAKRVKLDGGDKKYSIGLDIGTNSVGWAVITDEYKVPSKKFKVLGNTDRHSIKKNLIGALLFDSGETAEATRLKRTARRRYTRRKNRICYLQEIFSNEMAKVDDSFFHRLEESFLVEEDKKHERHPIFGNIVDEVAYHEKYPTIYHLRKKLVDSTDKADLRLIYLALAHMIKFRGHFLIEGDLNPDNSDVDKLFIQLVQTYNQLFEENPINASGVDAKAILSARLSKSRRLENLIAQLPGEKKNGLFGNLIALSLGLTPNFKSNFDLAEDAKLQLSKDTYDDDLDNLLAQIGDQYADLFLAAKNLSDAILLSDILRVNTEITKAPLSASMIKRYDEHHQDLTLLKALVRQQLPEKYKEIFFDQSKNGYAGYIDGGASQEEFYKFIKPILEKMDGTEELLVKLNREDLLRKQRTFDNGSIPHQIHLGELHAILRRQEDFYPFLKDNREKIEKILTFRIPYYVGPLARGNSRFAWMTRKSEETITPWNFEEVVDKGASAQSFIERMTNFDKNLPNEKVLPKHSLLYEYFTVYNELTKVKYVTEGMRKPAFLSGEQKKAIVDLLFKTNRKVTVKQLKEDYFKKIECFDSVEISGVEDRFNASLGTYHDLLKIIKDKDFLDNEENEDILEDIVLTLTLFEDREMIEERLKTYAHLFDDKVMKQLKRRRYTGWGRLSRKLINGIRDKQSGKTILDFLKSDGFANRNFMQLIHDDSLTFKEDIQKAQVSGQGDSLHEHIANLAGSPAIKKGILQTVKVVDELVKVMGRHKPENIVIEMARENQTTQKGQKNSRERMKRIEEGIKELGSQILKEHPVENTQLQNEKLYLYYLQNGRDMYVDQELDINRLSDYDVDHIVPQSFLKDDSIDNKVLTRSDKARGKSDNVPSEEVVKKMKNYWRQLLNAKLITQRKFDNLTKAERGGLSELDKAGFIKRQLVETRQITKHVAQILDSRMNTKYDENDKLIREVKVITLKSKLVSDFRKDFQFYKVREINNYHHAHDAYLNAVVGTALIKKYPKLESEFVYGDYKVYDVRKMIAKSEQEIGKATAKYFFYSNIMNFFKTEITLANGEIRKRPLIETNGETGEIVWDKGRDFATVRKVLSMPQVNIVKKTEVQTGGFSKESILPKRNSDKLIARKKDWDPKKYGGFDSPTVAYSVLVVAKVEKGKSKKLKSVKELLGITIMERSSFEKNPIDFLEAKGYKEVKKDLIIKLPKYSLFELENGRKRMLASAGELQKGNELALPSKYVNFLYLASHYEKLKGSPEDNEQKQLFVEQHKHYLDEIIEQISEFSKRVILADANLDKVLSAYNKHRDKPIREQAENIIHLFTLTNLGAPAAFKYFDTTIDRKRYTSTKEVLDATLIHQSITGLYETRIDLSQLGGDGGPAPAPAPAPAPAPGGMDPLQLLQPLEAEIKGTKLKAHWNSGATITCVPQAFLEEEVPIKNIWIKTIHGEKEQPVYYLTFKIQGRKVEAEVISSPYDYILVSPSDIPWLMKKPLQLTTLVPLQEYEERLLKQTMLTGSYKEKLQSLFLKYDALWQHWENQVGHRRIKPHHIATGTVNPRPQKQYPINPKAKASIQTVINDLLKQGVLIQQNSIMNTPVYPVPKPDGKWRMVLDYREVNKTIPLIAAQNQHSAGILSSIFRGKYKTTLDLSNGFWAHSITPESYWLTAFTWLGQQYCWTRLPQGFLNSPALFTADVVDLLKEVPNVQVYVDDIYISHDDPREHLEQLEKVFSLLLNAGYVVSLKKSEIAQHEVEFLGFNITKEGRGLTETFKQKLLNITPPRDLKQLQSILGLLNFARNFIPNFSELVKPLYNIIATANGKYITWTTDNSQQLQNIISMLNSAENLEERNPEVRLIMKVNTSPSAGYIRFYNEFAKRPIMYLNYVYTKAEVKFTNTEKLLTTIHKGLIKALDLGMGQEILVYSPIVSMTKIQKTPLPERKALPIRWITWMSYLEDPRIQFHYDKTLPELQQVPTVTDDIIAKIKHPSEFSMVFYTDGSAIKHPNVNKSHNAGMGIAQVQFKPEFTVINTWSIPLGDHTAQLAEVAAVEFACKKALKIDGPVLIVTDSFYVAESVNKELPYWQSNGFFNNKKKPLKHVSKWKSIADCIQLKPDIIIIHEKGHQPTASTFHTEGNNLADKLATQGSYVVNAGKRTADGSEFEKRTADGSEFESPKKKAKVE

SEQ ID NO: 501 - protein, 2176 aa, synthetic construct
MPAAKRVKLDGGDKKYSIGLDIGTNSVGWAVITDEYKVPSKKFKVLGNTDRHSIKKNLIGALLFDSGETAEATRLKRTARRRYTRRKNRICYLQEIFSNEMAKVDDSFFHRLEESFLVEEDKKHERHPIFGNIVDEVAYHEKYPTIYHLRKKLVDSTDKADLRLIYLALAHMIKFRGHFLIEGDLNPDNSDVDKLFIQLVQTYNQLFEENPINASGVDAKAILSARLSKSRRLENLIAQLPGEKKNGLFGNLIALSLGLTPNFKSNFDLAEDAKLQLSKDTYDDDLDNLLAQIGDQYADLFLAAKNLSDAILLSDILRVNTEITKAPLSASMIKRYDEHHQDLTLLKALVRQQLPEKYKEIFFDQSKNGYAGYIDGGASQEEFYKFIKPILEKMDGTEELLVKLNREDLLRKQRTFDNGSIPHQIHLGELHAILRRQEDFYPFLKDNREKIEKILTFRIPYYVGPLARGNSRFAWMTRKSEETITPWNFEEVVDKGASAQSFIERMTNFDKNLPNEKVLPKHSLLYEYFTVYNELTKVKYVTEGMRKPAFLSGEQKKAIVDLLFKTNRKVTVKQLKEDYFKKIECFDSVEISGVEDRFNASLGTYHDLLKIIKDKDFLDNEENEDILEDIVLTLTLFEDREMIEERLKTYAHLFDDKVMKQLKRRRYTGWGRLSRKLINGIRDKQSGKTILDFLKSDGFANRNFMQLIHDDSLTFKEDIQKAQVSGQGDSLHEHIANLAGSPAIKKGILQTVKVVDELVKVMGRHKPENIVIEMARENQTTQKGQKNSRERMKRIEEGIKELGSQILKEHPVENTQLQNEKLYLYYLQNGRDMYVDQELDINRLSDYDVDHIVPQSFLKDDSIDNKVLTRSDKARGKSDNVPSEEVVKKMKNYWRQLLNAKLITQRKFDNLTKAERGGLSELDKAGFIKRQLVETRQITKHVAQILDSRMNTKYDENDKLIREVKVITLKSKLVSDFRKDFQFYKVREINNYHHAHDAYLNAVVGTALIKKYPKLESEFVYGDYKVYDVRKMIAKSEQEIGKATAKYFFYSNIMNFFKTEITLANGEIRKRPLIETNGETGEIVWDKGRDFATVRKVLSMPQVNIVKKTEVQTGGFSKESILPKRNSDKLIARKKDWDPKKYGGFDSPTVAYSVLVVAKVEKGKSKKLKSVKELLGITIMERSSFEKNPIDFLEAKGYKEVKKDLIIKLPKYSLFELENGRKRMLASAGELQKGNELALPSKYVNFLYLASHYEKLKGSPEDNEQKQLFVEQHKHYLDEIIEQISEFSKRVILADANLDKVLSAYNKHRDKPIREQAENIIHLFTLTNLGAPAAFKYFDTTIDRKRYTSTKEVLDATLIHQSITGLYETRIDLSQLGGDGGGGGEAAAKGGSGGMDPLQLLQPLEAEIKGTKLKAHWNSGATITCVPQAFLEEEVPIKNIWIKTIHGEKEQPVYYLTFKIQGRKVEAEVISSPYDYILVSPSDIPWLMKKPLQLTTLVPLQEYEERLLKQTMLTGSYKEKLQSLFLKYDALWQHWENQVGHRRIKPHHIATGTVNPRPQKQYPINPKAKASIQTVINDLLKQGVLIQQNSIMNTPVYPVPKPDGKWRMVLDYREVNKTIPLIAAQNQHSAGILSSIFRGKYKTTLDLSNGFWAHSITPESYWLTAFTWLGQQYCWTRLPQGFLNSPALFTADVVDLLKEVPNVQVYVDDIYISHDDPREHLEQLEKVFSLLLNAGYVVSLKKSEIAQHEVEFLGFNITKEGRGLTETFKQKLLNITPPRDLKQLQSILGLLNFARNFIPNFSELVKPLYNIIATANGKYITWTTDNSQQLQNIISMLNSAENLEERNPEVRLIMKVNTSPSAGYIRFYNEFAKRPIMYLNYVYTKAEVKFTNTEKLLTTIHKGLIKALDLGMGQEILVYSPIVSMTKIQKTPLPERKALPIRWITWMSYLEDPRIQFHYDKTLPELQQVPTVTDDIIAKIKHPSEFSMVFYTDGSAIKHPNVNKSHNAGMGIAQVQFKPEFTVINTWSIPLGDHTAQLAEVAAVEFACKKALKIDGPVLIVTDSFYVAESVNKELPYWQSNGFFNNKKKPLKHVSKWKSIADCIQLKPDIIIIHEKGHQPTASTFHTEGNNLADKLATQGSYVVNAGKRTADGSEFEKRTADGSEFESPKKKAKVE

SEQ ID NO: 502 - protein, 2176 aa, synthetic construct
MPAAKRVKLDGGDKKYSIGLDIGTNSVGWAVITDEYKVPSKKFKVLGNTDRHSIKKNLIGALLFDSGETAEATRLKRTARRRYTRRKNRICYLQEIFSNEMAKVDDSFFHRLEESFLVEEDKKHERHPIFGNIVDEVAYHEKYPTIYHLRKKLVDSTDKADLRLIYLALAHMIKFRGHFLIEGDLNPDNSDVDKLFIQLVQTYNQLFEENPINASGVDAKAILSARLSKSRRLENLIAQLPGEKKNGLFGNLIALSLGLTPNFKSNFDLAEDAKLQLSKDTYDDDLDNLLAQIGDQYADLFLAAKNLSDAILLSDILRVNTEITKAPLSASMIKRYDEHHQDLTLLKALVRQQLPEKYKEIFFDQSKNGYAGYIDGGASQEEFYKFIKPILEKMDGTEELLVKLNREDLLRKQRTFDNGSIPHQIHLGELHAILRRQEDFYPFLKDNREKIEKILTFRIPYYVGPLARGNSRFAWMTRKSEETITPWNFEEVVDKGASAQSFIERMTNFDKNLPNEKVLPKHSLLYEYFTVYNELTKVKYVTEGMRKPAFLSGEQKKAIVDLLFKTNRKVTVKQLKEDYFKKIECFDSVEISGVEDRFNASLGTYHDLLKIIKDKDFLDNEENEDILEDIVLTLTLFEDREMIEERLKTYAHLFDDKVMKQLKRRRYTGWGRLSRKLINGIRDKQSGKTILDFLKSDGFANRNFMQLIHDDSLTFKEDIQKAQVSGQGDSLHEHIANLAGSPAIKKGILQTVKVVDELVKVMGRHKPENIVIEMARENQTTQKGQKNSRERMKRIEEGIKELGSQILKEHPVENTQLQNEKLYLYYLQNGRDMYVDQELDINRLSDYDVDHIVPQSFLKDDSIDNKVLTRSDKARGKSDNVPSEEVVKKMKNYWRQLLNAKLITQRKFDNLTKAERGGLSELDKAGFIKRQLVETRQITKHVAQILDSRMNTKYDENDKLIREVKVITLKSKLVSDFRKDFQFYKVREINNYHHAHDAYLNAVVGTALIKKYPKLESEFVYGDYKVYDVRKMIAKSEQEIGKATAKYFFYSNIMNFFKTEITLANGEIRKRPLIETNGETGEIVWDKGRDFATVRKVLSMPQVNIVKKTEVQTGGFSKESILPKRNSDKLIARKKDWDPKKYGGFDSPTVAYSVLVVAKVEKGKSKKLKSVKELLGITIMERSSFEKNPIDFLEAKGYKEVKKDLIIKLPKYSLFELENGRKRMLASAGELQKGNELALPSKYVNFLYLASHYEKLKGSPEDNEQKQLFVEQHKHYLDEIIEQISEFSKRVILADANLDKVLSAYNKHRDKPIREQAENIIHLFTLTNLGAPAAFKYFDTTIDRKRYTSTKEVLDATLIHQSITGLYETRIDLSQLGGDGGGGSPAPEAAAKGGMDPLQLLQPLEAEIKGTKLKAHWNSGATITCVPQAFLEEEVPIKNIWIKTIHGEKEQPVYYLTFKIQGRKVEAEVISSPYDYILVSPSDIPWLMKKPLQLTTLVPLQEYEERLLKQTMLTGSYKEKLQSLFLKYDALWQHWENQVGHRRIKPHHIATGTVNPRPQKQYPINPKAKASIQTVINDLLKQGVLIQQNSIMNTPVYPVPKPDGKWRMVLDYREVNKTIPLIAAQNQHSAGILSSIFRGKYKTTLDLSNGFWAHSITPESYWLTAFTWLGQQYCWTRLPQGFLNSPALFTADVVDLLKEVPNVQVYVDDIYISHDDPREHLEQLEKVFSLLLNAGYVVSLKKSEIAQHEVEFLGFNITKEGRGLTETFKQKLLNITPPRDLKQLQSILGLLNFARNFIPNFSELVKPLYNIIATANGKYITWTTDNSQQLQNIISMLNSAENLEERNPEVRLIMKVNTSPSAGYIRFYNEFAKRPIMYLNYVYTKAEVKFTNTEKLLTTIHKGLIKALDLGMGQEILVYSPIVSMTKIQKTPLPERKALPIRWITWMSYLEDPRIQFHYDKTLPELQQVPTVTDDIIAKIKHPSEFSMVFYTDGSAIKHPNVNKSHNAGMGIAQVQFKPEFTVINTWSIPLGDHTAQLAEVAAVEFACKKALKIDGPVLIVTDSFYVAESVNKELPYWQSNGFFNNKKKPLKHVSKWKSIADCIQLKPDIIIIHEKGHQPTASTFHTEGNNLADKLATQGSYVVNAGKRTADGSEFEKRTADGSEFESPKKKAKVE

SEQ ID NO: 503 - protein, 2174 aa, synthetic construct
MPAAKRVKLDGGDKKYSIGLDIGTNSVGWAVITDEYKVPSKKFKVLGNTDRHSIKKNLIGALLFDSGETAEATRLKRTARRRYTRRKNRICYLQEIFSNEMAKVDDSFFHRLEESFLVEEDKKHERHPIFGNIVDEVAYHEKYPTIYHLRKKLVDSTDKADLRLIYLALAHMIKFRGHFLIEGDLNPDNSDVDKLFIQLVQTYNQLFEENPINASGVDAKAILSARLSKSRRLENLIAQLPGEKKNGLFGNLIALSLGLTPNFKSNFDLAEDAKLQLSKDTYDDDLDNLLAQIGDQYADLFLAAKNLSDAILLSDILRVNTEITKAPLSASMIKRYDEHHQDLTLLKALVRQQLPEKYKEIFFDQSKNGYAGYIDGGASQEEFYKFIKPILEKMDGTEELLVKLNREDLLRKQRTFDNGSIPHQIHLGELHAILRRQEDFYPFLKDNREKIEKILTFRIPYYVGPLARGNSRFAWMTRKSEETITPWNFEEVVDKGASAQSFIERMTNFDKNLPNEKVLPKHSLLYEYFTVYNELTKVKYVTEGMRKPAFLSGEQKKAIVDLLFKTNRKVTVKQLKEDYFKKIECFDSVEISGVEDRFNASLGTYHDLLKIIKDKDFLDNEENEDILEDIVLTLTLFEDREMIEERLKTYAHLFDDKVMKQLKRRRYTGWGRLSRKLINGIRDKQSGKTILDFLKSDGFANRNFMQLIHDDSLTFKEDIQKAQVSGQGDSLHEHIANLAGSPAIKKGILQTVKVVDELVKVMGRHKPENIVIEMARENQTTQKGQKNSRERMKRIEEGIKELGSQILKEHPVENTQLQNEKLYLYYLQNGRDMYVDQELDINRLSDYDVDHIVPQSFLKDDSIDNKVLTRSDKARGKSDNVPSEEVVKKMKNYWRQLLNAKLITQRKFDNLTKAERGGLSELDKAGFIKRQLVETRQITKHVAQILDSRMNTKYDENDKLIREVKVITLKSKLVSDFRKDFQFYKVREINNYHHAHDAYLNAVVGTALIKKYPKLESEFVYGDYKVYDVRKMIAKSEQEIGKATAKYFFYSNIMNFFKTEITLANGEIRKRPLIETNGETGEIVWDKGRDFATVRKVLSMPQVNIVKKTEVQTGGFSKESILPKRNSDKLIARKKDWDPKKYGGFDSPTVAYSVLVVAKVEKGKSKKLKSVKELLGITIMERSSFEKNPIDFLEAKGYKEVKKDLIIKLPKYSLFELENGRKRMLASAGELQKGNELALPSKYVNFLYLASHYEKLKGSPEDNEQKQLFVEQHKHYLDEIIEQISEFSKRVILADANLDKVLSAYNKHRDKPIREQAENIIHLFTLTNLGAPAAFKYFDTTIDRKRYTSTKEVLDATLIHQSITGLYETRIDLSQLGGDGGPAPAPAPAPGGMDPLQLLQPLEAEIKGTKLKAHWNSGATITCVPQAFLEEEVPIKNIWIKTIHGEKEQPVYYLTFKIQGRKVEAEVISSPYDYILVSPSDIPWLMKKPLQLTTLVPLQEYEERLLKQTMLTGSYKEKLQSLFLKYDALWQHWENQVGHRRIKPHHIATGTVNPRPQKQYPINPKAKASIQTVINDLLKQGVLIQQNSIMNTPVYPVPKPDGKWRMVLDYREVNKTIPLIAAQNQHSAGILSSIFRGKYKTTLDLSNGFWAHSITPESYWLTAFTWLGQQYCWTRLPQGFLNSPALFTADVVDLLKEVPNVQVYVDDIYISHDDPREHLEQLEKVFSLLLNAGYVVSLKKSEIAQHEVEFLGFNITKEGRGLTETFKQKLLNITPPRDLKQLQSILGLLNFARNFIPNFSELVKPLYNIIATANGKYITWTTDNSQQLQNIISMLNSAENLEERNPEVRLIMKVNTSPSAGYIRFYNEFAKRPIMYLNYVYTKAEVKFTNTEKLLTTIHKGLIKALDLGMGQEILVYSPIVSMTKIQKTPLPERKALPIRWITWMSYLEDPRIQFHYDKTLPELQQVPTVTDDIIAKIKHPSEFSMVFYTDGSAIKHPNVNKSHNAGMGIAQVQFKPEFTVINTWSIPLGDHTAQLAEVAAVEFACKKALKIDGPVLIVTDSFYVAESVNKELPYWQSNGFFNNKKKPLKHVSKWKSIADCIQLKPDIIIIHEKGHQPTASTFHTEGNNLADKLATQGSYVVNAGKRTADGSEFEKRTADGSEFESPKKKAKVE

SEQ ID NO: 504 - protein, 2176 aa, synthetic construct
MPAAKRVKLDGGDKKYSIGLDIGTNSVGWAVITDEYKVPSKKFKVLGNTDRHSIKKNLIGALLFDSGETAEATRLKRTARRRYTRRKNRICYLQEIFSNEMAKVDDSFFHRLEESFLVEEDKKHERHPIFGNIVDEVAYHEKYPTIYHLRKKLVDSTDKADLRLIYLALAHMIKFRGHFLIEGDLNPDNSDVDKLFIQLVQTYNQLFEENPINASGVDAKAILSARLSKSRRLENLIAQLPGEKKNGLFGNLIALSLGLTPNFKSNFDLAEDAKLQLSKDTYDDDLDNLLAQIGDQYADLFLAAKNLSDAILLSDILRVNTEITKAPLSASMIKRYDEHHQDLTLLKALVRQQLPEKYKEIFFDQSKNGYAGYIDGGASQEEFYKFIKPILEKMDGTEELLVKLNREDLLRKQRTFDNGSIPHQIHLGELHAILRRQEDFYPFLKDNREKIEKILTFRIPYYVGPLARGNSRFAWMTRKSEETITPWNFEEVVDKGASAQSFIERMTNFDKNLPNEKVLPKHSLLYEYFTVYNELTKVKYVTEGMRKPAFLSGEQKKAIVDLLFKTNRKVTVKQLKEDYFKKIECFDSVEISGVEDRFNASLGTYHDLLKIIKDKDFLDNEENEDILEDIVLTLTLFEDREMIEERLKTYAHLFDDKVMKQLKRRRYTGWGRLSRKLINGIRDKQSGKTILDFLKSDGFANRNFMQLIHDDSLTFKEDIQKAQVSGQGDSLHEHIANLAGSPAIKKGILQTVKVVDELVKVMGRHKPENIVIEMARENQTTQKGQKNSRERMKRIEEGIKELGSQILKEHPVENTQLQNEKLYLYYLQNGRDMYVDQELDINRLSDYDVDHIVPQSFLKDDSIDNKVLTRSDKARGKSDNVPSEEVVKKMKNYWRQLLNAKLITQRKFDNLTKAERGGLSELDKAGFIKRQLVETRQITKHVAQILDSRMNTKYDENDKLIREVKVITLKSKLVSDFRKDFQFYKVREINNYHHAHDAYLNAVVGTALIKKYPKLESEFVYGDYKVYDVRKMIAKSEQEIGKATAKYFFYSNIMNFFKTEITLANGEIRKRPLIETNGETGEIVWDKGRDFATVRKVLSMPQVNIVKKTEVQTGGFSKESILPKRNSDKLIARKKDWDPKKYGGFDSPTVAYSVLVVAKVEKGKSKKLKSVKELLGITIMERSSFEKNPIDFLEAKGYKEVKKDLIIKLPKYSLFELENGRKRMLASAGELQKGNELALPSKYVNFLYLASHYEKLKGSPEDNEQKQLFVEQHKHYLDEIIEQISEFSKRVILADANLDKVLSAYNKHRDKPIREQAENIIHLFTLTNLGAPAAFKYFDTTIDRKRYTSTKEVLDATLIHQSITGLYETRIDLSQLGGDGGGGGEAAAKGSSGGMDPLQLLQPLEAEIKGTKLKAHWNSGATITCVPQAFLEEEVPIKNIWIKTIHGEKEQPVYYLTFKIQGRKVEAEVISSPYDYILVSPSDIPWLMKKPLQLTTLVPLQEYEERLLKQTMLTGSYKEKLQSLFLKYDALWQHWENQVGHRRIKPHHIATGTVNPRPQKQYPINPKAKASIQTVINDLLKQGVLIQQNSIMNTPVYPVPKPDGKWRMVLDYREVNKTIPLIAAQNQHSAGILSSIFRGKYKTTLDLSNGFWAHSITPESYWLTAFTWLGQQYCWTRLPQGFLNSPALFTADVVDLLKEVPNVQVYVDDIYISHDDPREHLEQLEKVFSLLLNAGYVVSLKKSEIAQHEVEFLGFNITKEGRGLTETFKQKLLNITPPRDLKQLQSILGLLNFARNFIPNFSELVKPLYNIIATANGKYITWTTDNSQQLQNIISMLNSAENLEERNPEVRLIMKVNTSPSAGYIRFYNEFAKRPIMYLNYVYTKAEVKFTNTEKLLTTIHKGLIKALDLGMGQEILVYSPIVSMTKIQKTPLPERKALPIRWITWMSYLEDPRIQFHYDKTLPELQQVPTVTDDIIAKIKHPSEFSMVFYTDGSAIKHPNVNKSHNAGMGIAQVQFKPEFTVINTWSIPLGDHTAQLAEVAAVEFACKKALKIDGPVLIVTDSFYVAESVNKELPYWQSNGFFNNKKKPLKHVSKWKSIADCIQLKPDIIIIHEKGHQPTASTFHTEGNNLADKLATQGSYVVNAGKRTADGSEFEKRTADGSEFESPKKKAKVE

SEQ ID NO: 505 - protein, 2176 aa, synthetic construct
MPAAKRVKLDGGDKKYSIGLDIGTNSVGWAVITDEYKVPSKKFKVLGNTDRHSIKKNLIGALLFDSGETAEATRLKRTARRRYTRRKNRICYLQEIFSNEMAKVDDSFFHRLEESFLVEEDKKHERHPIFGNIVDEVAYHEKYPTIYHLRKKLVDSTDKADLRLIYLALAHMIKFRGHFLIEGDLNPDNSDVDKLFIQLVQTYNQLFEENPINASGVDAKAILSARLSKSRRLENLIAQLPGEKKNGLFGNLIALSLGLTPNFKSNFDLAEDAKLQLSKDTYDDDLDNLLAQIGDQYADLFLAAKNLSDAILLSDILRVNTEITKAPLSASMIKRYDEHHQDLTLLKALVRQQLPEKYKEIFFDQSKNGYAGYIDGGASQEEFYKFIKPILEKMDGTEELLVKLNREDLLRKQRTFDNGSIPHQIHLGELHAILRRQEDFYPFLKDNREKIEKILTFRIPYYVGPLARGNSRFAWMTRKSEETITPWNFEEVVDKGASAQSFIERMTNFDKNLPNEKVLPKHSLLYEYFTVYNELTKVKYVTEGMRKPAFLSGEQKKAIVDLLFKTNRKVTVKQLKEDYFKKIECFDSVEISGVEDRFNASLGTYHDLLKIIKDKDFLDNEENEDILEDIVLTLTLFEDREMIEERLKTYAHLFDDKVMKQLKRRRYTGWGRLSRKLINGIRDKQSGKTILDFLKSDGFANRNFMQLIHDDSLTFKEDIQKAQVSGQGDSLHEHIANLAGSPAIKKGILQTVKVVDELVKVMGRHKPENIVIEMARENQTTQKGQKNSRERMKRIEEGIKELGSQILKEHPVENTQLQNEKLYLYYLQNGRDMYVDQELDINRLSDYDVDHIVPQSFLKDDSIDNKVLTRSDKARGKSDNVPSEEVVKKMKNYWRQLLNAKLITQRKFDNLTKAERGGLSELDKAGFIKRQLVETRQITKHVAQILDSRMNTKYDENDKLIREVKVITLKSKLVSDFRKDFQFYKVREINNYHHAHDAYLNAVVGTALIKKYPKLESEFVYGDYKVYDVRKMIAKSEQEIGKATAKYFFYSNIMNFFKTEITLANGEIRKRPLIETNGETGEIVWDKGRDFATVRKVLSMPQVNIVKKTEVQTGGFSKESILPKRNSDKLIARKKDWDPKKYGGFDSPTVAYSVLVVAKVEKGKSKKLKSVKELLGITIMERSSFEKNPIDFLEAKGYKEVKKDLIIKLPKYSLFELENGRKRMLASAGELQKGNELALPSKYVNFLYLASHYEKLKGSPEDNEQKQLFVEQHKHYLDEIIEQISEFSKRVILADANLDKVLSAYNKHRDKPIREQAENIIHLFTLTNLGAPAAFKYFDTTIDRKRYTSTKEVLDATLIHQSITGLYETRIDLSQLGGDGGEAAAKGGSGSSGGMDPLQLLQPLEAEIKGTKLKAHWNSGATITCVPQAFLEEEVPIKNIWIKTIHGEKEQPVYYLTFKIQGRKVEAEVISSPYDYILVSPSDIPWLMKKPLQLTTLVPLQEYEERLLKQTMLTGSYKEKLQSLFLKYDALWQHWENQVGHRRIKPHHIATGTVNPRPQKQYPINPKAKASIQTVINDLLKQGVLIQQNSIMNTPVYPVPKPDGKWRMVLDYREVNKTIPLIAAQNQHSAGILSSIFRGKYKTTLDLSNGFWAHSITPESYWLTAFTWLGQQYCWTRLPQGFLNSPALFTADVVDLLKEVPNVQVYVDDIYISHDDPREHLEQLEKVFSLLLNAGYVVSLKKSEIAQHEVEFLGFNITKEGRGLTETFKQKLLNITPPRDLKQLQSILGLLNFARNFIPNFSELVKPLYNIIATANGKYITWTTDNSQQLQNIISMLNSAENLEERNPEVRLIMKVNTSPSAGYIRFYNEFAKRPIMYLNYVYTKAEVKFTNTEKLLTTIHKGLIKALDLGMGQEILVYSPIVSMTKIQKTPLPERKALPIRWITWMSYLEDPRIQFHYDKTLPELQQVPTVTDDIIAKIKHPSEFSMVFYTDGSAIKHPNVNKSHNAGMGIAQVQFKPEFTVINTWSIPLGDHTAQLAEVAAVEFACKKALKIDGPVLIVTDSFYVAESVNKELPYWQSNGFFNNKKKPLKHVSKWKSIADCIQLKPDIIIIHEKGHQPTASTFHTEGNNLADKLATQGSYVVNAGKRTADGSEFEKRTADGSEFESPKKKAKVE

SEQ ID NO: 506 - protein, 2176 aa, synthetic construct
MPAAKRVKLDGGDKKYSIGLDIGTNSVGWAVITDEYKVPSKKFKVLGNTDRHSIKKNLIGALLFDSGETAEATRLKRTARRRYTRRKNRICYLQEIFSNEMAKVDDSFFHRLEESFLVEEDKKHERHPIFGNIVDEVAYHEKYPTIYHLRKKLVDSTDKADLRLIYLALAHMIKFRGHFLIEGDLNPDNSDVDKLFIQLVQTYNQLFEENPINASGVDAKAILSARLSKSRRLENLIAQLPGEKKNGLFGNLIALSLGLTPNFKSNFDLAEDAKLQLSKDTYDDDLDNLLAQIGDQYADLFLAAKNLSDAILLSDILRVNTEITKAPLSASMIKRYDEHHQDLTLLKALVRQQLPEKYKEIFFDQSKNGYAGYIDGGASQEEFYKFIKPILEKMDGTEELLVKLNREDLLRKQRTFDNGSIPHQIHLGELHAILRRQEDFYPFLKDNREKIEKILTFRIPYYVGPLARGNSRFAWMTRKSEETITPWNFEEVVDKGASAQSFIERMTNFDKNLPNEKVLPKHSLLYEYFTVYNELTKVKYVTEGMRKPAFLSGEQKKAIVDLLFKTNRKVTVKQLKEDYFKKIECFDSVEISGVEDRFNASLGTYHDLLKIIKDKDFLDNEENEDILEDIVLTLTLFEDREMIEERLKTYAHLFDDKVMKQLKRRRYTGWGRLSRKLINGIRDKQSGKTILDFLKSDGFANRNFMQLIHDDSLTFKEDIQKAQVSGQGDSLHEHIANLAGSPAIKKGILQTVKVVDELVKVMGRHKPENIVIEMARENQTTQKGQKNSRERMKRIEEGIKELGSQILKEHPVENTQLQNEKLYLYYLQNGRDMYVDQELDINRLSDYDVDHIVPQSFLKDDSIDNKVLTRSDKARGKSDNVPSEEVVKKMKNYWRQLLNAKLITQRKFDNLTKAERGGLSELDKAGFIKRQLVETRQITKHVAQILDSRMNTKYDENDKLIREVKVITLKSKLVSDFRKDFQFYKVREINNYHHAHDAYLNAVVGTALIKKYPKLESEFVYGDYKVYDVRKMIAKSEQEIGKATAKYFFYSNIMNFFKTEITLANGEIRKRPLIETNGETGEIVWDKGRDFATVRKVLSMPQVNIVKKTEVQTGGFSKESILPKRNSDKLIARKKDWDPKKYGGFDSPTVAYSVLVVAKVEKGKSKKLKSVKELLGITIMERSSFEKNPIDFLEAKGYKEVKKDLIIKLPKYSLFELENGRKRMLASAGELQKGNELALPSKYVNFLYLASHYEKLKGSPEDNEQKQLFVEQHKHYLDEIIEQISEFSKRVILADANLDKVLSAYNKHRDKPIREQAENIIHLFTLTNLGAPAAFKYFDTTIDRKRYTSTKEVLDATLIHQSITGLYETRIDLSQLGGDGGGSSEAAAKPAPGGMDPLQLLQPLEAEIKGTKLKAHWNSGATITCVPQAFLEEEVPIKNIWIKTIHGEKEQPVYYLTFKIQGRKVEAEVISSPYDYILVSPSDIPWLMKKPLQLTTLVPLQEYEERLLKQTMLTGSYKEKLQSLFLKYDALWQHWENQVGHRRIKPHHIATGTVNPRPQKQYPINPKAKASIQTVINDLLKQGVLIQQNSIMNTPVYPVPKPDGKWRMVLDYREVNKTIPLIAAQNQHSAGILSSIFRGKYKTTLDLSNGFWAHSITPESYWLTAFTWLGQQYCWTRLPQGFLNSPALFTADVVDLLKEVPNVQVYVDDIYISHDDPREHLEQLEKVFSLLLNAGYVVSLKKSEIAQHEVEFLGFNITKEGRGLTETFKQKLLNITPPRDLKQLQSILGLLNFARNFIPNFSELVKPLYNIIATANGKYITWTTDNSQQLQNIISMLNSAENLEERNPEVRLIMKVNTSPSAGYIRFYNEFAKRPIMYLNYVYTKAEVKFTNTEKLLTTIHKGLIKALDLGMGQEILVYSPIVSMTKIQKTPLPERKALPIRWITWMSYLEDPRIQFHYDKTLPELQQVPTVTDDIIAKIKHPSEFSMVFYTDGSAIKHPNVNKSHNAGMGIAQVQFKPEFTVINTWSIPLGDHTAQLAEVAAVEFACKKALKIDGPVLIVTDSFYVAESVNKELPYWQSNGFFNNKKKPLKHVSKWKSIADCIQLKPDIIIIHEKGHQPTASTFHTEGNNLADKLATQGSYVVNAGKRTADGSEFEKRTADGSEFESPKKKAKVE

SEQ ID NO: 507 - protein, 2176 aa, synthetic construct
MPAAKRVKLDGGDKKYSIGLDIGTNSVGWAVITDEYKVPSKKFKVLGNTDRHSIKKNLIGALLFDSGETAEATRLKRTARRRYTRRKNRICYLQEIFSNEMAKVDDSFFHRLEESFLVEEDKKHERHPIFGNIVDEVAYHEKYPTIYHLRKKLVDSTDKADLRLIYLALAHMIKFRGHFLIEGDLNPDNSDVDKLFIQLVQTYNQLFEENPINASGVDAKAILSARLSKSRRLENLIAQLPGEKKNGLFGNLIALSLGLTPNFKSNFDLAEDAKLQLSKDTYDDDLDNLLAQIGDQYADLFLAAKNLSDAILLSDILRVNTEITKAPLSASMIKRYDEHHQDLTLLKALVRQQLPEKYKEIFFDQSKNGYAGYIDGGASQEEFYKFIKPILEKMDGTEELLVKLNREDLLRKQRTFDNGSIPHQIHLGELHAILRRQEDFYPFLKDNREKIEKILTFRIPYYVGPLARGNSRFAWMTRKSEETITPWNFEEVVDKGASAQSFIERMTNFDKNLPNEKVLPKHSLLYEYFTVYNELTKVKYVTEGMRKPAFLSGEQKKAIVDLLFKTNRKVTVKQLKEDYFKKIECFDSVEISGVEDRFNASLGTYHDLLKIIKDKDFLDNEENEDILEDIVLTLTLFEDREMIEERLKTYAHLFDDKVMKQLKRRRYTGWGRLSRKLINGIRDKQSGKTILDFLKSDGFANRNFMQLIHDDSLTFKEDIQKAQVSGQGDSLHEHIANLAGSPAIKKGILQTVKVVDELVKVMGRHKPENIVIEMARENQTTQKGQKNSRERMKRIEEGIKELGSQILKEHPVENTQLQNEKLYLYYLQNGRDMYVDQELDINRLSDYDVDHIVPQSFLKDDSIDNKVLTRSDKARGKSDNVPSEEVVKKMKNYWRQLLNAKLITQRKFDNLTKAERGGLSELDKAGFIKRQLVETRQITKHVAQILDSRMNTKYDENDKLIREVKVITLKSKLVSDFRKDFQFYKVREINNYHHAHDAYLNAVVGTALIKKYPKLESEFVYGDYKVYDVRKMIAKSEQEIGKATAKYFFYSNIMNFFKTEITLANGEIRKRPLIETNGETGEIVWDKGRDFATVRKVLSMPQVNIVKKTEVQTGGFSKESILPKRNSDKLIARKKDWDPKKYGGFDSPTVAYSVLVVAKVEKGKSKKLKSVKELLGITIMERSSFEKNPIDFLEAKGYKEVKKDLIIKLPKYSLFELENGRKRMLASAGELQKGNELALPSKYVNFLYLASHYEKLKGSPEDNEQKQLFVEQHKHYLDEIIEQISEFSKRVILADANLDKVLSAYNKHRDKPIREQAENIIHLFTLTNLGAPAAFKYFDTTIDRKRYTSTKEVLDATLIHQSITGLYETRIDLSQLGGDGGGGGPAPEAAAKGGMDPLQLLQPLEAEIKGTKLKAHWNSGATITCVPQAFLEEEVPIKNIWIKTIHGEKEQPVYYLTFKIQGRKVEAEVISSPYDYILVSPSDIPWLMKKPLQLTTLVPLQEYEERLLKQTMLTGSYKEKLQSLFLKYDALWQHWENQVGHRRIKPHHIATGTVNPRPQKQYPINPKAKASIQTVINDLLKQGVLIQQNSIMNTPVYPVPKPDGKWRMVLDYREVNKTIPLIAAQNQHSAGILSSIFRGKYKTTLDLSNGFWAHSITPESYWLTAFTWLGQQYCWTRLPQGFLNSPALFTADVVDLLKEVPNVQVYVDDIYISHDDPREHLEQLEKVFSLLLNAGYVVSLKKSEIAQHEVEFLGFNITKEGRGLTETFKQKLLNITPPRDLKQLQSILGLLNFARNFIPNFSELVKPLYNIIATANGKYITWTTDNSQQLQNIISMLNSAENLEERNPEVRLIMKVNTSPSAGYIRFYNEFAKRPIMYLNYVYTKAEVKFTNTEKLLTTIHKGLIKALDLGMGQEILVYSPIVSMTKIQKTPLPERKALPIRWITWMSYLEDPRIQFHYDKTLPELQQVPTVTDDIIAKIKHPSEFSMVFYTDGSAIKHPNVNKSHNAGMGIAQVQFKPEFTVINTWSIPLGDHTAQLAEVAAVEFACKKALKIDGPVLIVTDSFYVAESVNKELPYWQSNGFFNNKKKPLKHVSKWKSIADCIQLKPDIIIIHEKGHQPTASTFHTEGNNLADKLATQGSYVVNAGKRTADGSEFEKRTADGSEFESPKKKAKVE

SEQ ID NO: 508 - protein, 2174 aa, synthetic construct
MPAAKRVKLDGGDKKYSIGLDIGTNSVGWAVITDEYKVPSKKFKVLGNTDRHSIKKNLIGALLFDSGETAEATRLKRTARRRYTRRKNRICYLQEIFSNEMAKVDDSFFHRLEESFLVEEDKKHERHPIFGNIVDEVAYHEKYPTIYHLRKKLVDSTDKADLRLIYLALAHMIKFRGHFLIEGDLNPDNSDVDKLFIQLVQTYNQLFEENPINASGVDAKAILSARLSKSRRLENLIAQLPGEKKNGLFGNLIALSLGLTPNFKSNFDLAEDAKLQLSKDTYDDDLDNLLAQIGDQYADLFLAAKNLSDAILLSDILRVNTEITKAPLSASMIKRYDEHHQDLTLLKALVRQQLPEKYKEIFFDQSKNGYAGYIDGGASQEEFYKFIKPILEKMDGTEELLVKLNREDLLRKQRTFDNGSIPHQIHLGELHAILRRQEDFYPFLKDNREKIEKILTFRIPYYVGPLARGNSRFAWMTRKSEETITPWNFEEVVDKGASAQSFIERMTNFDKNLPNEKVLPKHSLLYEYFTVYNELTKVKYVTEGMRKPAFLSGEQKKAIVDLLFKTNRKVTVKQLKEDYFKKIECFDSVEISGVEDRFNASLGTYHDLLKIIKDKDFLDNEENEDILEDIVLTLTLFEDREMIEERLKTYAHLFDDKVMKQLKRRRYTGWGRLSRKLINGIRDKQSGKTILDFLKSDGFANRNFMQLIHDDSLTFKEDIQKAQVSGQGDSLHEHIANLAGSPAIKKGILQTVKVVDELVKVMGRHKPENIVIEMARENQTTQKGQKNSRERMKRIEEGIKELGSQILKEHPVENTQLQNEKLYLYYLQNGRDMYVDQELDINRLSDYDVDHIVPQSFLKDDSIDNKVLTRSDKARGKSDNVPSEEVVKKMKNYWRQLLNAKLITQRKFDNLTKAERGGLSELDKAGFIKRQLVETRQITKHVAQILDSRMNTKYDENDKLIREVKVITLKSKLVSDFRKDFQFYKVREINNYHHAHDAYLNAVVGTALIKKYPKLESEFVYGDYKVYDVRKMIAKSEQEIGKATAKYFFYSNIMNFFKTEITLANGEIRKRPLIETNGETGEIVWDKGRDFATVRKVLSMPQVNIVKKTEVQTGGFSKESILPKRNSDKLIARKKDWDPKKYGGFDSPTVAYSVLVVAKVEKGKSKKLKSVKELLGITIMERSSFEKNPIDFLEAKGYKEVKKDLIIKLPKYSLFELENGRKRMLASAGELQKGNELALPSKYVNFLYLASHYEKLKGSPEDNEQKQLFVEQHKHYLDEIIEQISEFSKRVILADANLDKVLSAYNKHRDKPIREQAENIIHLFTLTNLGAPAAFKYFDTTIDRKRYTSTKEVLDATLIHQSITGLYETRIDLSQLGGDGGGSSGGGGGSGGMDPLQLLQPLEAEIKGTKLKAHWNSGATITCVPQAFLEEEVPIKNIWIKTIHGEKEQPVYYLTFKIQGRKVEAEVISSPYDYILVSPSDIPWLMKKPLQLTTLVPLQEYEERLLKQTMLTGSYKEKLQSLFLKYDALWQHWENQVGHRRIKPHHIATGTVNPRPQKQYPINPKAKASIQTVINDLLKQGVLIQQNSIMNTPVYPVPKPDGKWRMVLDYREVNKTIPLIAAQNQHSAGILSSIFRGKYKTTLDLSNGFWAHSITPESYWLTAFTWLGQQYCWTRLPQGFLNSPALFTADVVDLLKEVPNVQVYVDDIYISHDDPREHLEQLEKVFSLLLNAGYVVSLKKSEIAQHEVEFLGFNITKEGRGLTETFKQKLLNITPPRDLKQLQSILGLLNFARNFIPNFSELVKPLYNIIATANGKYITWTTDNSQQLQNIISMLNSAENLEERNPEVRLIMKVNTSPSAGYIRFYNEFAKRPIMYLNYVYTKAEVKFTNTEKLLTTIHKGLIKALDLGMGQEILVYSPIVSMTKIQKTPLPERKALPIRWITWMSYLEDPRIQFHYDKTLPELQQVPTVTDDIIAKIKHPSEFSMVFYTDGSAIKHPNVNKSHNAGMGIAQVQFKPEFTVINTWSIPLGDHTAQLAEVAAVEFACKKALKIDGPVLIVTDSFYVAESVNKELPYWQSNGFFNNKKKPLKHVSKWKSIADCIQLKPDIIIIHEKGHQPTASTFHTEGNNLADKLATQGSYVVNAGKRTADGSEFEKRTADGSEFESPKKKAKVE

SEQ ID NO: 509 - protein, 2183 aa, synthetic construct
MPAAKRVKLDGGDKKYSIGLDIGTNSVGWAVITDEYKVPSKKFKVLGNTDRHSIKKNLIGALLFDSGETAEATRLKRTARRRYTRRKNRICYLQEIFSNEMAKVDDSFFHRLEESFLVEEDKKHERHPIFGNIVDEVAYHEKYPTIYHLRKKLVDSTDKADLRLIYLALAHMIKFRGHFLIEGDLNPDNSDVDKLFIQLVQTYNQLFEENPINASGVDAKAILSARLSKSRRLENLIAQLPGEKKNGLFGNLIALSLGLTPNFKSNFDLAEDAKLQLSKDTYDDDLDNLLAQIGDQYADLFLAAKNLSDAILLSDILRVNTEITKAPLSASMIKRYDEHHQDLTLLKALVRQQLPEKYKEIFFDQSKNGYAGYIDGGASQEEFYKFIKPILEKMDGTEELLVKLNREDLLRKQRTFDNGSIPHQIHLGELHAILRRQEDFYPFLKDNREKIEKILTFRIPYYVGPLARGNSRFAWMTRKSEETITPWNFEEVVDKGASAQSFIERMTNFDKNLPNEKVLPKHSLLYEYFTVYNELTKVKYVTEGMRKPAFLSGEQKKAIVDLLFKTNRKVTVKQLKEDYFKKIECFDSVEISGVEDRFNASLGTYHDLLKIIKDKDFLDNEENEDILEDIVLTLTLFEDREMIEERLKTYAHLFDDKVMKQLKRRRYTGWGRLSRKLINGIRDKQSGKTILDFLKSDGFANRNFMQLIHDDSLTFKEDIQKAQVSGQGDSLHEHIANLAGSPAIKKGILQTVKVVDELVKVMGRHKPENIVIEMARENQTTQKGQKNSRERMKRIEEGIKELGSQILKEHPVENTQLQNEKLYLYYLQNGRDMYVDQELDINRLSDYDVDHIVPQSFLKDDSIDNKVLTRSDKARGKSDNVPSEEVVKKMKNYWRQLLNAKLITQRKFDNLTKAERGGLSELDKAGFIKRQLVETRQITKHVAQILDSRMNTKYDENDKLIREVKVITLKSKLVSDFRKDFQFYKVREINNYHHAHDAYLNAVVGTALIKKYPKLESEFVYGDYKVYDVRKMIAKSEQEIGKATAKYFFYSNIMNFFKTEITLANGEIRKRPLIETNGETGEIVWDKGRDFATVRKVLSMPQVNIVKKTEVQTGGFSKESILPKRNSDKLIARKKDWDPKKYGGFDSPTVAYSVLVVAKVEKGKSKKLKSVKELLGITIMERSSFEKNPIDFLEAKGYKEVKKDLIIKLPKYSLFELENGRKRMLASAGELQKGNELALPSKYVNFLYLASHYEKLKGSPEDNEQKQLFVEQHKHYLDEIIEQISEFSKRVILADANLDKVLSAYNKHRDKPIREQAENIIHLFTLTNLGAPAAFKYFDTTIDRKRYTSTKEVLDATLIHQSITGLYETRIDLSQLGGDGGGSSGSSGSSGSSGSSGSSGGMDPLQLLQPLEAEIKGTKLKAHWNSGATITCVPQAFLEEEVPIKNIWIKTIHGEKEQPVYYLTFKIQGRKVEAEVISSPYDYILVSPSDIPWLMKKPLQLTTLVPLQEYEERLLKQTMLTGSYKEKLQSLFLKYDALWQHWENQVGHRRIKPHHIATGTVNPRPQKQYPINPKAKASIQTVINDLLKQGVLIQQNSIMNTPVYPVPKPDGKWRMVLDYREVNKTIPLIAAQNQHSAGILSSIFRGKYKTTLDLSNGFWAHSITPESYWLTAFTWLGQQYCWTRLPQGFLNSPALFTADVVDLLKEVPNVQVYVDDIYISHDDPREHLEQLEKVFSLLLNAGYVVSLKKSEIAQHEVEFLGFNITKEGRGLTETFKQKLLNITPPRDLKQLQSILGLLNFARNFIPNFSELVKPLYNIIATANGKYITWTTDNSQQLQNIISMLNSAENLEERNPEVRLIMKVNTSPSAGYIRFYNEFAKRPIMYLNYVYTKAEVKFTNTEKLLTTIHKGLIKALDLGMGQEILVYSPIVSMTKIQKTPLPERKALPIRWITWMSYLEDPRIQFHYDKTLPELQQVPTVTDDIIAKIKHPSEFSMVFYTDGSAIKHPNVNKSHNAGMGIAQVQFKPEFTVINTWSIPLGDHTAQLAEVAAVEFACKKALKIDGPVLIVTDSFYVAESVNKELPYWQSNGFFNNKKKPLKHVSKWKSIADCIQLKPDIIIIHEKGHQPTASTFHTEGNNLADKLATQGSYVVNAGKRTADGSEFEKRTADGSEFESPKKKAKVE

SEQ ID NO: 510 - protein, 2176 aa, synthetic construct
MPAAKRVKLDGGDKKYSIGLDIGTNSVGWAVITDEYKVPSKKFKVLGNTDRHSIKKNLIGALLFDSGETAEATRLKRTARRRYTRRKNRICYLQEIFSNEMAKVDDSFFHRLEESFLVEEDKKHERHPIFGNIVDEVAYHEKYPTIYHLRKKLVDSTDKADLRLIYLALAHMIKFRGHFLIEGDLNPDNSDVDKLFIQLVQTYNQLFEENPINASGVDAKAILSARLSKSRRLENLIAQLPGEKKNGLFGNLIALSLGLTPNFKSNFDLAEDAKLQLSKDTYDDDLDNLLAQIGDQYADLFLAAKNLSDAILLSDILRVNTEITKAPLSASMIKRYDEHHQDLTLLKALVRQQLPEKYKEIFFDQSKNGYAGYIDGGASQEEFYKFIKPILEKMDGTEELLVKLNREDLLRKQRTFDNGSIPHQIHLGELHAILRRQEDFYPFLKDNREKIEKILTFRIPYYVGPLARGNSRFAWMTRKSEETITPWNFEEVVDKGASAQSFIERMTNFDKNLPNEKVLPKHSLLYEYFTVYNELTKVKYVTEGMRKPAFLSGEQKKAIVDLLFKTNRKVTVKQLKEDYFKKIECFDSVEISGVEDRFNASLGTYHDLLKIIKDKDFLDNEENEDILEDIVLTLTLFEDREMIEERLKTYAHLFDDKVMKQLKRRRYTGWGRLSRKLINGIRDKQSGKTILDFLKSDGFANRNFMQLIHDDSLTFKEDIQKAQVSGQGDSLHEHIANLAGSPAIKKGILQTVKVVDELVKVMGRHKPENIVIEMARENQTTQKGQKNSRERMKRIEEGIKELGSQILKEHPVENTQLQNEKLYLYYLQNGRDMYVDQELDINRLSDYDVDHIVPQSFLKDDSIDNKVLTRSDKARGKSDNVPSEEVVKKMKNYWRQLLNAKLITQRKFDNLTKAERGGLSELDKAGFIKRQLVETRQITKHVAQILDSRMNTKYDENDKLIREVKVITLKSKLVSDFRKDFQFYKVREINNYHHAHDAYLNAVVGTALIKKYPKLESEFVYGDYKVYDVRKMIAKSEQEIGKATAKYFFYSNIMNFFKTEITLANGEIRKRPLIETNGETGEIVWDKGRDFATVRKVLSMPQVNIVKKTEVQTGGFSKESILPKRNSDKLIARKKDWDPKKYGGFDSPTVAYSVLVVAKVEKGKSKKLKSVKELLGITIMERSSFEKNPIDFLEAKGYKEVKKDLIIKLPKYSLFELENGRKRMLASAGELQKGNELALPSKYVNFLYLASHYEKLKGSPEDNEQKQLFVEQHKHYLDEIIEQISEFSKRVILADANLDKVLSAYNKHRDKPIREQAENIIHLFTLTNLGAPAAFKYFDTTIDRKRYTSTKEVLDATLIHQSITGLYETRIDLSQLGGDGGPAPEAAAKGGGGGMDPLQLLQPLEAEIKGTKLKAHWNSGATITCVPQAFLEEEVPIKNIWIKTIHGEKEQPVYYLTFKIQGRKVEAEVISSPYDYILVSPSDIPWLMKKPLQLTTLVPLQEYEERLLKQTMLTGSYKEKLQSLFLKYDALWQHWENQVGHRRIKPHHIATGTVNPRPQKQYPINPKAKASIQTVINDLLKQGVLIQQNSIMNTPVYPVPKPDGKWRMVLDYREVNKTIPLIAAQNQHSAGILSSIFRGKYKTTLDLSNGFWAHSITPESYWLTAFTWLGQQYCWTRLPQGFLNSPALFTADVVDLLKEVPNVQVYVDDIYISHDDPREHLEQLEKVFSLLLNAGYVVSLKKSEIAQHEVEFLGFNITKEGRGLTETFKQKLLNITPPRDLKQLQSILGLLNFARNFIPNFSELVKPLYNIIATANGKYITWTTDNSQQLQNIISMLNSAENLEERNPEVRLIMKVNTSPSAGYIRFYNEFAKRPIMYLNYVYTKAEVKFTNTEKLLTTIHKGLIKALDLGMGQEILVYSPIVSMTKIQKTPLPERKALPIRWITWMSYLEDPRIQFHYDKTLPELQQVPTVTDDIIAKIKHPSEFSMVFYTDGSAIKHPNVNKSHNAGMGIAQVQFKPEFTVINTWSIPLGDHTAQLAEVAAVEFACKKALKIDGPVLIVTDSFYVAESVNKELPYWQSNGFFNNKKKPLKHVSKWKSIADCIQLKPDIIIIHEKGHQPTASTFHTEGNNLADKLATQGSYVVNAGKRTADGSEFEKRTADGSEFESPKKKAKVE

SEQ ID NO: 511 - protein, 2176 aa, synthetic construct
MPAAKRVKLDGGDKKYSIGLDIGTNSVGWAVITDEYKVPSKKFKVLGNTDRHSIKKNLIGALLFDSGETAEATRLKRTARRRYTRRKNRICYLQEIFSNEMAKVDDSFFHRLEESFLVEEDKKHERHPIFGNIVDEVAYHEKYPTIYHLRKKLVDSTDKADLRLIYLALAHMIKFRGHFLIEGDLNPDNSDVDKLFIQLVQTYNQLFEENPINASGVDAKAILSARLSKSRRLENLIAQLPGEKKNGLFGNLIALSLGLTPNFKSNFDLAEDAKLQLSKDTYDDDLDNLLAQIGDQYADLFLAAKNLSDAILLSDILRVNTEITKAPLSASMIKRYDEHHQDLTLLKALVRQQLPEKYKEIFFDQSKNGYAGYIDGGASQEEFYKFIKPILEKMDGTEELLVKLNREDLLRKQRTFDNGSIPHQIHLGELHAILRRQEDFYPFLKDNREKIEKILTFRIPYYVGPLARGNSRFAWMTRKSEETITPWNFEEVVDKGASAQSFIERMTNFDKNLPNEKVLPKHSLLYEYFTVYNELTKVKYVTEGMRKPAFLSGEQKKAIVDLLFKTNRKVTVKQLKEDYFKKIECFDSVEISGVEDRFNASLGTYHDLLKIIKDKDFLDNEENEDILEDIVLTLTLFEDREMIEERLKTYAHLFDDKVMKQLKRRRYTGWGRLSRKLINGIRDKQSGKTILDFLKSDGFANRNFMQLIHDDSLTFKEDIQKAQVSGQGDSLHEHIANLAGSPAIKKGILQTVKVVDELVKVMGRHKPENIVIEMARENQTTQKGQKNSRERMKRIEEGIKELGSQILKEHPVENTQLQNEKLYLYYLQNGRDMYVDQELDINRLSDYDVDHIVPQSFLKDDSIDNKVLTRSDKARGKSDNVPSEEVVKKMKNYWRQLLNAKLITQRKFDNLTKAERGGLSELDKAGFIKRQLVETRQITKHVAQILDSRMNTKYDENDKLIREVKVITLKSKLVSDFRKDFQFYKVREINNYHHAHDAYLNAVVGTALIKKYPKLESEFVYGDYKVYDVRKMIAKSEQEIGKATAKYFFYSNIMNFFKTEITLANGEIRKRPLIETNGETGEIVWDKGRDFATVRKVLSMPQVNIVKKTEVQTGGFSKESILPKRNSDKLIARKKDWDPKKYGGFDSPTVAYSVLVVAKVEKGKSKKLKSVKELLGITIMERSSFEKNPIDFLEAKGYKEVKKDLIIKLPKYSLFELENGRKRMLASAGELQKGNELALPSKYVNFLYLASHYEKLKGSPEDNEQKQLFVEQHKHYLDEIIEQISEFSKRVILADANLDKVLSAYNKHRDKPIREQAENIIHLFTLTNLGAPAAFKYFDTTIDRKRYTSTKEVLDATLIHQSITGLYETRIDLSQLGGDGGEAAAKGGGGSSGGMDPLQLLQPLEAEIKGTKLKAHWNSGATITCVPQAFLEEEVPIKNIWIKTIHGEKEQPVYYLTFKIQGRKVEAEVISSPYDYILVSPSDIPWLMKKPLQLTTLVPLQEYEERLLKQTMLTGSYKEKLQSLFLKYDALWQHWENQVGHRRIKPHHIATGTVNPRPQKQYPINPKAKASIQTVINDLLKQGVLIQQNSIMNTPVYPVPKPDGKWRMVLDYREVNKTIPLIAAQNQHSAGILSSIFRGKYKTTLDLSNGFWAHSITPESYWLTAFTWLGQQYCWTRLPQGFLNSPALFTADVVDLLKEVPNVQVYVDDIYISHDDPREHLEQLEKVFSLLLNAGYVVSLKKSEIAQHEVEFLGFNITKEGRGLTETFKQKLLNITPPRDLKQLQSILGLLNFARNFIPNFSELVKPLYNIIATANGKYITWTTDNSQQLQNIISMLNSAENLEERNPEVRLIMKVNTSPSAGYIRFYNEFAKRPIMYLNYVYTKAEVKFTNTEKLLTTIHKGLIKALDLGMGQEILVYSPIVSMTKIQKTPLPERKALPIRWITWMSYLEDPRIQFHYDKTLPELQQVPTVTDDIIAKIKHPSEFSMVFYTDGSAIKHPNVNKSHNAGMGIAQVQFKPEFTVINTWSIPLGDHTAQLAEVAAVEFACKKALKIDGPVLIVTDSFYVAESVNKELPYWQSNGFFNNKKKPLKHVSKWKSIADCIQLKPDIIIIHEKGHQPTASTFHTEGNNLADKLATQGSYVVNAGKRTADGSEFEKRTADGSEFESPKKKAKVE

SEQ ID NO: 512 - protein, 2171 aa, synthetic construct
MPAAKRVKLDGGDKKYSIGLDIGTNSVGWAVITDEYKVPSKKFKVLGNTDRHSIKKNLIGALLFDSGETAEATRLKRTARRRYTRRKNRICYLQEIFSNEMAKVDDSFFHRLEESFLVEEDKKHERHPIFGNIVDEVAYHEKYPTIYHLRKKLVDSTDKADLRLIYLALAHMIKFRGHFLIEGDLNPDNSDVDKLFIQLVQTYNQLFEENPINASGVDAKAILSARLSKSRRLENLIAQLPGEKKNGLFGNLIALSLGLTPNFKSNFDLAEDAKLQLSKDTYDDDLDNLLAQIGDQYADLFLAAKNLSDAILLSDILRVNTEITKAPLSASMIKRYDEHHQDLTLLKALVRQQLPEKYKEIFFDQSKNGYAGYIDGGASQEEFYKFIKPILEKMDGTEELLVKLNREDLLRKQRTFDNGSIPHQIHLGELHAILRRQEDFYPFLKDNREKIEKILTFRIPYYVGPLARGNSRFAWMTRKSEETITPWNFEEVVDKGASAQSFIERMTNFDKNLPNEKVLPKHSLLYEYFTVYNELTKVKYVTEGMRKPAFLSGEQKKAIVDLLFKTNRKVTVKQLKEDYFKKIECFDSVEISGVEDRFNASLGTYHDLLKIIKDKDFLDNEENEDILEDIVLTLTLFEDREMIEERLKTYAHLFDDKVMKQLKRRRYTGWGRLSRKLINGIRDKQSGKTILDFLKSDGFANRNFMQLIHDDSLTFKEDIQKAQVSGQGDSLHEHIANLAGSPAIKKGILQTVKVVDELVKVMGRHKPENIVIEMARENQTTQKGQKNSRERMKRIEEGIKELGSQILKEHPVENTQLQNEKLYLYYLQNGRDMYVDQELDINRLSDYDVDHIVPQSFLKDDSIDNKVLTRSDKARGKSDNVPSEEVVKKMKNYWRQLLNAKLITQRKFDNLTKAERGGLSELDKAGFIKRQLVETRQITKHVAQILDSRMNTKYDENDKLIREVKVITLKSKLVSDFRKDFQFYKVREINNYHHAHDAYLNAVVGTALIKKYPKLESEFVYGDYKVYDVRKMIAKSEQEIGKATAKYFFYSNIMNFFKTEITLANGEIRKRPLIETNGETGEIVWDKGRDFATVRKVLSMPQVNIVKKTEVQTGGFSKESILPKRNSDKLIARKKDWDPKKYGGFDSPTVAYSVLVVAKVEKGKSKKLKSVKELLGITIMERSSFEKNPIDFLEAKGYKEVKKDLIIKLPKYSLFELENGRKRMLASAGELQKGNELALPSKYVNFLYLASHYEKLKGSPEDNEQKQLFVEQHKHYLDEIIEQISEFSKRVILADANLDKVLSAYNKHRDKPIREQAENIIHLFTLTNLGAPAAFKYFDTTIDRKRYTSTKEVLDATLIHQSITGLYETRIDLSQLGGDGGGGGPAPGGMDPLQLLQPLEAEIKGTKLKAHWNSGATITCVPQAFLEEEVPIKNIWIKTIHGEKEQPVYYLTFKIQGRKVEAEVISSPYDYILVSPSDIPWLMKKPLQLTTLVPLQEYEERLLKQTMLTGSYKEKLQSLFLKYDALWQHWENQVGHRRIKPHHIATGTVNPRPQKQYPINPKAKASIQTVINDLLKQGVLIQQNSIMNTPVYPVPKPDGKWRMVLDYREVNKTIPLIAAQNQHSAGILSSIFRGKYKTTLDLSNGFWAHSITPESYWLTAFTWLGQQYCWTRLPQGFLNSPALFTADVVDLLKEVPNVQVYVDDIYISHDDPREHLEQLEKVFSLLLNAGYVVSLKKSEIAQHEVEFLGFNITKEGRGLTETFKQKLLNITPPRDLKQLQSILGLLNFARNFIPNFSELVKPLYNIIATANGKYITWTTDNSQQLQNIISMLNSAENLEERNPEVRLIMKVNTSPSAGYIRFYNEFAKRPIMYLNYVYTKAEVKFTNTEKLLTTIHKGLIKALDLGMGQEILVYSPIVSMTKIQKTPLPERKALPIRWITWMSYLEDPRIQFHYDKTLPELQQVPTVTDDIIAKIKHPSEFSMVFYTDGSAIKHPNVNKSHNAGMGIAQVQFKPEFTVINTWSIPLGDHTAQLAEVAAVEFACKKALKIDGPVLIVTDSFYVAESVNKELPYWQSNGFFNNKKKPLKHVSKWKSIADCIQLKPDIIIIHEKGHQPTASTFHTEGNNLADKLATQGSYVVNAGKRTADGSEFEKRTADGSEFESPKKKAKVE

SEQ ID NO: 513 - protein, 2176 aa, synthetic construct
MPAAKRVKLDGGDKKYSIGLDIGTNSVGWAVITDEYKVPSKKFKVLGNTDRHSIKKNLIGALLFDSGETAEATRLKRTARRRYTRRKNRICYLQEIFSNEMAKVDDSFFHRLEESFLVEEDKKHERHPIFGNIVDEVAYHEKYPTIYHLRKKLVDSTDKADLRLIYLALAHMIKFRGHFLIEGDLNPDNSDVDKLFIQLVQTYNQLFEENPINASGVDAKAILSARLSKSRRLENLIAQLPGEKKNGLFGNLIALSLGLTPNFKSNFDLAEDAKLQLSKDTYDDDLDNLLAQIGDQYADLFLAAKNLSDAILLSDILRVNTEITKAPLSASMIKRYDEHHQDLTLLKALVRQQLPEKYKEIFFDQSKNGYAGYIDGGASQEEFYKFIKPILEKMDGTEELLVKLNREDLLRKQRTFDNGSIPHQIHLGELHAILRRQEDFYPFLKDNREKIEKILTFRIPYYVGPLARGNSRFAWMTRKSEETITPWNFEEVVDKGASAQSFIERMTNFDKNLPNEKVLPKHSLLYEYFTVYNELTKVKYVTEGMRKPAFLSGEQKKAIVDLLFKTNRKVTVKQLKEDYFKKIECFDSVEISGVEDRFNASLGTYHDLLKIIKDKDFLDNEENEDILEDIVLTLTLFEDREMIEERLKTYAHLFDDKVMKQLKRRRYTGWGRLSRKLINGIRDKQSGKTILDFLKSDGFANRNFMQLIHDDSLTFKEDIQKAQVSGQGDSLHEHIANLAGSPAIKKGILQTVKVVDELVKVMGRHKPENIVIEMARENQTTQKGQKNSRERMKRIEEGIKELGSQILKEHPVENTQLQNEKLYLYYLQNGRDMYVDQELDINRLSDYDVDHIVPQSFLKDDSIDNKVLTRSDKARGKSDNVPSEEVVKKMKNYWRQLLNAKLITQRKFDNLTKAERGGLSELDKAGFIKRQLVETRQITKHVAQILDSRMNTKYDENDKLIREVKVITLKSKLVSDFRKDFQFYKVREINNYHHAHDAYLNAVVGTALIKKYPKLESEFVYGDYKVYDVRKMIAKSEQEIGKATAKYFFYSNIMNFFKTEITLANGEIRKRPLIETNGETGEIVWDKGRDFATVRKVLSMPQVNIVKKTEVQTGGFSKESILPKRNSDKLIARKKDWDPKKYGGFDSPTVAYSVLVVAKVEKGKSKKLKSVKELLGITIMERSSFEKNPIDFLEAKGYKEVKKDLIIKLPKYSLFELENGRKRMLASAGELQKGNELALPSKYVNFLYLASHYEKLKGSPEDNEQKQLFVEQHKHYLDEIIEQISEFSKRVILADANLDKVLSAYNKHRDKPIREQAENIIHLFTLTNLGAPAAFKYFDTTIDRKRYTSTKEVLDATLIHQSITGLYETRIDLSQLGGDGGEAAAKGGSGGGGGMDPLQLLQPLEAEIKGTKLKAHWNSGATITCVPQAFLEEEVPIKNIWIKTIHGEKEQPVYYLTFKIQGRKVEAEVISSPYDYILVSPSDIPWLMKKPLQLTTLVPLQEYEERLLKQTMLTGSYKEKLQSLFLKYDALWQHWENQVGHRRIKPHHIATGTVNPRPQKQYPINPKAKASIQTVINDLLKQGVLIQQNSIMNTPVYPVPKPDGKWRMVLDYREVNKTIPLIAAQNQHSAGILSSIFRGKYKTTLDLSNGFWAHSITPESYWLTAFTWLGQQYCWTRLPQGFLNSPALFTADVVDLLKEVPNVQVYVDDIYISHDDPREHLEQLEKVFSLLLNAGYVVSLKKSEIAQHEVEFLGFNITKEGRGLTETFKQKLLNITPPRDLKQLQSILGLLNFARNFIPNFSELVKPLYNIIATANGKYITWTTDNSQQLQNIISMLNSAENLEERNPEVRLIMKVNTSPSAGYIRFYNEFAKRPIMYLNYVYTKAEVKFTNTEKLLTTIHKGLIKALDLGMGQEILVYSPIVSMTKIQKTPLPERKALPIRWITWMSYLEDPRIQFHYDKTLPELQQVPTVTDDIIAKIKHPSEFSMVFYTDGSAIKHPNVNKSHNAGMGIAQVQFKPEFTVINTWSIPLGDHTAQLAEVAAVEFACKKALKIDGPVLIVTDSFYVAESVNKELPYWQSNGFFNNKKKPLKHVSKWKSIADCIQLKPDIIIIHEKGHQPTASTFHTEGNNLADKLATQGSYVVNAGKRTADGSEFEKRTADGSEFESPKKKAKVE

SEQ ID NO: 514 - protein, 2174 aa, synthetic construct
MPAAKRVKLDGGDKKYSIGLDIGTNSVGWAVITDEYKVPSKKFKVLGNTDRHSIKKNLIGALLFDSGETAEATRLKRTARRRYTRRKNRICYLQEIFSNEMAKVDDSFFHRLEESFLVEEDKKHERHPIFGNIVDEVAYHEKYPTIYHLRKKLVDSTDKADLRLIYLALAHMIKFRGHFLIEGDLNPDNSDVDKLFIQLVQTYNQLFEENPINASGVDAKAILSARLSKSRRLENLIAQLPGEKKNGLFGNLIALSLGLTPNFKSNFDLAEDAKLQLSKDTYDDDLDNLLAQIGDQYADLFLAAKNLSDAILLSDILRVNTEITKAPLSASMIKRYDEHHQDLTLLKALVRQQLPEKYKEIFFDQSKNGYAGYIDGGASQEEFYKFIKPILEKMDGTEELLVKLNREDLLRKQRTFDNGSIPHQIHLGELHAILRRQEDFYPFLKDNREKIEKILTFRIPYYVGPLARGNSRFAWMTRKSEETITPWNFEEVVDKGASAQSFIERMTNFDKNLPNEKVLPKHSLLYEYFTVYNELTKVKYVTEGMRKPAFLSGEQKKAIVDLLFKTNRKVTVKQLKEDYFKKIECFDSVEISGVEDRFNASLGTYHDLLKIIKDKDFLDNEENEDILEDIVLTLTLFEDREMIEERLKTYAHLFDDKVMKQLKRRRYTGWGRLSRKLINGIRDKQSGKTILDFLKSDGFANRNFMQLIHDDSLTFKEDIQKAQVSGQGDSLHEHIANLAGSPAIKKGILQTVKVVDELVKVMGRHKPENIVIEMARENQTTQKGQKNSRERMKRIEEGIKELGSQILKEHPVENTQLQNEKLYLYYLQNGRDMYVDQELDINRLSDYDVDHIVPQSFLKDDSIDNKVLTRSDKARGKSDNVPSEEVVKKMKNYWRQLLNAKLITQRKFDNLTKAERGGLSELDKAGFIKRQLVETRQITKHVAQILDSRMNTKYDENDKLIREVKVITLKSKLVSDFRKDFQFYKVREINNYHHAHDAYLNAVVGTALIKKYPKLESEFVYGDYKVYDVRKMIAKSEQEIGKATAKYFFYSNIMNFFKTEITLANGEIRKRPLIETNGETGEIVWDKGRDFATVRKVLSMPQVNIVKKTEVQTGGFSKESILPKRNSDKLIARKKDWDPKKYGGFDSPTVAYSVLVVAKVEKGKSKKLKSVKELLGITIMERSSFEKNPIDFLEAKGYKEVKKDLIIKLPKYSLFELENGRKRMLASAGELQKGNELALPSKYVNFLYLASHYEKLKGSPEDNEQKQLFVEQHKHYLDEIIEQISEFSKRVILADANLDKVLSAYNKHRDKPIREQAENIIHLFTLTNLGAPAAFKYFDTTIDRKRYTSTKEVLDATLIHQSITGLYETRIDLSQLGGDGGGGGPAPGGSGGMDPLQLLQPLEAEIKGTKLKAHWNSGATITCVPQAFLEEEVPIKNIWIKTIHGEKEQPVYYLTFKIQGRKVEAEVISSPYDYILVSPSDIPWLMKKPLQLTTLVPLQEYEERLLKQTMLTGSYKEKLQSLFLKYDALWQHWENQVGHRRIKPHHIATGTVNPRPQKQYPINPKAKASIQTVINDLLKQGVLIQQNSIMNTPVYPVPKPDGKWRMVLDYREVNKTIPLIAAQNQHSAGILSSIFRGKYKTTLDLSNGFWAHSITPESYWLTAFTWLGQQYCWTRLPQGFLNSPALFTADVVDLLKEVPNVQVYVDDIYISHDDPREHLEQLEKVFSLLLNAGYVVSLKKSEIAQHEVEFLGFNITKEGRGLTETFKQKLLNITPPRDLKQLQSILGLLNFARNFIPNFSELVKPLYNIIATANGKYITWTTDNSQQLQNIISMLNSAENLEERNPEVRLIMKVNTSPSAGYIRFYNEFAKRPIMYLNYVYTKAEVKFTNTEKLLTTIHKGLIKALDLGMGQEILVYSPIVSMTKIQKTPLPERKALPIRWITWMSYLEDPRIQFHYDKTLPELQQVPTVTDDIIAKIKHPSEFSMVFYTDGSAIKHPNVNKSHNAGMGIAQVQFKPEFTVINTWSIPLGDHTAQLAEVAAVEFACKKALKIDGPVLIVTDSFYVAESVNKELPYWQSNGFFNNKKKPLKHVSKWKSIADCIQLKPDIIIIHEKGHQPTASTFHTEGNNLADKLATQGSYVVNAGKRTADGSEFEKRTADGSEFESPKKKAKVE

SEQ ID NO: 515 - protein, 2174 aa, synthetic construct
MPAAKRVKLDGGDKKYSIGLDIGTNSVGWAVITDEYKVPSKKFKVLGNTDRHSIKKNLIGALLFDSGETAEATRLKRTARRRYTRRKNRICYLQEIFSNEMAKVDDSFFHRLEESFLVEEDKKHERHPIFGNIVDEVAYHEKYPTIYHLRKKLVDSTDKADLRLIYLALAHMIKFRGHFLIEGDLNPDNSDVDKLFIQLVQTYNQLFEENPINASGVDAKAILSARLSKSRRLENLIAQLPGEKKNGLFGNLIALSLGLTPNFKSNFDLAEDAKLQLSKDTYDDDLDNLLAQIGDQYADLFLAAKNLSDAILLSDILRVNTEITKAPLSASMIKRYDEHHQDLTLLKALVRQQLPEKYKEIFFDQSKNGYAGYIDGGASQEEFYKFIKPILEKMDGTEELLVKLNREDLLRKQRTFDNGSIPHQIHLGELHAILRRQEDFYPFLKDNREKIEKILTFRIPYYVGPLARGNSRFAWMTRKSEETITPWNFEEVVDKGASAQSFIERMTNFDKNLPNEKVLPKHSLLYEYFTVYNELTKVKYVTEGMRKPAFLSGEQKKAIVDLLFKTNRKVTVKQLKEDYFKKIECFDSVEISGVEDRFNASLGTYHDLLKIIKDKDFLDNEENEDILEDIVLTLTLFEDREMIEERLKTYAHLFDDKVMKQLKRRRYTGWGRLSRKLINGIRDKQSGKTILDFLKSDGFANRNFMQLIHDDSLTFKEDIQKAQVSGQGDSLHEHIANLAGSPAIKKGILQTVKVVDELVKVMGRHKPENIVIEMARENQTTQKGQKNSRERMKRIEEGIKELGSQILKEHPVENTQLQNEKLYLYYLQNGRDMYVDQELDINRLSDYDVDHIVPQSFLKDDSIDNKVLTRSDKARGKSDNVPSEEVVKKMKNYWRQLLNAKLITQRKFDNLTKAERGGLSELDKAGFIKRQLVETRQITKHVAQILDSRMNTKYDENDKLIREVKVITLKSKLVSDFRKDFQFYKVREINNYHHAHDAYLNAVVGTALIKKYPKLESEFVYGDYKVYDVRKMIAKSEQEIGKATAKYFFYSNIMNFFKTEITLANGEIRKRPLIETNGETGEIVWDKGRDFATVRKVLSMPQVNIVKKTEVQTGGFSKESILPKRNSDKLIARKKDWDPKKYGGFDSPTVAYSVLVVAKVEKGKSKKLKSVKELLGITIMERSSFEKNPIDFLEAKGYKEVKKDLIIKLPKYSLFELENGRKRMLASAGELQKGNELALPSKYVNFLYLASHYEKLKGSPEDNEQKQLFVEQHKHYLDEIIEQISEFSKRVILADANLDKVLSAYNKHRDKPIREQAENIIHLFTLTNLGAPAAFKYFDTTIDRKRYTSTKEVLDATLIHQSITGLYETRIDLSQLGGDGGGSSGSSGSSGGMDPLQLLQPLEAEIKGTKLKAHWNSGATITCVPQAFLEEEVPIKNIWIKTIHGEKEQPVYYLTFKIQGRKVEAEVISSPYDYILVSPSDIPWLMKKPLQLTTLVPLQEYEERLLKQTMLTGSYKEKLQSLFLKYDALWQHWENQVGHRRIKPHHIATGTVNPRPQKQYPINPKAKASIQTVINDLLKQGVLIQQNSIMNTPVYPVPKPDGKWRMVLDYREVNKTIPLIAAQNQHSAGILSSIFRGKYKTTLDLSNGFWAHSITPESYWLTAFTWLGQQYCWTRLPQGFLNSPALFTADVVDLLKEVPNVQVYVDDIYISHDDPREHLEQLEKVFSLLLNAGYVVSLKKSEIAQHEVEFLGFNITKEGRGLTETFKQKLLNITPPRDLKQLQSILGLLNFARNFIPNFSELVKPLYNIIATANGKYITWTTDNSQQLQNIISMLNSAENLEERNPEVRLIMKVNTSPSAGYIRFYNEFAKRPIMYLNYVYTKAEVKFTNTEKLLTTIHKGLIKALDLGMGQEILVYSPIVSMTKIQKTPLPERKALPIRWITWMSYLEDPRIQFHYDKTLPELQQVPTVTDDIIAKIKHPSEFSMVFYTDGSAIKHPNVNKSHNAGMGIAQVQFKPEFTVINTWSIPLGDHTAQLAEVAAVEFACKKALKIDGPVLIVTDSFYVAESVNKELPYWQSNGFFNNKKKPLKHVSKWKSIADCIQLKPDIIIIHEKGHQPTASTFHTEGNNLADKLATQGSYVVNAGKRTADGSEFEKRTADGSEFESPKKKAKVE

SEQ ID NO: 516 - protein, 2171 aa, synthetic construct
MPAAKRVKLDGGDKKYSIGLDIGTNSVGWAVITDEYKVPSKKFKVLGNTDRHSIKKNLIGALLFDSGETAEATRLKRTARRRYTRRKNRICYLQEIFSNEMAKVDDSFFHRLEESFLVEEDKKHERHPIFGNIVDEVAYHEKYPTIYHLRKKLVDSTDKADLRLIYLALAHMIKFRGHFLIEGDLNPDNSDVDKLFIQLVQTYNQLFEENPINASGVDAKAILSARLSKSRRLENLIAQLPGEKKNGLFGNLIALSLGLTPNFKSNFDLAEDAKLQLSKDTYDDDLDNLLAQIGDQYADLFLAAKNLSDAILLSDILRVNTEITKAPLSASMIKRYDEHHQDLTLLKALVRQQLPEKYKEIFFDQSKNGYAGYIDGGASQEEFYKFIKPILEKMDGTEELLVKLNREDLLRKQRTFDNGSIPHQIHLGELHAILRRQEDFYPFLKDNREKIEKILTFRIPYYVGPLARGNSRFAWMTRKSEETITPWNFEEVVDKGASAQSFIERMTNFDKNLPNEKVLPKHSLLYEYFTVYNELTKVKYVTEGMRKPAFLSGEQKKAIVDLLFKTNRKVTVKQLKEDYFKKIECFDSVEISGVEDRFNASLGTYHDLLKIIKDKDFLDNEENEDILEDIVLTLTLFEDREMIEERLKTYAHLFDDKVMKQLKRRRYTGWGRLSRKLINGIRDKQSGKTILDFLKSDGFANRNFMQLIHDDSLTFKEDIQKAQVSGQGDSLHEHIANLAGSPAIKKGILQTVKVVDELVKVMGRHKPENIVIEMARENQTTQKGQKNSRERMKRIEEGIKELGSQILKEHPVENTQLQNEKLYLYYLQNGRDMYVDQELDINRLSDYDVDHIVPQSFLKDDSIDNKVLTRSDKARGKSDNVPSEEVVKKMKNYWRQLLNAKLITQRKFDNLTKAERGGLSELDKAGFIKRQLVETRQITKHVAQILDSRMNTKYDENDKLIREVKVITLKSKLVSDFRKDFQFYKVREINNYHHAHDAYLNAVVGTALIKKYPKLESEFVYGDYKVYDVRKMIAKSEQEIGKATAKYFFYSNIMNFFKTEITLANGEIRKRPLIETNGETGEIVWDKGRDFATVRKVLSMPQVNIVKKTEVQTGGFSKESILPKRNSDKLIARKKDWDPKKYGGFDSPTVAYSVLVVAKVEKGKSKKLKSVKELLGITIMERSSFEKNPIDFLEAKGYKEVKKDLIIKLPKYSLFELENGRKRMLASAGELQKGNELALPSKYVNFLYLASHYEKLKGSPEDNEQKQLFVEQHKHYLDEIIEQISEFSKRVILADANLDKVLSAYNKHRDKPIREQAENIIHLFTLTNLGAPAAFKYFDTTIDRKRYTSTKEVLDATLIHQSITGLYETRIDLSQLGGDGGPAPGGGGGMDPLQLLQPLEAEIKGTKLKAHWNSGATITCVPQAFLEEEVPIKNIWIKTIHGEKEQPVYYLTFKIQGRKVEAEVISSPYDYILVSPSDIPWLMKKPLQLTTLVPLQEYEERLLKQTMLTGSYKEKLQSLFLKYDALWQHWENQVGHRRIKPHHIATGTVNPRPQKQYPINPKAKASIQTVINDLLKQGVLIQQNSIMNTPVYPVPKPDGKWRMVLDYREVNKTIPLIAAQNQHSAGILSSIFRGKYKTTLDLSNGFWAHSITPESYWLTAFTWLGQQYCWTRLPQGFLNSPALFTADVVDLLKEVPNVQVYVDDIYISHDDPREHLEQLEKVFSLLLNAGYVVSLKKSEIAQHEVEFLGFNITKEGRGLTETFKQKLLNITPPRDLKQLQSILGLLNFARNFIPNFSELVKPLYNIIATANGKYITWTTDNSQQLQNIISMLNSAENLEERNPEVRLIMKVNTSPSAGYIRFYNEFAKRPIMYLNYVYTKAEVKFTNTEKLLTTIHKGLIKALDLGMGQEILVYSPIVSMTKIQKTPLPERKALPIRWITWMSYLEDPRIQFHYDKTLPELQQVPTVTDDIIAKIKHPSEFSMVFYTDGSAIKHPNVNKSHNAGMGIAQVQFKPEFTVINTWSIPLGDHTAQLAEVAAVEFACKKALKIDGPVLIVTDSFYVAESVNKELPYWQSNGFFNNKKKPLKHVSKWKSIADCIQLKPDIIIIHEKGHQPTASTFHTEGNNLADKLATQGSYVVNAGKRTADGSEFEKRTADGSEFESPKKKAKVE

SEQ ID NO: 517 - protein, 2176 aa, synthetic construct
MPAAKRVKLDGGDKKYSIGLDIGTNSVGWAVITDEYKVPSKKFKVLGNTDRHSIKKNLIGALLFDSGETAEATRLKRTARRRYTRRKNRICYLQEIFSNEMAKVDDSFFHRLEESFLVEEDKKHERHPIFGNIVDEVAYHEKYPTIYHLRKKLVDSTDKADLRLIYLALAHMIKFRGHFLIEGDLNPDNSDVDKLFIQLVQTYNQLFEENPINASGVDAKAILSARLSKSRRLENLIAQLPGEKKNGLFGNLIALSLGLTPNFKSNFDLAEDAKLQLSKDTYDDDLDNLLAQIGDQYADLFLAAKNLSDAILLSDILRVNTEITKAPLSASMIKRYDEHHQDLTLLKALVRQQLPEKYKEIFFDQSKNGYAGYIDGGASQEEFYKFIKPILEKMDGTEELLVKLNREDLLRKQRTFDNGSIPHQIHLGELHAILRRQEDFYPFLKDNREKIEKILTFRIPYYVGPLARGNSRFAWMTRKSEETITPWNFEEVVDKGASAQSFIERMTNFDKNLPNEKVLPKHSLLYEYFTVYNELTKVKYVTEGMRKPAFLSGEQKKAIVDLLFKTNRKVTVKQLKEDYFKKIECFDSVEISGVEDRFNASLGTYHDLLKIIKDKDFLDNEENEDILEDIVLTLTLFEDREMIEERLKTYAHLFDDKVMKQLKRRRYTGWGRLSRKLINGIRDKQSGKTILDFLKSDGFANRNFMQLIHDDSLTFKEDIQKAQVSGQGDSLHEHIANLAGSPAIKKGILQTVKVVDELVKVMGRHKPENIVIEMARENQTTQKGQKNSRERMKRIEEGIKELGSQILKEHPVENTQLQNEKLYLYYLQNGRDMYVDQELDINRLSDYDVDHIVPQSFLKDDSIDNKVLTRSDKARGKSDNVPSEEVVKKMKNYWRQLLNAKLITQRKFDNLTKAERGGLSELDKAGFIKRQLVETRQITKHVAQILDSRMNTKYDENDKLIREVKVITLKSKLVSDFRKDFQFYKVREINNYHHAHDAYLNAVVGTALIKKYPKLESEFVYGDYKVYDVRKMIAKSEQEIGKATAKYFFYSNIMNFFKTEITLANGEIRKRPLIETNGETGEIVWDKGRDFATVRKVLSMPQVNIVKKTEVQTGGFSKESILPKRNSDKLIARKKDWDPKKYGGFDSPTVAYSVLVVAKVEKGKSKKLKSVKELLGITIMERSSFEKNPIDFLEAKGYKEVKKDLIIKLPKYSLFELENGRKRMLASAGELQKGNELALPSKYVNFLYLASHYEKLKGSPEDNEQKQLFVEQHKHYLDEIIEQISEFSKRVILADANLDKVLSAYNKHRDKPIREQAENIIHLFTLTNLGAPAAFKYFDTTIDRKRYTSTKEVLDATLIHQSITGLYETRIDLSQLGGDGGEAAAKGSSGGSGGMDPLQLLQPLEAEIKGTKLKAHWNSGATITCVPQAFLEEEVPIKNIWIKTIHGEKEQPVYYLTFKIQGRKVEAEVISSPYDYILVSPSDIPWLMKKPLQLTTLVPLQEYEERLLKQTMLTGSYKEKLQSLFLKYDALWQHWENQVGHRRIKPHHIATGTVNPRPQKQYPINPKAKASIQTVINDLLKQGVLIQQNSIMNTPVYPVPKPDGKWRMVLDYREVNKTIPLIAAQNQHSAGILSSIFRGKYKTTLDLSNGFWAHSITPESYWLTAFTWLGQQYCWTRLPQGFLNSPALFTADVVDLLKEVPNVQVYVDDIYISHDDPREHLEQLEKVFSLLLNAGYVVSLKKSEIAQHEVEFLGFNITKEGRGLTETFKQKLLNITPPRDLKQLQSILGLLNFARNFIPNFSELVKPLYNIIATANGKYITWTTDNSQQLQNIISMLNSAENLEERNPEVRLIMKVNTSPSAGYIRFYNEFAKRPIMYLNYVYTKAEVKFTNTEKLLTTIHKGLIKALDLGMGQEILVYSPIVSMTKIQKTPLPERKALPIRWITWMSYLEDPRIQFHYDKTLPELQQVPTVTDDIIAKIKHPSEFSMVFYTDGSAIKHPNVNKSHNAGMGIAQVQFKPEFTVINTWSIPLGDHTAQLAEVAAVEFACKKALKIDGPVLIVTDSFYVAESVNKELPYWQSNGFFNNKKKPLKHVSKWKSIADCIQLKPDIIIIHEKGHQPTASTFHTEGNNLADKLATQGSYVVNAGKRTADGSEFEKRTADGSEFESPKKKAKVE

SEQ ID NO: 518 - protein, 2174 aa, synthetic construct
MPAAKRVKLDGGDKKYSIGLDIGTNSVGWAVITDEYKVPSKKFKVLGNTDRHSIKKNLIGALLFDSGETAEATRLKRTARRRYTRRKNRICYLQEIFSNEMAKVDDSFFHRLEESFLVEEDKKHERHPIFGNIVDEVAYHEKYPTIYHLRKKLVDSTDKADLRLIYLALAHMIKFRGHFLIEGDLNPDNSDVDKLFIQLVQTYNQLFEENPINASGVDAKAILSARLSKSRRLENLIAQLPGEKKNGLFGNLIALSLGLTPNFKSNFDLAEDAKLQLSKDTYDDDLDNLLAQIGDQYADLFLAAKNLSDAILLSDILRVNTEITKAPLSASMIKRYDEHHQDLTLLKALVRQQLPEKYKEIFFDQSKNGYAGYIDGGASQEEFYKFIKPILEKMDGTEELLVKLNREDLLRKQRTFDNGSIPHQIHLGELHAILRRQEDFYPFLKDNREKIEKILTFRIPYYVGPLARGNSRFAWMTRKSEETITPWNFEEVVDKGASAQSFIERMTNFDKNLPNEKVLPKHSLLYEYFTVYNELTKVKYVTEGMRKPAFLSGEQKKAIVDLLFKTNRKVTVKQLKEDYFKKIECFDSVEISGVEDRFNASLGTYHDLLKIIKDKDFLDNEENEDILEDIVLTLTLFEDREMIEERLKTYAHLFDDKVMKQLKRRRYTGWGRLSRKLINGIRDKQSGKTILDFLKSDGFANRNFMQLIHDDSLTFKEDIQKAQVSGQGDSLHEHIANLAGSPAIKKGILQTVKVVDELVKVMGRHKPENIVIEMARENQTTQKGQKNSRERMKRIEEGIKELGSQILKEHPVENTQLQNEKLYLYYLQNGRDMYVDQELDINRLSDYDVDHIVPQSFLKDDSIDNKVLTRSDKARGKSDNVPSEEVVKKMKNYWRQLLNAKLITQRKFDNLTKAERGGLSELDKAGFIKRQLVETRQITKHVAQILDSRMNTKYDENDKLIREVKVITLKSKLVSDFRKDFQFYKVREINNYHHAHDAYLNAVVGTALIKKYPKLESEFVYGDYKVYDVRKMIAKSEQEIGKATAKYFFYSNIMNFFKTEITLANGEIRKRPLIETNGETGEIVWDKGRDFATVRKVLSMPQVNIVKKTEVQTGGFSKESILPKRNSDKLIARKKDWDPKKYGGFDSPTVAYSVLVVAKVEKGKSKKLKSVKELLGITIMERSSFEKNPIDFLEAKGYKEVKKDLIIKLPKYSLFELENGRKRMLASAGELQKGNELALPSKYVNFLYLASHYEKLKGSPEDNEQKQLFVEQHKHYLDEIIEQISEFSKRVILADANLDKVLSAYNKHRDKPIREQAENIIHLFTLTNLGAPAAFKYFDTTIDRKRYTSTKEVLDATLIHQSITGLYETRIDLSQLGGDGGGGSPAPGSSGGMDPLQLLQPLEAEIKGTKLKAHWNSGATITCVPQAFLEEEVPIKNIWIKTIHGEKEQPVYYLTFKIQGRKVEAEVISSPYDYILVSPSDIPWLMKKPLQLTTLVPLQEYEERLLKQTMLTGSYKEKLQSLFLKYDALWQHWENQVGHRRIKPHHIATGTVNPRPQKQYPINPKAKASIQTVINDLLKQGVLIQQNSIMNTPVYPVPKPDGKWRMVLDYREVNKTIPLIAAQNQHSAGILSSIFRGKYKTTLDLSNGFWAHSITPESYWLTAFTWLGQQYCWTRLPQGFLNSPALFTADVVDLLKEVPNVQVYVDDIYISHDDPREHLEQLEKVFSLLLNAGYVVSLKKSEIAQHEVEFLGFNITKEGRGLTETFKQKLLNITPPRDLKQLQSILGLLNFARNFIPNFSELVKPLYNIIATANGKYITWTTDNSQQLQNIISMLNSAENLEERNPEVRLIMKVNTSPSAGYIRFYNEFAKRPIMYLNYVYTKAEVKFTNTEKLLTTIHKGLIKALDLGMGQEILVYSPIVSMTKIQKTPLPERKALPIRWITWMSYLEDPRIQFHYDKTLPELQQVPTVTDDIIAKIKHPSEFSMVFYTDGSAIKHPNVNKSHNAGMGIAQVQFKPEFTVINTWSIPLGDHTAQLAEVAAVEFACKKALKIDGPVLIVTDSFYVAESVNKELPYWQSNGFFNNKKKPLKHVSKWKSIADCIQLKPDIIIIHEKGHQPTASTFHTEGNNLADKLATQGSYVVNAGKRTADGSEFEKRTADGSEFESPKKKAKVE

SEQ ID NO: 519 - protein, 2175 aa, synthetic construct
MPAAKRVKLDGGDKKYSIGLDIGTNSVGWAVITDEYKVPSKKFKVLGNTDRHSIKKNLIGALLFDSGETAEATRLKRTARRRYTRRKNRICYLQEIFSNEMAKVDDSFFHRLEESFLVEEDKKHERHPIFGNIVDEVAYHEKYPTIYHLRKKLVDSTDKADLRLIYLALAHMIKFRGHFLIEGDLNPDNSDVDKLFIQLVQTYNQLFEENPINASGVDAKAILSARLSKSRRLENLIAQLPGEKKNGLFGNLIALSLGLTPNFKSNFDLAEDAKLQLSKDTYDDDLDNLLAQIGDQYADLFLAAKNLSDAILLSDILRVNTEITKAPLSASMIKRYDEHHQDLTLLKALVRQQLPEKYKEIFFDQSKNGYAGYIDGGASQEEFYKFIKPILEKMDGTEELLVKLNREDLLRKQRTFDNGSIPHQIHLGELHAILRRQEDFYPFLKDNREKIEKILTFRIPYYVGPLARGNSRFAWMTRKSEETITPWNFEEVVDKGASAQSFIERMTNFDKNLPNEKVLPKHSLLYEYFTVYNELTKVKYVTEGMRKPAFLSGEQKKAIVDLLFKTNRKVTVKQLKEDYFKKIECFDSVEISGVEDRFNASLGTYHDLLKIIKDKDFLDNEENEDILEDIVLTLTLFEDREMIEERLKTYAHLFDDKVMKQLKRRRYTGWGRLSRKLINGIRDKQSGKTILDFLKSDGFANRNFMQLIHDDSLTFKEDIQKAQVSGQGDSLHEHIANLAGSPAIKKGILQTVKVVDELVKVMGRHKPENIVIEMARENQTTQKGQKNSRERMKRIEEGIKELGSQILKEHPVENTQLQNEKLYLYYLQNGRDMYVDQELDINRLSDYDVDHIVPQSFLKDDSIDNKVLTRSDKARGKSDNVPSEEVVKKMKNYWRQLLNAKLITQRKFDNLTKAERGGLSELDKAGFIKRQLVETRQITKHVAQILDSRMNTKYDENDKLIREVKVITLKSKLVSDFRKDFQFYKVREINNYHHAHDAYLNAVVGTALIKKYPKLESEFVYGDYKVYDVRKMIAKSEQEIGKATAKYFFYSNIMNFFKTEITLANGEIRKRPLIETNGETGEIVWDKGRDFATVRKVLSMPQVNIVKKTEVQTGGFSKESILPKRNSDKLIARKKDWDPKKYGGFDSPTVAYSVLVVAKVEKGKSKKLKSVKELLGITIMERSSFEKNPIDFLEAKGYKEVKKDLIIKLPKYSLFELENGRKRMLASAGELQKGNELALPSKYVNFLYLASHYEKLKGSPEDNEQKQLFVEQHKHYLDEIIEQISEFSKRVILADANLDKVLSAYNKHRDKPIREQAENIIHLFTLTNLGAPAAFKYFDTTIDRKRYTSTKEVLDATLIHQSITGLYETRIDLSQLGGDGGGGGGSGGGGSGGMDPLQLLQPLEAEIKGTKLKAHWNSGATITCVPQAFLEEEVPIKNIWIKTIHGEKEQPVYYLTFKIQGRKVEAEVISSPYDYILVSPSDIPWLMKKPLQLTTLVPLQEYEERLLKQTMLTGSYKEKLQSLFLKYDALWQHWENQVGHRRIKPHHIATGTVNPRPQKQYPINPKAKASIQTVINDLLKQGVLIQQNSIMNTPVYPVPKPDGKWRMVLDYREVNKTIPLIAAQNQHSAGILSSIFRGKYKTTLDLSNGFWAHSITPESYWLTAFTWLGQQYCWTRLPQGFLNSPALFTADVVDLLKEVPNVQVYVDDIYISHDDPREHLEQLEKVFSLLLNAGYVVSLKKSEIAQHEVEFLGFNITKEGRGLTETFKQKLLNITPPRDLKQLQSILGLLNFARNFIPNFSELVKPLYNIIATANGKYITWTTDNSQQLQNIISMLNSAENLEERNPEVRLIMKVNTSPSAGYIRFYNEFAKRPIMYLNYVYTKAEVKFTNTEKLLTTIHKGLIKALDLGMGQEILVYSPIVSMTKIQKTPLPERKALPIRWITWMSYLEDPRIQFHYDKTLPELQQVPTVTDDIIAKIKHPSEFSMVFYTDGSAIKHPNVNKSHNAGMGIAQVQFKPEFTVINTWSIPLGDHTAQLAEVAAVEFACKKALKIDGPVLIVTDSFYVAESVNKELPYWQSNGFFNNKKKPLKHVSKWKSIADCIQLKPDIIIIHEKGHQPTASTFHTEGNNLADKLATQGSYVVNAGKRTADGSEFEKRTADGSEFESPKKKAKVE

SEQ ID NO: 520 - protein, 2172 aa, synthetic construct
MPAAKRVKLDGGDKKYSIGLDIGTNSVGWAVITDEYKVPSKKFKVLGNTDRHSIKKNLIGALLFDSGETAEATRLKRTARRRYTRRKNRICYLQEIFSNEMAKVDDSFFHRLEESFLVEEDKKHERHPIFGNIVDEVAYHEKYPTIYHLRKKLVDSTDKADLRLIYLALAHMIKFRGHFLIEGDLNPDNSDVDKLFIQLVQTYNQLFEENPINASGVDAKAILSARLSKSRRLENLIAQLPGEKKNGLFGNLIALSLGLTPNFKSNFDLAEDAKLQLSKDTYDDDLDNLLAQIGDQYADLFLAAKNLSDAILLSDILRVNTEITKAPLSASMIKRYDEHHQDLTLLKALVRQQLPEKYKEIFFDQSKNGYAGYIDGGASQEEFYKFIKPILEKMDGTEELLVKLNREDLLRKQRTFDNGSIPHQIHLGELHAILRRQEDFYPFLKDNREKIEKILTFRIPYYVGPLARGNSRFAWMTRKSEETITPWNFEEVVDKGASAQSFIERMTNFDKNLPNEKVLPKHSLLYEYFTVYNELTKVKYVTEGMRKPAFLSGEQKKAIVDLLFKTNRKVTVKQLKEDYFKKIECFDSVEISGVEDRFNASLGTYHDLLKIIKDKDFLDNEENEDILEDIVLTLTLFEDREMIEERLKTYAHLFDDKVMKQLKRRRYTGWGRLSRKLINGIRDKQSGKTILDFLKSDGFANRNFMQLIHDDSLTFKEDIQKAQVSGQGDSLHEHIANLAGSPAIKKGILQTVKVVDELVKVMGRHKPENIVIEMARENQTTQKGQKNSRERMKRIEEGIKELGSQILKEHPVENTQLQNEKLYLYYLQNGRDMYVDQELDINRLSDYDVDHIVPQSFLKDDSIDNKVLTRSDKARGKSDNVPSEEVVKKMKNYWRQLLNAKLITQRKFDNLTKAERGGLSELDKAGFIKRQLVETRQITKHVAQILDSRMNTKYDENDKLIREVKVITLKSKLVSDFRKDFQFYKVREINNYHHAHDAYLNAVVGTALIKKYPKLESEFVYGDYKVYDVRKMIAKSEQEIGKATAKYFFYSNIMNFFKTEITLANGEIRKRPLIETNGETGEIVWDKGRDFATVRKVLSMPQVNIVKKTEVQTGGFSKESILPKRNSDKLIARKKDWDPKKYGGFDSPTVAYSVLVVAKVEKGKSKKLKSVKELLGITIMERSSFEKNPIDFLEAKGYKEVKKDLIIKLPKYSLFELENGRKRMLASAGELQKGNELALPSKYVNFLYLASHYEKLKGSPEDNEQKQLFVEQHKHYLDEIIEQISEFSKRVILADANLDKVLSAYNKHRDKPIREQAENIIHLFTLTNLGAPAAFKYFDTTIDRKRYTSTKEVLDATLIHQSITGLYETRIDLSQLGGDGGPAPAPAPGGMDPLQLLQPLEAEIKGTKLKAHWNSGATITCVPQAFLEEEVPIKNIWIKTIHGEKEQPVYYLTFKIQGRKVEAEVISSPYDYILVSPSDIPWLMKKPLQLTTLVPLQEYEERLLKQTMLTGSYKEKLQSLFLKYDALWQHWENQVGHRRIKPHHIATGTVNPRPQKQYPINPKAKASIQTVINDLLKQGVLIQQNSIMNTPVYPVPKPDGKWRMVLDYREVNKTIPLIAAQNQHSAGILSSIFRGKYKTTLDLSNGFWAHSITPESYWLTAFTWLGQQYCWTRLPQGFLNSPALFTADVVDLLKEVPNVQVYVDDIYISHDDPREHLEQLEKVFSLLLNAGYVVSLKKSEIAQHEVEFLGFNITKEGRGLTETFKQKLLNITPPRDLKQLQSILGLLNFARNFIPNFSELVKPLYNIIATANGKYITWTTDNSQQLQNIISMLNSAENLEERNPEVRLIMKVNTSPSAGYIRFYNEFAKRPIMYLNYVYTKAEVKFTNTEKLLTTIHKGLIKALDLGMGQEILVYSPIVSMTKIQKTPLPERKALPIRWITWMSYLEDPRIQFHYDKTLPELQQVPTVTDDIIAKIKHPSEFSMVFYTDGSAIKHPNVNKSHNAGMGIAQVQFKPEFTVINTWSIPLGDHTAQLAEVAAVEFACKKALKIDGPVLIVTDSFYVAESVNKELPYWQSNGFFNNKKKPLKHVSKWKSIADCIQLKPDIIIIHEKGHQPTASTFHTEGNNLADKLATQGSYVVNAGKRTADGSEFEKRTADGSEFESPKKKAKVE

SEQ ID NO: 521 - protein, 2174 aa, synthetic construct
MPAAKRVKLDGGDKKYSIGLDIGTNSVGWAVITDEYKVPSKKFKVLGNTDRHSIKKNLIGALLFDSGETAEATRLKRTARRRYTRRKNRICYLQEIFSNEMAKVDDSFFHRLEESFLVEEDKKHERHPIFGNIVDEVAYHEKYPTIYHLRKKLVDSTDKADLRLIYLALAHMIKFRGHFLIEGDLNPDNSDVDKLFIQLVQTYNQLFEENPINASGVDAKAILSARLSKSRRLENLIAQLPGEKKNGLFGNLIALSLGLTPNFKSNFDLAEDAKLQLSKDTYDDDLDNLLAQIGDQYADLFLAAKNLSDAILLSDILRVNTEITKAPLSASMIKRYDEHHQDLTLLKALVRQQLPEKYKEIFFDQSKNGYAGYIDGGASQEEFYKFIKPILEKMDGTEELLVKLNREDLLRKQRTFDNGSIPHQIHLGELHAILRRQEDFYPFLKDNREKIEKILTFRIPYYVGPLARGNSRFAWMTRKSEETITPWNFEEVVDKGASAQSFIERMTNFDKNLPNEKVLPKHSLLYEYFTVYNELTKVKYVTEGMRKPAFLSGEQKKAIVDLLFKTNRKVTVKQLKEDYFKKIECFDSVEISGVEDRFNASLGTYHDLLKIIKDKDFLDNEENEDILEDIVLTLTLFEDREMIEERLKTYAHLFDDKVMKQLKRRRYTGWGRLSRKLINGIRDKQSGKTILDFLKSDGFANRNFMQLIHDDSLTFKEDIQKAQVSGQGDSLHEHIANLAGSPAIKKGILQTVKVVDELVKVMGRHKPENIVIEMARENQTTQKGQKNSRERMKRIEEGIKELGSQILKEHPVENTQLQNEKLYLYYLQNGRDMYVDQELDINRLSDYDVDHIVPQSFLKDDSIDNKVLTRSDKARGKSDNVPSEEVVKKMKNYWRQLLNAKLITQRKFDNLTKAERGGLSELDKAGFIKRQLVETRQITKHVAQILDSRMNTKYDENDKLIREVKVITLKSKLVSDFRKDFQFYKVREINNYHHAHDAYLNAVVGTALIKKYPKLESEFVYGDYKVYDVRKMIAKSEQEIGKATAKYFFYSNIMNFFKTEITLANGEIRKRPLIETNGETGEIVWDKGRDFATVRKVLSMPQVNIVKKTEVQTGGFSKESILPKRNSDKLIARKKDWDPKKYGGFDSPTVAYSVLVVAKVEKGKSKKLKSVKELLGITIMERSSFEKNPIDFLEAKGYKEVKKDLIIKLPKYSLFELENGRKRMLASAGELQKGNELALPSKYVNFLYLASHYEKLKGSPEDNEQKQLFVEQHKHYLDEIIEQISEFSKRVILADANLDKVLSAYNKHRDKPIREQAENIIHLFTLTNLGAPAAFKYFDTTIDRKRYTSTKEVLDATLIHQSITGLYETRIDLSQLGGDGGGSSGGSGGGGGMDPLQLLQPLEAEIKGTKLKAHWNSGATITCVPQAFLEEEVPIKNIWIKTIHGEKEQPVYYLTFKIQGRKVEAEVISSPYDYILVSPSDIPWLMKKPLQLTTLVPLQEYEERLLKQTMLTGSYKEKLQSLFLKYDALWQHWENQVGHRRIKPHHIATGTVNPRPQKQYPINPKAKASIQTVINDLLKQGVLIQQNSIMNTPVYPVPKPDGKWRMVLDYREVNKTIPLIAAQNQHSAGILSSIFRGKYKTTLDLSNGFWAHSITPESYWLTAFTWLGQQYCWTRLPQGFLNSPALFTADVVDLLKEVPNVQVYVDDIYISHDDPREHLEQLEKVFSLLLNAGYVVSLKKSEIAQHEVEFLGFNITKEGRGLTETFKQKLLNITPPRDLKQLQSILGLLNFARNFIPNFSELVKPLYNIIATANGKYITWTTDNSQQLQNIISMLNSAENLEERNPEVRLIMKVNTSPSAGYIRFYNEFAKRPIMYLNYVYTKAEVKFTNTEKLLTTIHKGLIKALDLGMGQEILVYSPIVSMTKIQKTPLPERKALPIRWITWMSYLEDPRIQFHYDKTLPELQQVPTVTDDIIAKIKHPSEFSMVFYTDGSAIKHPNVNKSHNAGMGIAQVQFKPEFTVINTWSIPLGDHTAQLAEVAAVEFACKKALKIDGPVLIVTDSFYVAESVNKELPYWQSNGFFNNKKKPLKHVSKWKSIADCIQLKPDIIIIHEKGHQPTASTFHTEGNNLADKLATQGSYVVNAGKRTADGSEFEKRTADGSEFESPKKKAKVE

SEQ ID NO: 522 - protein, 2010 aa, synthetic construct
MPAAKRVKLDGGDKKYSIGLDIGTNSVGWAVITDEYKVPSKKFKVLGNTDRHSIKKNLIGALLFDSGETAEATRLKRTARRRYTRRKNRICYLQEIFSNEMAKVDDSFFHRLEESFLVEEDKKHERHPIFGNIVDEVAYHEKYPTIYHLRKKLVDSTDKADLRLIYLALAHMIKFRGHFLIEGDLNPDNSDVDKLFIQLVQTYNQLFEENPINASGVDAKAILSARLSKSRRLENLIAQLPGEKKNGLFGNLIALSLGLTPNFKSNFDLAEDAKLQLSKDTYDDDLDNLLAQIGDQYADLFLAAKNLSDAILLSDILRVNTEITKAPLSASMIKRYDEHHQDLTLLKALVRQQLPEKYKEIFFDQSKNGYAGYIDGGASQEEFYKFIKPILEKMDGTEELLVKLNREDLLRKQRTFDNGSIPHQIHLGELHAILRRQEDFYPFLKDNREKIEKILTFRIPYYVGPLARGNSRFAWMTRKSEETITPWNFEEVVDKGASAQSFIERMTNFDKNLPNEKVLPKHSLLYEYFTVYNELTKVKYVTEGMRKPAFLSGEQKKAIVDLLFKTNRKVTVKQLKEDYFKKIECFDSVEISGVEDRFNASLGTYHDLLKIIKDKDFLDNEENEDILEDIVLTLTLFEDREMIEERLKTYAHLFDDKVMKQLKRRRYTGWGRLSRKLINGIRDKQSGKTILDFLKSDGFANRNFMQLIHDDSLTFKEDIQKAQVSGQGDSLHEHIANLAGSPAIKKGILQTVKVVDELVKVMGRHKPENIVIEMARENQTTQKGQKNSRERMKRIEEGIKELGSQILKEHPVENTQLQNEKLYLYYLQNGRDMYVDQELDINRLSDYDVDHIVPQSFLKDDSIDNKVLTRSDKARGKSDNVPSEEVVKKMKNYWRQLLNAKLITQRKFDNLTKAERGGLSELDKAGFIKRQLVETRQITKHVAQILDSRMNTKYDENDKLIREVKVITLKSKLVSDFRKDFQFYKVREINNYHHAHDAYLNAVVGTALIKKYPKLESEFVYGDYKVYDVRKMIAKSEQEIGKATAKYFFYSNIMNFFKTEITLANGEIRKRPLIETNGETGEIVWDKGRDFATVRKVLSMPQVNIVKKTEVQTGGFSKESILPKRNSDKLIARKKDWDPKKYGGFDSPTVAYSVLVVAKVEKGKSKKLKSVKELLGITIMERSSFEKNPIDFLEAKGYKEVKKDLIIKLPKYSLFELENGRKRMLASAGELQKGNELALPSKYVNFLYLASHYEKLKGSPEDNEQKQLFVEQHKHYLDEIIEQISEFSKRVILADANLDKVLSAYNKHRDKPIREQAENIIHLFTLTNLGAPAAFKYFDTTIDRKRYTSTKEVLDATLIHQSITGLYETRIDLSQLGGDGGGGGGSGGGGSGGGGSGGGGSGGGVLDTPPSHIGLEHLPPPPEVPQFPLNLERLQALQDLVHRSLEAGYISPWDGPGNNPVFPVRKPNGAWRFVHDLRATNALTKPIPALSPGPPDLTAPPTHPPHIICLDLKDAFFQIPVEDRFRFYLSFTLPSPGGLQPHRRFAWRVLPQGFINSPALFQRALQEPLRQVSAAFSQSLLVSYMDDILYASPTEEQRSQCYQALAARLRDLGFQVASEKTSQTPSPVPFLGQMVHEQIVTYQSLPTLQISSPISLHQLQAVLGDLQWVSRGTPTTRRPLQLLYSSLKRHHDPRAIIQLSPEQLQGIAELRQALSHNARSRYNEQEPLLAYVHLTRAGSTLVLFQKGAQFPLAYFQTPLTDNQASPWGLLLLLGCQYLQTQALSSYAKPILKYYHNLPKTSLDNWIQSSEDPRVQELLQLWPQISSQGIQPPGPWKTLITRAEVFLTPQFSPDPIPAALCLFSDGATGRGAYCLWKDHLLDFQAVPAPESAQKGELAGLLAGLAAAPPEPVNIWVDSKYLYSLLRTWVLGAWLQPDPVPSYALLYKSLLRHPAIVVGHVRSHSSASHPIASLNNYVDQLAGKRTADGSEFEKRTADGSEFESPKKKAKVE

SEQ ID NO: 523 - protein, 1995 aa, synthetic construct
MPAAKRVKLDGGDKKYSIGLDIGTNSVGWAVITDEYKVPSKKFKVLGNTDRHSIKKNLIGALLFDSGETAEATRLKRTARRRYTRRKNRICYLQEIFSNEMAKVDDSFFHRLEESFLVEEDKKHERHPIFGNIVDEVAYHEKYPTIYHLRKKLVDSTDKADLRLIYLALAHMIKFRGHFLIEGDLNPDNSDVDKLFIQLVQTYNQLFEENPINASGVDAKAILSARLSKSRRLENLIAQLPGEKKNGLFGNLIALSLGLTPNFKSNFDLAEDAKLQLSKDTYDDDLDNLLAQIGDQYADLFLAAKNLSDAILLSDILRVNTEITKAPLSASMIKRYDEHHQDLTLLKALVRQQLPEKYKEIFFDQSKNGYAGYIDGGASQEEFYKFIKPILEKMDGTEELLVKLNREDLLRKQRTFDNGSIPHQIHLGELHAILRRQEDFYPFLKDNREKIEKILTFRIPYYVGPLARGNSRFAWMTRKSEETITPWNFEEVVDKGASAQSFIERMTNFDKNLPNEKVLPKHSLLYEYFTVYNELTKVKYVTEGMRKPAFLSGEQKKAIVDLLFKTNRKVTVKQLKEDYFKKIECFDSVEISGVEDRFNASLGTYHDLLKIIKDKDFLDNEENEDILEDIVLTLTLFEDREMIEERLKTYAHLFDDKVMKQLKRRRYTGWGRLSRKLINGIRDKQSGKTILDFLKSDGFANRNFMQLIHDDSLTFKEDIQKAQVSGQGDSLHEHIANLAGSPAIKKGILQTVKVVDELVKVMGRHKPENIVIEMARENQTTQKGQKNSRERMKRIEEGIKELGSQILKEHPVENTQLQNEKLYLYYLQNGRDMYVDQELDINRLSDYDVDHIVPQSFLKDDSIDNKVLTRSDKARGKSDNVPSEEVVKKMKNYWRQLLNAKLITQRKFDNLTKAERGGLSELDKAGFIKRQLVETRQITKHVAQILDSRMNTKYDENDKLIREVKVITLKSKLVSDFRKDFQFYKVREINNYHHAHDAYLNAVVGTALIKKYPKLESEFVYGDYKVYDVRKMIAKSEQEIGKATAKYFFYSNIMNFFKTEITLANGEIRKRPLIETNGETGEIVWDKGRDFATVRKVLSMPQVNIVKKTEVQTGGFSKESILPKRNSDKLIARKKDWDPKKYGGFDSPTVAYSVLVVAKVEKGKSKKLKSVKELLGITIMERSSFEKNPIDFLEAKGYKEVKKDLIIKLPKYSLFELENGRKRMLASAGELQKGNELALPSKYVNFLYLASHYEKLKGSPEDNEQKQLFVEQHKHYLDEIIEQISEFSKRVILADANLDKVLSAYNKHRDKPIREQAENIIHLFTLTNLGAPAAFKYFDTTIDRKRYTSTKEVLDATLIHQSITGLYETRIDLSQLGGDGGGGGGGGGGVLDTPPSHIGLEHLPPPPEVPQFPLNLERLQALQDLVHRSLEAGYISPWDGPGNNPVFPVRKPNGAWRFVHDLRATNALTKPIPALSPGPPDLTAPPTHPPHIICLDLKDAFFQIPVEDRFRFYLSFTLPSPGGLQPHRRFAWRVLPQGFINSPALFQRALQEPLRQVSAAFSQSLLVSYMDDILYASPTEEQRSQCYQALAARLRDLGFQVASEKTSQTPSPVPFLGQMVHEQIVTYQSLPTLQISSPISLHQLQAVLGDLQWVSRGTPTTRRPLQLLYSSLKRHHDPRAIIQLSPEQLQGIAELRQALSHNARSRYNEQEPLLAYVHLTRAGSTLVLFQKGAQFPLAYFQTPLTDNQASPWGLLLLLGCQYLQTQALSSYAKPILKYYHNLPKTSLDNWIQSSEDPRVQELLQLWPQISSQGIQPPGPWKTLITRAEVFLTPQFSPDPIPAALCLFSDGATGRGAYCLWKDHLLDFQAVPAPESAQKGELAGLLAGLAAAPPEPVNIWVDSKYLYSLLRTWVLGAWLQPDPVPSYALLYKSLLRHPAIVVGHVRSHSSASHPIASLNNYVDQLAGKRTADGSEFEKRTADGSEFESPKKKAKVE

SEQ ID NO: 524 - protein, 2122 aa, synthetic construct
MPAAKRVKLDGGDKKYSIGLDIGTNSVGWAVITDEYKVPSKKFKVLGNTDRHSIKKNLIGALLFDSGETAEATRLKRTARRRYTRRKNRICYLQEIFSNEMAKVDDSFFHRLEESFLVEEDKKHERHPIFGNIVDEVAYHEKYPTIYHLRKKLVDSTDKADLRLIYLALAHMIKFRGHFLIEGDLNPDNSDVDKLFIQLVQTYNQLFEENPINASGVDAKAILSARLSKSRRLENLIAQLPGEKKNGLFGNLIALSLGLTPNFKSNFDLAEDAKLQLSKDTYDDDLDNLLAQIGDQYADLFLAAKNLSDAILLSDILRVNTEITKAPLSASMIKRYDEHHQDLTLLKALVRQQLPEKYKEIFFDQSKNGYAGYIDGGASQEEFYKFIKPILEKMDGTEELLVKLNREDLLRKQRTFDNGSIPHQIHLGELHAILRRQEDFYPFLKDNREKIEKILTFRIPYYVGPLARGNSRFAWMTRKSEETITPWNFEEVVDKGASAQSFIERMTNFDKNLPNEKVLPKHSLLYEYFTVYNELTKVKYVTEGMRKPAFLSGEQKKAIVDLLFKTNRKVTVKQLKEDYFKKIECFDSVEISGVEDRFNASLGTYHDLLKIIKDKDFLDNEENEDILEDIVLTLTLFEDREMIEERLKTYAHLFDDKVMKQLKRRRYTGWGRLSRKLINGIRDKQSGKTILDFLKSDGFANRNFMQLIHDDSLTFKEDIQKAQVSGQGDSLHEHIANLAGSPAIKKGILQTVKVVDELVKVMGRHKPENIVIEMARENQTTQKGQKNSRERMKRIEEGIKELGSQILKEHPVENTQLQNEKLYLYYLQNGRDMYVDQELDINRLSDYDVDHIVPQSFLKDDSIDNKVLTRSDKARGKSDNVPSEEVVKKMKNYWRQLLNAKLITQRKFDNLTKAERGGLSELDKAGFIKRQLVETRQITKHVAQILDSRMNTKYDENDKLIREVKVITLKSKLVSDFRKDFQFYKVREINNYHHAHDAYLNAVVGTALIKKYPKLESEFVYGDYKVYDVRKMIAKSEQEIGKATAKYFFYSNIMNFFKTEITLANGEIRKRPLIETNGETGEIVWDKGRDFATVRKVLSMPQVNIVKKTEVQTGGFSKESILPKRNSDKLIARKKDWDPKKYGGFDSPTVAYSVLVVAKVEKGKSKKLKSVKELLGITIMERSSFEKNPIDFLEAKGYKEVKKDLIIKLPKYSLFELENGRKRMLASAGELQKGNELALPSKYVNFLYLASHYEKLKGSPEDNEQKQLFVEQHKHYLDEIIEQISEFSKRVILADANLDKVLSAYNKHRDKPIREQAENIIHLFTLTNLGAPAAFKYFDTTIDRKRYTSTKEVLDATLIHQSITGLYETRIDLSQLGGDGGAEAAAKEAAAKEAAAKEAAAKALEAEAAAKEAAAKEAAAKEAAAKAGGIPWLMKKPLQLTTLVPLQEYEERLLKQTMLTGSYKEKLQSLFLKYDALWQHWENQVGHRRIKPHHIATGTVNPRPQKQYPINPKAKASIQTVINDLLKQGVLIQQNSIMNTPVYPVPKPDGKWRMVLDYREVNKTIPLIAAQNQHSAGILSSIFRGKYKTTLDLSNGFWAHSITPESYWLTAFTWLGQQYCWTRLPQGFLNSPALFTADVVDLLKEVPNVQVYVDDIYISHDDPREHLEQLEKVFSLLLNAGYVVSLKKSEIAQHEVEFLGFNITKEGRGLTETFKQKLLNITPPRDLKQLQSILGLLNFARNFIPNFSELVKPLYNIIATANGKYITWTTDNSQQLQNIISMLNSAENLEERNPEVRLIMKVNTSPSAGYIRFYNEFAKRPIMYLNYVYTKAEVKFTNTEKLLTTIHKGLIKALDLGMGQEILVYSPIVSMTKIQKTPLPERKALPIRWITWMSYLEDPRIQFHYDKTLPELQQVPTVTDDIIAKIKHPSEFSMVFYTDGSAIKHPNVNKSHNAGMGIAQVQFKPEFTVINTWSIPLGDHTAQLAEVAAVEFACKKALKIDGPVLIVTDSFYVAESVNKELPYWQSNGFFNNKKKPLKHVSKWKSIADCIQLKPDIIIIHEKGHQPTASTFHTEGNNLADKLATQGSYVVNAGKRTADGSEFEKRTADGSEFESPKKKAKVE

SEQ ID NO: 525 - protein, 2096 aa, synthetic construct
MPAAKRVKLDGGDKKYSIGLDIGTNSVGWAVITDEYKVPSKKFKVLGNTDRHSIKKNLIGALLFDSGETAEATRLKRTARRRYTRRKNRICYLQEIFSNEMAKVDDSFFHRLEESFLVEEDKKHERHPIFGNIVDEVAYHEKYPTIYHLRKKLVDSTDKADLRLIYLALAHMIKFRGHFLIEGDLNPDNSDVDKLFIQLVQTYNQLFEENPINASGVDAKAILSARLSKSRRLENLIAQLPGEKKNGLFGNLIALSLGLTPNFKSNFDLAEDAKLQLSKDTYDDDLDNLLAQIGDQYADLFLAAKNLSDAILLSDILRVNTEITKAPLSASMIKRYDEHHQDLTLLKALVRQQLPEKYKEIFFDQSKNGYAGYIDGGASQEEFYKFIKPILEKMDGTEELLVKLNREDLLRKQRTFDNGSIPHQIHLGELHAILRRQEDFYPFLKDNREKIEKILTFRIPYYVGPLARGNSRFAWMTRKSEETITPWNFEEVVDKGASAQSFIERMTNFDKNLPNEKVLPKHSLLYEYFTVYNELTKVKYVTEGMRKPAFLSGEQKKAIVDLLFKTNRKVTVKQLKEDYFKKIECFDSVEISGVEDRFNASLGTYHDLLKIIKDKDFLDNEENEDILEDIVLTLTLFEDREMIEERLKTYAHLFDDKVMKQLKRRRYTGWGRLSRKLINGIRDKQSGKTILDFLKSDGFANRNFMQLIHDDSLTFKEDIQKAQVSGQGDSLHEHIANLAGSPAIKKGILQTVKVVDELVKVMGRHKPENIVIEMARENQTTQKGQKNSRERMKRIEEGIKELGSQILKEHPVENTQLQNEKLYLYYLQNGRDMYVDQELDINRLSDYDVDHIVPQSFLKDDSIDNKVLTRSDKARGKSDNVPSEEVVKKMKNYWRQLLNAKLITQRKFDNLTKAERGGLSELDKAGFIKRQLVETRQITKHVAQILDSRMNTKYDENDKLIREVKVITLKSKLVSDFRKDFQFYKVREINNYHHAHDAYLNAVVGTALIKKYPKLESEFVYGDYKVYDVRKMIAKSEQEIGKATAKYFFYSNIMNFFKTEITLANGEIRKRPLIETNGETGEIVWDKGRDFATVRKVLSMPQVNIVKKTEVQTGGFSKESILPKRNSDKLIARKKDWDPKKYGGFDSPTVAYSVLVVAKVEKGKSKKLKSVKELLGITIMERSSFEKNPIDFLEAKGYKEVKKDLIIKLPKYSLFELENGRKRMLASAGELQKGNELALPSKYVNFLYLASHYEKLKGSPEDNEQKQLFVEQHKHYLDEIIEQISEFSKRVILADANLDKVLSAYNKHRDKPIREQAENIIHLFTLTNLGAPAAFKYFDTTIDRKRYTSTKEVLDATLIHQSITGLYETRIDLSQLGGDGGEAAAKEAAAKEAAAKEAAAKGGIPWLMKKPLQLTTLVPLQEYEERLLKQTMLTGSYKEKLQSLFLKYDALWQHWENQVGHRRIKPHHIATGTVNPRPQKQYPINPKAKASIQTVINDLLKQGVLIQQNSIMNTPVYPVPKPDGKWRMVLDYREVNKTIPLIAAQNQHSAGILSSIFRGKYKTTLDLSNGFWAHSITPESYWLTAFTWLGQQYCWTRLPQGFLNSPALFTADVVDLLKEVPNVQVYVDDIYISHDDPREHLEQLEKVFSLLLNAGYVVSLKKSEIAQHEVEFLGFNITKEGRGLTETFKQKLLNITPPRDLKQLQSILGLLNFARNFIPNFSELVKPLYNIIATANGKYITWTTDNSQQLQNIISMLNSAENLEERNPEVRLIMKVNTSPSAGYIRFYNEFAKRPIMYLNYVYTKAEVKFTNTEKLLTTIHKGLIKALDLGMGQEILVYSPIVSMTKIQKTPLPERKALPIRWITWMSYLEDPRIQFHYDKTLPELQQVPTVTDDIIAKIKHPSEFSMVFYTDGSAIKHPNVNKSHNAGMGIAQVQFKPEFTVINTWSIPLGDHTAQLAEVAAVEFACKKALKIDGPVLIVTDSFYVAESVNKELPYWQSNGFFNNKKKPLKHVSKWKSIADCIQLKPDIIIIHEKGHQPTASTFHTEGNNLADKLATQGSYVVNAGKRTADGSEFEKRTADGSEFESPKKKAKVE

SEQ ID NO: 526 - protein, 2087 aa, synthetic construct
MPAAKRVKLDGGDKKYSIGLDIGTNSVGWAVITDEYKVPSKKFKVLGNTDRHSIKKNLIGALLFDSGETAEATRLKRTARRRYTRRKNRICYLQEIFSNEMAKVDDSFFHRLEESFLVEEDKKHERHPIFGNIVDEVAYHEKYPTIYHLRKKLVDSTDKADLRLIYLALAHMIKFRGHFLIEGDLNPDNSDVDKLFIQLVQTYNQLFEENPINASGVDAKAILSARLSKSRRLENLIAQLPGEKKNGLFGNLIALSLGLTPNFKSNFDLAEDAKLQLSKDTYDDDLDNLLAQIGDQYADLFLAAKNLSDAILLSDILRVNTEITKAPLSASMIKRYDEHHQDLTLLKALVRQQLPEKYKEIFFDQSKNGYAGYIDGGASQEEFYKFIKPILEKMDGTEELLVKLNREDLLRKQRTFDNGSIPHQIHLGELHAILRRQEDFYPFLKDNREKIEKILTFRIPYYVGPLARGNSRFAWMTRKSEETITPWNFEEVVDKGASAQSFIERMTNFDKNLPNEKVLPKHSLLYEYFTVYNELTKVKYVTEGMRKPAFLSGEQKKAIVDLLFKTNRKVTVKQLKEDYFKKIECFDSVEISGVEDRFNASLGTYHDLLKIIKDKDFLDNEENEDILEDIVLTLTLFEDREMIEERLKTYAHLFDDKVMKQLKRRRYTGWGRLSRKLINGIRDKQSGKTILDFLKSDGFANRNFMQLIHDDSLTFKEDIQKAQVSGQGDSLHEHIANLAGSPAIKKGILQTVKVVDELVKVMGRHKPENIVIEMARENQTTQKGQKNSRERMKRIEEGIKELGSQILKEHPVENTQLQNEKLYLYYLQNGRDMYVDQELDINRLSDYDVDHIVPQSFLKDDSIDNKVLTRSDKARGKSDNVPSEEVVKKMKNYWRQLLNAKLITQRKFDNLTKAERGGLSELDKAGFIKRQLVETRQITKHVAQILDSRMNTKYDENDKLIREVKVITLKSKLVSDFRKDFQFYKVREINNYHHAHDAYLNAVVGTALIKKYPKLESEFVYGDYKVYDVRKMIAKSEQEIGKATAKYFFYSNIMNFFKTEITLANGEIRKRPLIETNGETGEIVWDKGRDFATVRKVLSMPQVNIVKKTEVQTGGFSKESILPKRNSDKLIARKKDWDPKKYGGFDSPTVAYSVLVVAKVEKGKSKKLKSVKELLGITIMERSSFEKNPIDFLEAKGYKEVKKDLIIKLPKYSLFELENGRKRMLASAGELQKGNELALPSKYVNFLYLASHYEKLKGSPEDNEQKQLFVEQHKHYLDEIIEQISEFSKRVILADANLDKVLSAYNKHRDKPIREQAENIIHLFTLTNLGAPAAFKYFDTTIDRKRYTSTKEVLDATLIHQSITGLYETRIDLSQLGGDGGGGSEAAAKPAPGGIPWLMKKPLQLTTLVPLQEYEERLLKQTMLTGSYKEKLQSLFLKYDALWQHWENQVGHRRIKPHHIATGTVNPRPQKQYPINPKAKASIQTVINDLLKQGVLIQQNSIMNTPVYPVPKPDGKWRMVLDYREVNKTIPLIAAQNQHSAGILSSIFRGKYKTTLDLSNGFWAHSITPESYWLTAFTWLGQQYCWTRLPQGFLNSPALFTADVVDLLKEVPNVQVYVDDIYISHDDPREHLEQLEKVFSLLLNAGYVVSLKKSEIAQHEVEFLGFNITKEGRGLTETFKQKLLNITPPRDLKQLQSILGLLNFARNFIPNFSELVKPLYNIIATANGKYITWTTDNSQQLQNIISMLNSAENLEERNPEVRLIMKVNTSPSAGYIRFYNEFAKRPIMYLNYVYTKAEVKFTNTEKLLTTIHKGLIKALDLGMGQEILVYSPIVSMTKIQKTPLPERKALPIRWITWMSYLEDPRIQFHYDKTLPELQQVPTVTDDIIAKIKHPSEFSMVFYTDGSAIKHPNVNKSHNAGMGIAQVQFKPEFTVINTWSIPLGDHTAQLAEVAAVEFACKKALKIDGPVLIVTDSFYVAESVNKELPYWQSNGFFNNKKKPLKHVSKWKSIADCIQLKPDIIIIHEKGHQPTASTFHTEGNNLADKLATQGSYVVNAGKRTADGSEFEKRTADGSEFESPKKKAKVE

SEQ ID NO: 527 - protein, 2109 aa, synthetic construct
MPAAKRVKLDGGDKKYSIGLDIGTNSVGWAVITDEYKVPSKKFKVLGNTDRHSIKKNLIGALLFDSGETAEATRLKRTARRRYTRRKNRICYLQEIFSNEMAKVDDSFFHRLEESFLVEEDKKHERHPIFGNIVDEVAYHEKYPTIYHLRKKLVDSTDKADLRLIYLALAHMIKFRGHFLIEGDLNPDNSDVDKLFIQLVQTYNQLFEENPINASGVDAKAILSARLSKSRRLENLIAQLPGEKKNGLFGNLIALSLGLTPNFKSNFDLAEDAKLQLSKDTYDDDLDNLLAQIGDQYADLFLAAKNLSDAILLSDILRVNTEITKAPLSASMIKRYDEHHQDLTLLKALVRQQLPEKYKEIFFDQSKNGYAGYIDGGASQEEFYKFIKPILEKMDGTEELLVKLNREDLLRKQRTFDNGSIPHQIHLGELHAILRRQEDFYPFLKDNREKIEKILTFRIPYYVGPLARGNSRFAWMTRKSEETITPWNFEEVVDKGASAQSFIERMTNFDKNLPNEKVLPKHSLLYEYFTVYNELTKVKYVTEGMRKPAFLSGEQKKAIVDLLFKTNRKVTVKQLKEDYFKKIECFDSVEISGVEDRFNASLGTYHDLLKIIKDKDFLDNEENEDILEDIVLTLTLFEDREMIEERLKTYAHLFDDKVMKQLKRRRYTGWGRLSRKLINGIRDKQSGKTILDFLKSDGFANRNFMQLIHDDSLTFKEDIQKAQVSGQGDSLHEHIANLAGSPAIKKGILQTVKVVDELVKVMGRHKPENIVIEMARENQTTQKGQKNSRERMKRIEEGIKELGSQILKEHPVENTQLQNEKLYLYYLQNGRDMYVDQELDINRLSDYDVDHIVPQSFLKDDSIDNKVLTRSDKARGKSDNVPSEEVVKKMKNYWRQLLNAKLITQRKFDNLTKAERGGLSELDKAGFIKRQLVETRQITKHVAQILDSRMNTKYDENDKLIREVKVITLKSKLVSDFRKDFQFYKVREINNYHHAHDAYLNAVVGTALIKKYPKLESEFVYGDYKVYDVRKMIAKSEQEIGKATAKYFFYSNIMNFFKTEITLANGEIRKRPLIETNGETGEIVWDKGRDFATVRKVLSMPQVNIVKKTEVQTGGFSKESILPKRNSDKLIARKKDWDPKKYGGFDSPTVAYSVLVVAKVEKGKSKKLKSVKELLGITIMERSSFEKNPIDFLEAKGYKEVKKDLIIKLPKYSLFELENGRKRMLASAGELQKGNELALPSKYVNFLYLASHYEKLKGSPEDNEQKQLFVEQHKHYLDEIIEQISEFSKRVILADANLDKVLSAYNKHRDKPIREQAENIIHLFTLTNLGAPAAFKYFDTTIDRKRYTSTKEVLDATLIHQSITGLYETRIDLSQLGGDGGSGGSSGGSSGSETPGTSESATPESSGGSSGGSSGGIPWLMKKPLQLTTLVPLQEYEERLLKQTMLTGSYKEKLQSLFLKYDALWQHWENQVGHRRIKPHHIATGTVNPRPQKQYPINPKAKASIQTVINDLLKQGVLIQQNSIMNTPVYPVPKPDGKWRMVLDYREVNKTIPLIAAQNQHSAGILSSIFRGKYKTTLDLSNGFWAHSITPESYWLTAFTWLGQQYCWTRLPQGFLNSPALFTADVVDLLKEVPNVQVYVDDIYISHDDPREHLEQLEKVFSLLLNAGYVVSLKKSEIAQHEVEFLGFNITKEGRGLTETFKQKLLNITPPRDLKQLQSILGLLNFARNFIPNFSELVKPLYNIIATANGKYITWTTDNSQQLQNIISMLNSAENLEERNPEVRLIMKVNTSPSAGYIRFYNEFAKRPIMYLNYVYTKAEVKFTNTEKLLTTIHKGLIKALDLGMGQEILVYSPIVSMTKIQKTPLPERKALPIRWITWMSYLEDPRIQFHYDKTLPELQQVPTVTDDIIAKIKHPSEFSMVFYTDGSAIKHPNVNKSHNAGMGIAQVQFKPEFTVINTWSIPLGDHTAQLAEVAAVEFACKKALKIDGPVLIVTDSFYVAESVNKELPYWQSNGFFNNKKKPLKHVSKWKSIADCIQLKPDIIIIHEKGHQPTASTFHTEGNNLADKLATQGSYVVNAGKRTADGSEFEKRTADGSEFESPKKKAKVE

SEQ ID NO: 528 - protein, 2106 aa, synthetic construct
MPAAKRVKLDGGDKKYSIGLDIGTNSVGWAVITDEYKVPSKKFKVLGNTDRHSIKKNLIGALLFDSGETAEATRLKRTARRRYTRRKNRICYLQEIFSNEMAKVDDSFFHRLEESFLVEEDKKHERHPIFGNIVDEVAYHEKYPTIYHLRKKLVDSTDKADLRLIYLALAHMIKFRGHFLIEGDLNPDNSDVDKLFIQLVQTYNQLFEENPINASGVDAKAILSARLSKSRRLENLIAQLPGEKKNGLFGNLIALSLGLTPNFKSNFDLAEDAKLQLSKDTYDDDLDNLLAQIGDQYADLFLAAKNLSDAILLSDILRVNTEITKAPLSASMIKRYDEHHQDLTLLKALVRQQLPEKYKEIFFDQSKNGYAGYIDGGASQEEFYKFIKPILEKMDGTEELLVKLNREDLLRKQRTFDNGSIPHQIHLGELHAILRRQEDFYPFLKDNREKIEKILTFRIPYYVGPLARGNSRFAWMTRKSEETITPWNFEEVVDKGASAQSFIERMTNFDKNLPNEKVLPKHSLLYEYFTVYNELTKVKYVTEGMRKPAFLSGEQKKAIVDLLFKTNRKVTVKQLKEDYFKKIECFDSVEISGVEDRFNASLGTYHDLLKIIKDKDFLDNEENEDILEDIVLTLTLFEDREMIEERLKTYAHLFDDKVMKQLKRRRYTGWGRLSRKLINGIRDKQSGKTILDFLKSDGFANRNFMQLIHDDSLTFKEDIQKAQVSGQGDSLHEHIANLAGSPAIKKGILQTVKVVDELVKVMGRHKPENIVIEMARENQTTQKGQKNSRERMKRIEEGIKELGSQILKEHPVENTQLQNEKLYLYYLQNGRDMYVDQELDINRLSDYDVDHIVPQSFLKDDSIDNKVLTRSDKARGKSDNVPSEEVVKKMKNYWRQLLNAKLITQRKFDNLTKAERGGLSELDKAGFIKRQLVETRQITKHVAQILDSRMNTKYDENDKLIREVKVITLKSKLVSDFRKDFQFYKVREINNYHHAHDAYLNAVVGTALIKKYPKLESEFVYGDYKVYDVRKMIAKSEQEIGKATAKYFFYSNIMNFFKTEITLANGEIRKRPLIETNGETGEIVWDKGRDFATVRKVLSMPQVNIVKKTEVQTGGFSKESILPKRNSDKLIARKKDWDPKKYGGFDSPTVAYSVLVVAKVEKGKSKKLKSVKELLGITIMERSSFEKNPIDFLEAKGYKEVKKDLIIKLPKYSLFELENGRKRMLASAGELQKGNELALPSKYVNFLYLASHYEKLKGSPEDNEQKQLFVEQHKHYLDEIIEQISEFSKRVILADANLDKVLSAYNKHRDKPIREQAENIIHLFTLTNLGAPAAFKYFDTTIDRKRYTSTKEVLDATLIHQSITGLYETRIDLSQLGGDGGGGGGSGGGGSGGGGSGGGGSGGGGSGGGGSGGIPWLMKKPLQLTTLVPLQEYEERLLKQTMLTGSYKEKLQSLFLKYDALWQHWENQVGHRRIKPHHIATGTVNPRPQKQYPINPKAKASIQTVINDLLKQGVLIQQNSIMNTPVYPVPKPDGKWRMVLDYREVNKTIPLIAAQNQHSAGILSSIFRGKYKTTLDLSNGFWAHSITPESYWLTAFTWLGQQYCWTRLPQGFLNSPALFTADVVDLLKEVPNVQVYVDDIYISHDDPREHLEQLEKVFSLLLNAGYVVSLKKSEIAQHEVEFLGFNITKEGRGLTETFKQKLLNITPPRDLKQLQSILGLLNFARNFIPNFSELVKPLYNIIATANGKYITWTTDNSQQLQNIISMLNSAENLEERNPEVRLIMKVNTSPSAGYIRFYNEFAKRPIMYLNYVYTKAEVKFTNTEKLLTTIHKGLIKALDLGMGQEILVYSPIVSMTKIQKTPLPERKALPIRWITWMSYLEDPRIQFHYDKTLPELQQVPTVTDDIIAKIKHPSEFSMVFYTDGSAIKHPNVNKSHNAGMGIAQVQFKPEFTVINTWSIPLGDHTAQLAEVAAVEFACKKALKIDGPVLIVTDSFYVAESVNKELPYWQSNGFFNNKKKPLKHVSKWKSIADCIQLKPDIIIIHEKGHQPTASTFHTEGNNLADKLATQGSYVVNAGKRTADGSEFEKRTADGSEFESPKKKAKVE

SEQ ID NO: 529 - protein, 2082 aa, synthetic construct
MPAAKRVKLDGGDKKYSIGLDIGTNSVGWAVITDEYKVPSKKFKVLGNTDRHSIKKNLIGALLFDSGETAEATRLKRTARRRYTRRKNRICYLQEIFSNEMAKVDDSFFHRLEESFLVEEDKKHERHPIFGNIVDEVAYHEKYPTIYHLRKKLVDSTDKADLRLIYLALAHMIKFRGHFLIEGDLNPDNSDVDKLFIQLVQTYNQLFEENPINASGVDAKAILSARLSKSRRLENLIAQLPGEKKNGLFGNLIALSLGLTPNFKSNFDLAEDAKLQLSKDTYDDDLDNLLAQIGDQYADLFLAAKNLSDAILLSDILRVNTEITKAPLSASMIKRYDEHHQDLTLLKALVRQQLPEKYKEIFFDQSKNGYAGYIDGGASQEEFYKFIKPILEKMDGTEELLVKLNREDLLRKQRTFDNGSIPHQIHLGELHAILRRQEDFYPFLKDNREKIEKILTFRIPYYVGPLARGNSRFAWMTRKSEETITPWNFEEVVDKGASAQSFIERMTNFDKNLPNEKVLPKHSLLYEYFTVYNELTKVKYVTEGMRKPAFLSGEQKKAIVDLLFKTNRKVTVKQLKEDYFKKIECFDSVEISGVEDRFNASLGTYHDLLKIIKDKDFLDNEENEDILEDIVLTLTLFEDREMIEERLKTYAHLFDDKVMKQLKRRRYTGWGRLSRKLINGIRDKQSGKTILDFLKSDGFANRNFMQLIHDDSLTFKEDIQKAQVSGQGDSLHEHIANLAGSPAIKKGILQTVKVVDELVKVMGRHKPENIVIEMARENQTTQKGQKNSRERMKRIEEGIKELGSQILKEHPVENTQLQNEKLYLYYLQNGRDMYVDQELDINRLSDYDVDHIVPQSFLKDDSIDNKVLTRSDKARGKSDNVPSEEVVKKMKNYWRQLLNAKLITQRKFDNLTKAERGGLSELDKAGFIKRQLVETRQITKHVAQILDSRMNTKYDENDKLIREVKVITLKSKLVSDFRKDFQFYKVREINNYHHAHDAYLNAVVGTALIKKYPKLESEFVYGDYKVYDVRKMIAKSEQEIGKATAKYFFYSNIMNFFKTEITLANGEIRKRPLIETNGETGEIVWDKGRDFATVRKVLSMPQVNIVKKTEVQTGGFSKESILPKRNSDKLIARKKDWDPKKYGGFDSPTVAYSVLVVAKVEKGKSKKLKSVKELLGITIMERSSFEKNPIDFLEAKGYKEVKKDLIIKLPKYSLFELENGRKRMLASAGELQKGNELALPSKYVNFLYLASHYEKLKGSPEDNEQKQLFVEQHKHYLDEIIEQISEFSKRVILADANLDKVLSAYNKHRDKPIREQAENIIHLFTLTNLGAPAAFKYFDTTIDRKRYTSTKEVLDATLIHQSITGLYETRIDLSQLGGDGGGGGGGGGGIPWLMKKPLQLTTLVPLQEYEERLLKQTMLTGSYKEKLQSLFLKYDALWQHWENQVGHRRIKPHHIATGTVNPRPQKQYPINPKAKASIQTVINDLLKQGVLIQQNSIMNTPVYPVPKPDGKWRMVLDYREVNKTIPLIAAQNQHSAGILSSIFRGKYKTTLDLSNGFWAHSITPESYWLTAFTWLGQQYCWTRLPQGFLNSPALFTADVVDLLKEVPNVQVYVDDIYISHDDPREHLEQLEKVFSLLLNAGYVVSLKKSEIAQHEVEFLGFNITKEGRGLTETFKQKLLNITPPRDLKQLQSILGLLNFARNFIPNFSELVKPLYNIIATANGKYITWTTDNSQQLQNIISMLNSAENLEERNPEVRLIMKVNTSPSAGYIRFYNEFAKRPIMYLNYVYTKAEVKFTNTEKLLTTIHKGLIKALDLGMGQEILVYSPIVSMTKIQKTPLPERKALPIRWITWMSYLEDPRIQFHYDKTLPELQQVPTVTDDIIAKIKHPSEFSMVFYTDGSAIKHPNVNKSHNAGMGIAQVQFKPEFTVINTWSIPLGDHTAQLAEVAAVEFACKKALKIDGPVLIVTDSFYVAESVNKELPYWQSNGFFNNKKKPLKHVSKWKSIADCIQLKPDIIIIHEKGHQPTASTFHTEGNNLADKLATQGSYVVNAGKRTADGSEFEKRTADGSEFESPKKKAKVE

SEQ ID NO: 530 - protein, 2087 aa, synthetic construct
MPAAKRVKLDGGDKKYSIGLDIGTNSVGWAVITDEYKVPSKKFKVLGNTDRHSIKKNLIGALLFDSGETAEATRLKRTARRRYTRRKNRICYLQEIFSNEMAKVDDSFFHRLEESFLVEEDKKHERHPIFGNIVDEVAYHEKYPTIYHLRKKLVDSTDKADLRLIYLALAHMIKFRGHFLIEGDLNPDNSDVDKLFIQLVQTYNQLFEENPINASGVDAKAILSARLSKSRRLENLIAQLPGEKKNGLFGNLIALSLGLTPNFKSNFDLAEDAKLQLSKDTYDDDLDNLLAQIGDQYADLFLAAKNLSDAILLSDILRVNTEITKAPLSASMIKRYDEHHQDLTLLKALVRQQLPEKYKEIFFDQSKNGYAGYIDGGASQEEFYKFIKPILEKMDGTEELLVKLNREDLLRKQRTFDNGSIPHQIHLGELHAILRRQEDFYPFLKDNREKIEKILTFRIPYYVGPLARGNSRFAWMTRKSEETITPWNFEEVVDKGASAQSFIERMTNFDKNLPNEKVLPKHSLLYEYFTVYNELTKVKYVTEGMRKPAFLSGEQKKAIVDLLFKTNRKVTVKQLKEDYFKKIECFDSVEISGVEDRFNASLGTYHDLLKIIKDKDFLDNEENEDILEDIVLTLTLFEDREMIEERLKTYAHLFDDKVMKQLKRRRYTGWGRLSRKLINGIRDKQSGKTILDFLKSDGFANRNFMQLIHDDSLTFKEDIQKAQVSGQGDSLHEHIANLAGSPAIKKGILQTVKVVDELVKVMGRHKPENIVIEMARENQTTQKGQKNSRERMKRIEEGIKELGSQILKEHPVENTQLQNEKLYLYYLQNGRDMYVDQELDINRLSDYDVDHIVPQSFLKDDSIDNKVLTRSDKARGKSDNVPSEEVVKKMKNYWRQLLNAKLITQRKFDNLTKAERGGLSELDKAGFIKRQLVETRQITKHVAQILDSRMNTKYDENDKLIREVKVITLKSKLVSDFRKDFQFYKVREINNYHHAHDAYLNAVVGTALIKKYPKLESEFVYGDYKVYDVRKMIAKSEQEIGKATAKYFFYSNIMNFFKTEITLANGEIRKRPLIETNGETGEIVWDKGRDFATVRKVLSMPQVNIVKKTEVQTGGFSKESILPKRNSDKLIARKKDWDPKKYGGFDSPTVAYSVLVVAKVEKGKSKKLKSVKELLGITIMERSSFEKNPIDFLEAKGYKEVKKDLIIKLPKYSLFELENGRKRMLASAGELQKGNELALPSKYVNFLYLASHYEKLKGSPEDNEQKQLFVEQHKHYLDEIIEQISEFSKRVILADANLDKVLSAYNKHRDKPIREQAENIIHLFTLTNLGAPAAFKYFDTTIDRKRYTSTKEVLDATLIHQSITGLYETRIDLSQLGGDGGGSSGGGEAAAKGGIPWLMKKPLQLTTLVPLQEYEERLLKQTMLTGSYKEKLQSLFLKYDALWQHWENQVGHRRIKPHHIATGTVNPRPQKQYPINPKAKASIQTVINDLLKQGVLIQQNSIMNTPVYPVPKPDGKWRMVLDYREVNKTIPLIAAQNQHSAGILSSIFRGKYKTTLDLSNGFWAHSITPESYWLTAFTWLGQQYCWTRLPQGFLNSPALFTADVVDLLKEVPNVQVYVDDIYISHDDPREHLEQLEKVFSLLLNAGYVVSLKKSEIAQHEVEFLGFNITKEGRGLTETFKQKLLNITPPRDLKQLQSILGLLNFARNFIPNFSELVKPLYNIIATANGKYITWTTDNSQQLQNIISMLNSAENLEERNPEVRLIMKVNTSPSAGYIRFYNEFAKRPIMYLNYVYTKAEVKFTNTEKLLTTIHKGLIKALDLGMGQEILVYSPIVSMTKIQKTPLPERKALPIRWITWMSYLEDPRIQFHYDKTLPELQQVPTVTDDIIAKIKHPSEFSMVFYTDGSAIKHPNVNKSHNAGMGIAQVQFKPEFTVINTWSIPLGDHTAQLAEVAAVEFACKKALKIDGPVLIVTDSFYVAESVNKELPYWQSNGFFNNKKKPLKHVSKWKSIADCIQLKPDIIIIHEKGHQPTASTFHTEGNNLADKLATQGSYVVNAGKRTADGSEFEKRTADGSEFESPKKKAKVE

SEQ ID NO: 531 - protein, 2082 aa, synthetic construct
MPAAKRVKLDGGDKKYSIGLDIGTNSVGWAVITDEYKVPSKKFKVLGNTDRHSIKKNLIGALLFDSGETAEATRLKRTARRRYTRRKNRICYLQEIFSNEMAKVDDSFFHRLEESFLVEEDKKHERHPIFGNIVDEVAYHEKYPTIYHLRKKLVDSTDKADLRLIYLALAHMIKFRGHFLIEGDLNPDNSDVDKLFIQLVQTYNQLFEENPINASGVDAKAILSARLSKSRRLENLIAQLPGEKKNGLFGNLIALSLGLTPNFKSNFDLAEDAKLQLSKDTYDDDLDNLLAQIGDQYADLFLAAKNLSDAILLSDILRVNTEITKAPLSASMIKRYDEHHQDLTLLKALVRQQLPEKYKEIFFDQSKNGYAGYIDGGASQEEFYKFIKPILEKMDGTEELLVKLNREDLLRKQRTFDNGSIPHQIHLGELHAILRRQEDFYPFLKDNREKIEKILTFRIPYYVGPLARGNSRFAWMTRKSEETITPWNFEEVVDKGASAQSFIERMTNFDKNLPNEKVLPKHSLLYEYFTVYNELTKVKYVTEGMRKPAFLSGEQKKAIVDLLFKTNRKVTVKQLKEDYFKKIECFDSVEISGVEDRFNASLGTYHDLLKIIKDKDFLDNEENEDILEDIVLTLTLFEDREMIEERLKTYAHLFDDKVMKQLKRRRYTGWGRLSRKLINGIRDKQSGKTILDFLKSDGFANRNFMQLIHDDSLTFKEDIQKAQVSGQGDSLHEHIANLAGSPAIKKGILQTVKVVDELVKVMGRHKPENIVIEMARENQTTQKGQKNSRERMKRIEEGIKELGSQILKEHPVENTQLQNEKLYLYYLQNGRDMYVDQELDINRLSDYDVDHIVPQSFLKDDSIDNKVLTRSDKARGKSDNVPSEEVVKKMKNYWRQLLNAKLITQRKFDNLTKAERGGLSELDKAGFIKRQLVETRQITKHVAQILDSRMNTKYDENDKLIREVKVITLKSKLVSDFRKDFQFYKVREINNYHHAHDAYLNAVVGTALIKKYPKLESEFVYGDYKVYDVRKMIAKSEQEIGKATAKYFFYSNIMNFFKTEITLANGEIRKRPLIETNGETGEIVWDKGRDFATVRKVLSMPQVNIVKKTEVQTGGFSKESILPKRNSDKLIARKKDWDPKKYGGFDSPTVAYSVLVVAKVEKGKSKKLKSVKELLGITIMERSSFEKNPIDFLEAKGYKEVKKDLIIKLPKYSLFELENGRKRMLASAGELQKGNELALPSKYVNFLYLASHYEKLKGSPEDNEQKQLFVEQHKHYLDEIIEQISEFSKRVILADANLDKVLSAYNKHRDKPIREQAENIIHLFTLTNLGAPAAFKYFDTTIDRKRYTSTKEVLDATLIHQSITGLYETRIDLSQLGGDGGGGSGGSGGIPWLMKKPLQLTTLVPLQEYEERLLKQTMLTGSYKEKLQSLFLKYDALWQHWENQVGHRRIKPHHIATGTVNPRPQKQYPINPKAKASIQTVINDLLKQGVLIQQNSIMNTPVYPVPKPDGKWRMVLDYREVNKTIPLIAAQNQHSAGILSSIFRGKYKTTLDLSNGFWAHSITPESYWLTAFTWLGQQYCWTRLPQGFLNSPALFTADVVDLLKEVPNVQVYVDDIYISHDDPREHLEQLEKVFSLLLNAGYVVSLKKSEIAQHEVEFLGFNITKEGRGLTETFKQKLLNITPPRDLKQLQSILGLLNFARNFIPNFSELVKPLYNIIATANGKYITWTTDNSQQLQNIISMLNSAENLEERNPEVRLIMKVNTSPSAGYIRFYNEFAKRPIMYLNYVYTKAEVKFTNTEKLLTTIHKGLIKALDLGMGQEILVYSPIVSMTKIQKTPLPERKALPIRWITWMSYLEDPRIQFHYDKTLPELQQVPTVTDDIIAKIKHPSEFSMVFYTDGSAIKHPNVNKSHNAGMGIAQVQFKPEFTVINTWSIPLGDHTAQLAEVAAVEFACKKALKIDGPVLIVTDSFYVAESVNKELPYWQSNGFFNNKKKPLKHVSKWKSIADCIQLKPDIIIIHEKGHQPTASTFHTEGNNLADKLATQGSYVVNAGKRTADGSEFEKRTADGSEFESPKKKAKVE

SEQ ID NO: 532 - protein, 2085 aa, synthetic construct
MPAAKRVKLDGGDKKYSIGLDIGTNSVGWAVITDEYKVPSKKFKVLGNTDRHSIKKNLIGALLFDSGETAEATRLKRTARRRYTRRKNRICYLQEIFSNEMAKVDDSFFHRLEESFLVEEDKKHERHPIFGNIVDEVAYHEKYPTIYHLRKKLVDSTDKADLRLIYLALAHMIKFRGHFLIEGDLNPDNSDVDKLFIQLVQTYNQLFEENPINASGVDAKAILSARLSKSRRLENLIAQLPGEKKNGLFGNLIALSLGLTPNFKSNFDLAEDAKLQLSKDTYDDDLDNLLAQIGDQYADLFLAAKNLSDAILLSDILRVNTEITKAPLSASMIKRYDEHHQDLTLLKALVRQQLPEKYKEIFFDQSKNGYAGYIDGGASQEEFYKFIKPILEKMDGTEELLVKLNREDLLRKQRTFDNGSIPHQIHLGELHAILRRQEDFYPFLKDNREKIEKILTFRIPYYVGPLARGNSRFAWMTRKSEETITPWNFEEVVDKGASAQSFIERMTNFDKNLPNEKVLPKHSLLYEYFTVYNELTKVKYVTEGMRKPAFLSGEQKKAIVDLLFKTNRKVTVKQLKEDYFKKIECFDSVEISGVEDRFNASLGTYHDLLKIIKDKDFLDNEENEDILEDIVLTLTLFEDREMIEERLKTYAHLFDDKVMKQLKRRRYTGWGRLSRKLINGIRDKQSGKTILDFLKSDGFANRNFMQLIHDDSLTFKEDIQKAQVSGQGDSLHEHIANLAGSPAIKKGILQTVKVVDELVKVMGRHKPENIVIEMARENQTTQKGQKNSRERMKRIEEGIKELGSQILKEHPVENTQLQNEKLYLYYLQNGRDMYVDQELDINRLSDYDVDHIVPQSFLKDDSIDNKVLTRSDKARGKSDNVPSEEVVKKMKNYWRQLLNAKLITQRKFDNLTKAERGGLSELDKAGFIKRQLVETRQITKHVAQILDSRMNTKYDENDKLIREVKVITLKSKLVSDFRKDFQFYKVREINNYHHAHDAYLNAVVGTALIKKYPKLESEFVYGDYKVYDVRKMIAKSEQEIGKATAKYFFYSNIMNFFKTEITLANGEIRKRPLIETNGETGEIVWDKGRDFATVRKVLSMPQVNIVKKTEVQTGGFSKESILPKRNSDKLIARKKDWDPKKYGGFDSPTVAYSVLVVAKVEKGKSKKLKSVKELLGITIMERSSFEKNPIDFLEAKGYKEVKKDLIIKLPKYSLFELENGRKRMLASAGELQKGNELALPSKYVNFLYLASHYEKLKGSPEDNEQKQLFVEQHKHYLDEIIEQISEFSKRVILADANLDKVLSAYNKHRDKPIREQAENIIHLFTLTNLGAPAAFKYFDTTIDRKRYTSTKEVLDATLIHQSITGLYETRIDLSQLGGDGGPAPGGGGGSGGIPWLMKKPLQLTTLVPLQEYEERLLKQTMLTGSYKEKLQSLFLKYDALWQHWENQVGHRRIKPHHIATGTVNPRPQKQYPINPKAKASIQTVINDLLKQGVLIQQNSIMNTPVYPVPKPDGKWRMVLDYREVNKTIPLIAAQNQHSAGILSSIFRGKYKTTLDLSNGFWAHSITPESYWLTAFTWLGQQYCWTRLPQGFLNSPALFTADVVDLLKEVPNVQVYVDDIYISHDDPREHLEQLEKVFSLLLNAGYVVSLKKSEIAQHEVEFLGFNITKEGRGLTETFKQKLLNITPPRDLKQLQSILGLLNFARNFIPNFSELVKPLYNIIATANGKYITWTTDNSQQLQNIISMLNSAENLEERNPEVRLIMKVNTSPSAGYIRFYNEFAKRPIMYLNYVYTKAEVKFTNTEKLLTTIHKGLIKALDLGMGQEILVYSPIVSMTKIQKTPLPERKALPIRWITWMSYLEDPRIQFHYDKTLPELQQVPTVTDDIIAKIKHPSEFSMVFYTDGSAIKHPNVNKSHNAGMGIAQVQFKPEFTVINTWSIPLGDHTAQLAEVAAVEFACKKALKIDGPVLIVTDSFYVAESVNKELPYWQSNGFFNNKKKPLKHVSKWKSIADCIQLKPDIIIIHEKGHQPTASTFHTEGNNLADKLATQGSYVVNAGKRTADGSEFEKRTADGSEFESPKKKAKVE

SEQ ID NO: 533 - protein, 2087 aa, synthetic construct
MPAAKRVKLDGGDKKYSIGLDIGTNSVGWAVITDEYKVPSKKFKVLGNTDRHSIKKNLIGALLFDSGETAEATRLKRTARRRYTRRKNRICYLQEIFSNEMAKVDDSFFHRLEESFLVEEDKKHERHPIFGNIVDEVAYHEKYPTIYHLRKKLVDSTDKADLRLIYLALAHMIKFRGHFLIEGDLNPDNSDVDKLFIQLVQTYNQLFEENPINASGVDAKAILSARLSKSRRLENLIAQLPGEKKNGLFGNLIALSLGLTPNFKSNFDLAEDAKLQLSKDTYDDDLDNLLAQIGDQYADLFLAAKNLSDAILLSDILRVNTEITKAPLSASMIKRYDEHHQDLTLLKALVRQQLPEKYKEIFFDQSKNGYAGYIDGGASQEEFYKFIKPILEKMDGTEELLVKLNREDLLRKQRTFDNGSIPHQIHLGELHAILRRQEDFYPFLKDNREKIEKILTFRIPYYVGPLARGNSRFAWMTRKSEETITPWNFEEVVDKGASAQSFIERMTNFDKNLPNEKVLPKHSLLYEYFTVYNELTKVKYVTEGMRKPAFLSGEQKKAIVDLLFKTNRKVTVKQLKEDYFKKIECFDSVEISGVEDRFNASLGTYHDLLKIIKDKDFLDNEENEDILEDIVLTLTLFEDREMIEERLKTYAHLFDDKVMKQLKRRRYTGWGRLSRKLINGIRDKQSGKTILDFLKSDGFANRNFMQLIHDDSLTFKEDIQKAQVSGQGDSLHEHIANLAGSPAIKKGILQTVKVVDELVKVMGRHKPENIVIEMARENQTTQKGQKNSRERMKRIEEGIKELGSQILKEHPVENTQLQNEKLYLYYLQNGRDMYVDQELDINRLSDYDVDHIVPQSFLKDDSIDNKVLTRSDKARGKSDNVPSEEVVKKMKNYWRQLLNAKLITQRKFDNLTKAERGGLSELDKAGFIKRQLVETRQITKHVAQILDSRMNTKYDENDKLIREVKVITLKSKLVSDFRKDFQFYKVREINNYHHAHDAYLNAVVGTALIKKYPKLESEFVYGDYKVYDVRKMIAKSEQEIGKATAKYFFYSNIMNFFKTEITLANGEIRKRPLIETNGETGEIVWDKGRDFATVRKVLSMPQVNIVKKTEVQTGGFSKESILPKRNSDKLIARKKDWDPKKYGGFDSPTVAYSVLVVAKVEKGKSKKLKSVKELLGITIMERSSFEKNPIDFLEAKGYKEVKKDLIIKLPKYSLFELENGRKRMLASAGELQKGNELALPSKYVNFLYLASHYEKLKGSPEDNEQKQLFVEQHKHYLDEIIEQISEFSKRVILADANLDKVLSAYNKHRDKPIREQAENIIHLFTLTNLGAPAAFKYFDTTIDRKRYTSTKEVLDATLIHQSITGLYETRIDLSQLGGDGGGGSGGGEAAAKGGIPWLMKKPLQLTTLVPLQEYEERLLKQTMLTGSYKEKLQSLFLKYDALWQHWENQVGHRRIKPHHIATGTVNPRPQKQYPINPKAKASIQTVINDLLKQGVLIQQNSIMNTPVYPVPKPDGKWRMVLDYREVNKTIPLIAAQNQHSAGILSSIFRGKYKTTLDLSNGFWAHSITPESYWLTAFTWLGQQYCWTRLPQGFLNSPALFTADVVDLLKEVPNVQVYVDDIYISHDDPREHLEQLEKVFSLLLNAGYVVSLKKSEIAQHEVEFLGFNITKEGRGLTETFKQKLLNITPPRDLKQLQSILGLLNFARNFIPNFSELVKPLYNIIATANGKYITWTTDNSQQLQNIISMLNSAENLEERNPEVRLIMKVNTSPSAGYIRFYNEFAKRPIMYLNYVYTKAEVKFTNTEKLLTTIHKGLIKALDLGMGQEILVYSPIVSMTKIQKTPLPERKALPIRWITWMSYLEDPRIQFHYDKTLPELQQVPTVTDDIIAKIKHPSEFSMVFYTDGSAIKHPNVNKSHNAGMGIAQVQFKPEFTVINTWSIPLGDHTAQLAEVAAVEFACKKALKIDGPVLIVTDSFYVAESVNKELPYWQSNGFFNNKKKPLKHVSKWKSIADCIQLKPDIIIIHEKGHQPTASTFHTEGNNLADKLATQGSYVVNAGKRTADGSEFEKRTADGSEFESPKKKAKVE

SEQ ID NO: 534 - protein, 2079 aa, synthetic construct
MPAAKRVKLDGGDKKYSIGLDIGTNSVGWAVITDEYKVPSKKFKVLGNTDRHSIKKNLIGALLFDSGETAEATRLKRTARRRYTRRKNRICYLQEIFSNEMAKVDDSFFHRLEESFLVEEDKKHERHPIFGNIVDEVAYHEKYPTIYHLRKKLVDSTDKADLRLIYLALAHMIKFRGHFLIEGDLNPDNSDVDKLFIQLVQTYNQLFEENPINASGVDAKAILSARLSKSRRLENLIAQLPGEKKNGLFGNLIALSLGLTPNFKSNFDLAEDAKLQLSKDTYDDDLDNLLAQIGDQYADLFLAAKNLSDAILLSDILRVNTEITKAPLSASMIKRYDEHHQDLTLLKALVRQQLPEKYKEIFFDQSKNGYAGYIDGGASQEEFYKFIKPILEKMDGTEELLVKLNREDLLRKQRTFDNGSIPHQIHLGELHAILRRQEDFYPFLKDNREKIEKILTFRIPYYVGPLARGNSRFAWMTRKSEETITPWNFEEVVDKGASAQSFIERMTNFDKNLPNEKVLPKHSLLYEYFTVYNELTKVKYVTEGMRKPAFLSGEQKKAIVDLLFKTNRKVTVKQLKEDYFKKIECFDSVEISGVEDRFNASLGTYHDLLKIIKDKDFLDNEENEDILEDIVLTLTLFEDREMIEERLKTYAHLFDDKVMKQLKRRRYTGWGRLSRKLINGIRDKQSGKTILDFLKSDGFANRNFMQLIHDDSLTFKEDIQKAQVSGQGDSLHEHIANLAGSPAIKKGILQTVKVVDELVKVMGRHKPENIVIEMARENQTTQKGQKNSRERMKRIEEGIKELGSQILKEHPVENTQLQNEKLYLYYLQNGRDMYVDQELDINRLSDYDVDHIVPQSFLKDDSIDNKVLTRSDKARGKSDNVPSEEVVKKMKNYWRQLLNAKLITQRKFDNLTKAERGGLSELDKAGFIKRQLVETRQITKHVAQILDSRMNTKYDENDKLIREVKVITLKSKLVSDFRKDFQFYKVREINNYHHAHDAYLNAVVGTALIKKYPKLESEFVYGDYKVYDVRKMIAKSEQEIGKATAKYFFYSNIMNFFKTEITLANGEIRKRPLIETNGETGEIVWDKGRDFATVRKVLSMPQVNIVKKTEVQTGGFSKESILPKRNSDKLIARKKDWDPKKYGGFDSPTVAYSVLVVAKVEKGKSKKLKSVKELLGITIMERSSFEKNPIDFLEAKGYKEVKKDLIIKLPKYSLFELENGRKRMLASAGELQKGNELALPSKYVNFLYLASHYEKLKGSPEDNEQKQLFVEQHKHYLDEIIEQISEFSKRVILADANLDKVLSAYNKHRDKPIREQAENIIHLFTLTNLGAPAAFKYFDTTIDRKRYTSTKEVLDATLIHQSITGLYETRIDLSQLGGDGGGSSGGIPWLMKKPLQLTTLVPLQEYEERLLKQTMLTGSYKEKLQSLFLKYDALWQHWENQVGHRRIKPHHIATGTVNPRPQKQYPINPKAKASIQTVINDLLKQGVLIQQNSIMNTPVYPVPKPDGKWRMVLDYREVNKTIPLIAAQNQHSAGILSSIFRGKYKTTLDLSNGFWAHSITPESYWLTAFTWLGQQYCWTRLPQGFLNSPALFNADVVDLLKEVPNVQVYVDDIYISHDDPREHLEQLEKVFSLLLNAGYVVSLKKSEIAQHEVEFLGFNITKEGRGLTETFKQKLLNITPPRDLKQLQSILGLLNFARNFIPNFSELVKPLYNIIATAPGKYITWTTDNSQQLQNIISMLNSAENLEERNPEVRLIMKVNTSPSAGYIRFYNEFAKRPIMYLNYVYTKAEVKFTNTEKLLTTIHKGLIKALDLGMGQEILVYSPIVSMTKIQKTPLPERKALPIRWITWMSYLEDPRIQFHYDKTLPELQQVPTVTDDIIAKIKHPSEFSMVFYTDGSAIKHPNVNKSHNAGMGIAQVQFKPEFTVINTWSIPLGDHTAQLAEVAAVEFACKKALKIDGPVLIVTDSFYVAESVNKELPYWQSNGFFNNKKKPLKHVSKWKSIADCIQLKPDIIIIHEKGHQPTASTFHTEGNNLADKLATQGSYVVNAGKRTADGSEFEKRTADGSEFESPKKKAKVE

SEQ ID NO: 535 - protein, 2082 aa, synthetic construct
MPAAKRVKLDGGDKKYSIGLDIGTNSVGWAVITDEYKVPSKKFKVLGNTDRHSIKKNLIGALLFDSGETAEATRLKRTARRRYTRRKNRICYLQEIFSNEMAKVDDSFFHRLEESFLVEEDKKHERHPIFGNIVDEVAYHEKYPTIYHLRKKLVDSTDKADLRLIYLALAHMIKFRGHFLIEGDLNPDNSDVDKLFIQLVQTYNQLFEENPINASGVDAKAILSARLSKSRRLENLIAQLPGEKKNGLFGNLIALSLGLTPNFKSNFDLAEDAKLQLSKDTYDDDLDNLLAQIGDQYADLFLAAKNLSDAILLSDILRVNTEITKAPLSASMIKRYDEHHQDLTLLKALVRQQLPEKYKEIFFDQSKNGYAGYIDGGASQEEFYKFIKPILEKMDGTEELLVKLNREDLLRKQRTFDNGSIPHQIHLGELHAILRRQEDFYPFLKDNREKIEKILTFRIPYYVGPLARGNSRFAWMTRKSEETITPWNFEEVVDKGASAQSFIERMTNFDKNLPNEKVLPKHSLLYEYFTVYNELTKVKYVTEGMRKPAFLSGEQKKAIVDLLFKTNRKVTVKQLKEDYFKKIECFDSVEISGVEDRFNASLGTYHDLLKIIKDKDFLDNEENEDILEDIVLTLTLFEDREMIEERLKTYAHLFDDKVMKQLKRRRYTGWGRLSRKLINGIRDKQSGKTILDFLKSDGFANRNFMQLIHDDSLTFKEDIQKAQVSGQGDSLHEHIANLAGSPAIKKGILQTVKVVDELVKVMGRHKPENIVIEMARENQTTQKGQKNSRERMKRIEEGIKELGSQILKEHPVENTQLQNEKLYLYYLQNGRDMYVDQELDINRLSDYDVDHIVPQSFLKDDSIDNKVLTRSDKARGKSDNVPSEEVVKKMKNYWRQLLNAKLITQRKFDNLTKAERGGLSELDKAGFIKRQLVETRQITKHVAQILDSRMNTKYDENDKLIREVKVITLKSKLVSDFRKDFQFYKVREINNYHHAHDAYLNAVVGTALIKKYPKLESEFVYGDYKVYDVRKMIAKSEQEIGKATAKYFFYSNIMNFFKTEITLANGEIRKRPLIETNGETGEIVWDKGRDFATVRKVLSMPQVNIVKKTEVQTGGFSKESILPKRNSDKLIARKKDWDPKKYGGFDSPTVAYSVLVVAKVEKGKSKKLKSVKELLGITIMERSSFEKNPIDFLEAKGYKEVKKDLIIKLPKYSLFELENGRKRMLASAGELQKGNELALPSKYVNFLYLASHYEKLKGSPEDNEQKQLFVEQHKHYLDEIIEQISEFSKRVILADANLDKVLSAYNKHRDKPIREQAENIIHLFTLTNLGAPAAFKYFDTTIDRKRYTSTKEVLDATLIHQSITGLYETRIDLSQLGGDGGPAPGSSGGIPWLMKKPLQLTTLVPLQEYEERLLKQTMLTGSYKEKLQSLFLKYDALWQHWENQVGHRRIKPHHIATGTVNPRPQKQYPINPKAKASIQTVINDLLKQGVLIQQNSIMNTPVYPVPKPDGKWRMVLDYREVNKTIPLIAAQNQHSAGILSSIFRGKYKTTLDLSNGFWAHSITPESYWLTAFTWLGQQYCWTRLPQGFLNSPALFNADVVDLLKEVPNVQVYVDDIYISHDDPREHLEQLEKVFSLLLNAGYVVSLKKSEIAQHEVEFLGFNITKEGRGLTETFKQKLLNITPPRDLKQLQSILGLLNFARNFIPNFSELVKPLYNIIATAPGKYITWTTDNSQQLQNIISMLNSAENLEERNPEVRLIMKVNTSPSAGYIRFYNEFAKRPIMYLNYVYTKAEVKFTNTEKLLTTIHKGLIKALDLGMGQEILVYSPIVSMTKIQKTPLPERKALPIRWITWMSYLEDPRIQFHYDKTLPELQQVPTVTDDIIAKIKHPSEFSMVFYTDGSAIKHPNVNKSHNAGMGIAQVQFKPEFTVINTWSIPLGDHTAQLAEVAAVEFACKKALKIDGPVLIVTDSFYVAESVNKELPYWQSNGFFNNKKKPLKHVSKWKSIADCIQLKPDIIIIHEKGHQPTASTFHTEGNNLADKLATQGSYVVNAGKRTADGSEFEKRTADGSEFESPKKKAKVE

SEQ ID NO: 536 - protein, 2087 aa, synthetic construct
MPAAKRVKLDGGDKKYSIGLDIGTNSVGWAVITDEYKVPSKKFKVLGNTDRHSIKKNLIGALLFDSGETAEATRLKRTARRRYTRRKNRICYLQEIFSNEMAKVDDSFFHRLEESFLVEEDKKHERHPIFGNIVDEVAYHEKYPTIYHLRKKLVDSTDKADLRLIYLALAHMIKFRGHFLIEGDLNPDNSDVDKLFIQLVQTYNQLFEENPINASGVDAKAILSARLSKSRRLENLIAQLPGEKKNGLFGNLIALSLGLTPNFKSNFDLAEDAKLQLSKDTYDDDLDNLLAQIGDQYADLFLAAKNLSDAILLSDILRVNTEITKAPLSASMIKRYDEHHQDLTLLKALVRQQLPEKYKEIFFDQSKNGYAGYIDGGASQEEFYKFIKPILEKMDGTEELLVKLNREDLLRKQRTFDNGSIPHQIHLGELHAILRRQEDFYPFLKDNREKIEKILTFRIPYYVGPLARGNSRFAWMTRKSEETITPWNFEEVVDKGASAQSFIERMTNFDKNLPNEKVLPKHSLLYEYFTVYNELTKVKYVTEGMRKPAFLSGEQKKAIVDLLFKTNRKVTVKQLKEDYFKKIECFDSVEISGVEDRFNASLGTYHDLLKIIKDKDFLDNEENEDILEDIVLTLTLFEDREMIEERLKTYAHLFDDKVMKQLKRRRYTGWGRLSRKLINGIRDKQSGKTILDFLKSDGFANRNFMQLIHDDSLTFKEDIQKAQVSGQGDSLHEHIANLAGSPAIKKGILQTVKVVDELVKVMGRHKPENIVIEMARENQTTQKGQKNSRERMKRIEEGIKELGSQILKEHPVENTQLQNEKLYLYYLQNGRDMYVDQELDINRLSDYDVDHIVPQSFLKDDSIDNKVLTRSDKARGKSDNVPSEEVVKKMKNYWRQLLNAKLITQRKFDNLTKAERGGLSELDKAGFIKRQLVETRQITKHVAQILDSRMNTKYDENDKLIREVKVITLKSKLVSDFRKDFQFYKVREINNYHHAHDAYLNAVVGTALIKKYPKLESEFVYGDYKVYDVRKMIAKSEQEIGKATAKYFFYSNIMNFFKTEITLANGEIRKRPLIETNGETGEIVWDKGRDFATVRKVLSMPQVNIVKKTEVQTGGFSKESILPKRNSDKLIARKKDWDPKKYGGFDSPTVAYSVLVVAKVEKGKSKKLKSVKELLGITIMERSSFEKNPIDFLEAKGYKEVKKDLIIKLPKYSLFELENGRKRMLASAGELQKGNELALPSKYVNFLYLASHYEKLKGSPEDNEQKQLFVEQHKHYLDEIIEQISEFSKRVILADANLDKVLSAYNKHRDKPIREQAENIIHLFTLTNLGAPAAFKYFDTTIDRKRYTSTKEVLDATLIHQSITGLYETRIDLSQLGGDGGGSSGGSEAAAKGGIPWLMKKPLQLTTLVPLQEYEERLLKQTMLTGSYKEKLQSLFLKYDALWQHWENQVGHRRIKPHHIATGTVNPRPQKQYPINPKAKASIQTVINDLLKQGVLIQQNSIMNTPVYPVPKPDGKWRMVLDYREVNKTIPLIAAQNQHSAGILSSIFRGKYKTTLDLSNGFWAHSITPESYWLTAFTWLGQQYCWTRLPQGFLNSPALFNADVVDLLKEVPNVQVYVDDIYISHDDPREHLEQLEKVFSLLLNAGYVVSLKKSEIAQHEVEFLGFNITKEGRGLTETFKQKLLNITPPRDLKQLQSILGLLNFARNFIPNFSELVKPLYNIIATAPGKYITWTTDNSQQLQNIISMLNSAENLEERNPEVRLIMKVNTSPSAGYIRFYNEFAKRPIMYLNYVYTKAEVKFTNTEKLLTTIHKGLIKALDLGMGQEILVYSPIVSMTKIQKTPLPERKALPIRWITWMSYLEDPRIQFHYDKTLPELQQVPTVTDDIIAKIKHPSEFSMVFYTDGSAIKHPNVNKSHNAGMGIAQVQFKPEFTVINTWSIPLGDHTAQLAEVAAVEFACKKALKIDGPVLIVTDSFYVAESVNKELPYWQSNGFFNNKKKPLKHVSKWKSIADCIQLKPDIIIIHEKGHQPTASTFHTEGNNLADKLATQGSYVVNAGKRTADGSEFEKRTADGSEFESPKKKAKVE

SEQ ID NO: 537 - protein, 2087 aa, synthetic construct
MPAAKRVKLDGGDKKYSIGLDIGTNSVGWAVITDEYKVPSKKFKVLGNTDRHSIKKNLIGALLFDSGETAEATRLKRTARRRYTRRKNRICYLQEIFSNEMAKVDDSFFHRLEESFLVEEDKKHERHPIFGNIVDEVAYHEKYPTIYHLRKKLVDSTDKADLRLIYLALAHMIKFRGHFLIEGDLNPDNSDVDKLFIQLVQTYNQLFEENPINASGVDAKAILSARLSKSRRLENLIAQLPGEKKNGLFGNLIALSLGLTPNFKSNFDLAEDAKLQLSKDTYDDDLDNLLAQIGDQYADLFLAAKNLSDAILLSDILRVNTEITKAPLSASMIKRYDEHHQDLTLLKALVRQQLPEKYKEIFFDQSKNGYAGYIDGGASQEEFYKFIKPILEKMDGTEELLVKLNREDLLRKQRTFDNGSIPHQIHLGELHAILRRQEDFYPFLKDNREKIEKILTFRIPYYVGPLARGNSRFAWMTRKSEETITPWNFEEVVDKGASAQSFIERMTNFDKNLPNEKVLPKHSLLYEYFTVYNELTKVKYVTEGMRKPAFLSGEQKKAIVDLLFKTNRKVTVKQLKEDYFKKIECFDSVEISGVEDRFNASLGTYHDLLKIIKDKDFLDNEENEDILEDIVLTLTLFEDREMIEERLKTYAHLFDDKVMKQLKRRRYTGWGRLSRKLINGIRDKQSGKTILDFLKSDGFANRNFMQLIHDDSLTFKEDIQKAQVSGQGDSLHEHIANLAGSPAIKKGILQTVKVVDELVKVMGRHKPENIVIEMARENQTTQKGQKNSRERMKRIEEGIKELGSQILKEHPVENTQLQNEKLYLYYLQNGRDMYVDQELDINRLSDYDVDHIVPQSFLKDDSIDNKVLTRSDKARGKSDNVPSEEVVKKMKNYWRQLLNAKLITQRKFDNLTKAERGGLSELDKAGFIKRQLVETRQITKHVAQILDSRMNTKYDENDKLIREVKVITLKSKLVSDFRKDFQFYKVREINNYHHAHDAYLNAVVGTALIKKYPKLESEFVYGDYKVYDVRKMIAKSEQEIGKATAKYFFYSNIMNFFKTEITLANGEIRKRPLIETNGETGEIVWDKGRDFATVRKVLSMPQVNIVKKTEVQTGGFSKESILPKRNSDKLIARKKDWDPKKYGGFDSPTVAYSVLVVAKVEKGKSKKLKSVKELLGITIMERSSFEKNPIDFLEAKGYKEVKKDLIIKLPKYSLFELENGRKRMLASAGELQKGNELALPSKYVNFLYLASHYEKLKGSPEDNEQKQLFVEQHKHYLDEIIEQISEFSKRVILADANLDKVLSAYNKHRDKPIREQAENIIHLFTLTNLGAPAAFKYFDTTIDRKRYTSTKEVLDATLIHQSITGLYETRIDLSQLGGDGGGSSPAPEAAAKGGIPWLMKKPLQLTTLVPLQEYEERLLKQTMLTGSYKEKLQSLFLKYDALWQHWENQVGHRRIKPHHIATGTVNPRPQKQYPINPKAKASIQTVINDLLKQGVLIQQNSIMNTPVYPVPKPDGKWRMVLDYREVNKTIPLIAAQNQHSAGILSSIFRGKYKTTLDLSNGFWAHSITPESYWLTAFTWLGQQYCWTRLPQGFLNSPALFNADVVDLLKEVPNVQVYVDDIYISHDDPREHLEQLEKVFSLLLNAGYVVSLKKSEIAQHEVEFLGFNITKEGRGLTETFKQKLLNITPPRDLKQLQSILGLLNFARNFIPNFSELVKPLYNIIATAPGKYITWTTDNSQQLQNIISMLNSAENLEERNPEVRLIMKVNTSPSAGYIRFYNEFAKRPIMYLNYVYTKAEVKFTNTEKLLTTIHKGLIKALDLGMGQEILVYSPIVSMTKIQKTPLPERKALPIRWITWMSYLEDPRIQFHYDKTLPELQQVPTVTDDIIAKIKHPSEFSMVFYTDGSAIKHPNVNKSHNAGMGIAQVQFKPEFTVINTWSIPLGDHTAQLAEVAAVEFACKKALKIDGPVLIVTDSFYVAESVNKELPYWQSNGFFNNKKKPLKHVSKWKSIADCIQLKPDIIIIHEKGHQPTASTFHTEGNNLADKLATQGSYVVNAGKRTADGSEFEKRTADGSEFESPKKKAKVE

SEQ ID NO: 538 - protein, 2087 aa, synthetic construct
MPAAKRVKLDGGDKKYSIGLDIGTNSVGWAVITDEYKVPSKKFKVLGNTDRHSIKKNLIGALLFDSGETAEATRLKRTARRRYTRRKNRICYLQEIFSNEMAKVDDSFFHRLEESFLVEEDKKHERHPIFGNIVDEVAYHEKYPTIYHLRKKLVDSTDKADLRLIYLALAHMIKFRGHFLIEGDLNPDNSDVDKLFIQLVQTYNQLFEENPINASGVDAKAILSARLSKSRRLENLIAQLPGEKKNGLFGNLIALSLGLTPNFKSNFDLAEDAKLQLSKDTYDDDLDNLLAQIGDQYADLFLAAKNLSDAILLSDILRVNTEITKAPLSASMIKRYDEHHQDLTLLKALVRQQLPEKYKEIFFDQSKNGYAGYIDGGASQEEFYKFIKPILEKMDGTEELLVKLNREDLLRKQRTFDNGSIPHQIHLGELHAILRRQEDFYPFLKDNREKIEKILTFRIPYYVGPLARGNSRFAWMTRKSEETITPWNFEEVVDKGASAQSFIERMTNFDKNLPNEKVLPKHSLLYEYFTVYNELTKVKYVTEGMRKPAFLSGEQKKAIVDLLFKTNRKVTVKQLKEDYFKKIECFDSVEISGVEDRFNASLGTYHDLLKIIKDKDFLDNEENEDILEDIVLTLTLFEDREMIEERLKTYAHLFDDKVMKQLKRRRYTGWGRLSRKLINGIRDKQSGKTILDFLKSDGFANRNFMQLIHDDSLTFKEDIQKAQVSGQGDSLHEHIANLAGSPAIKKGILQTVKVVDELVKVMGRHKPENIVIEMARENQTTQKGQKNSRERMKRIEEGIKELGSQILKEHPVENTQLQNEKLYLYYLQNGRDMYVDQELDINRLSDYDVDHIVPQSFLKDDSIDNKVLTRSDKARGKSDNVPSEEVVKKMKNYWRQLLNAKLITQRKFDNLTKAERGGLSELDKAGFIKRQLVETRQITKHVAQILDSRMNTKYDENDKLIREVKVITLKSKLVSDFRKDFQFYKVREINNYHHAHDAYLNAVVGTALIKKYPKLESEFVYGDYKVYDVRKMIAKSEQEIGKATAKYFFYSNIMNFFKTEITLANGEIRKRPLIETNGETGEIVWDKGRDFATVRKVLSMPQVNIVKKTEVQTGGFSKESILPKRNSDKLIARKKDWDPKKYGGFDSPTVAYSVLVVAKVEKGKSKKLKSVKELLGITIMERSSFEKNPIDFLEAKGYKEVKKDLIIKLPKYSLFELENGRKRMLASAGELQKGNELALPSKYVNFLYLASHYEKLKGSPEDNEQKQLFVEQHKHYLDEIIEQISEFSKRVILADANLDKVLSAYNKHRDKPIREQAENIIHLFTLTNLGAPAAFKYFDTTIDRKRYTSTKEVLDATLIHQSITGLYETRIDLSQLGGDGGPAPEAAAKGGSGGIPWLMKKPLQLTTLVPLQEYEERLLKQTMLTGSYKEKLQSLFLKYDALWQHWENQVGHRRIKPHHIATGTVNPRPQKQYPINPKAKASIQTVINDLLKQGVLIQQNSIMNTPVYPVPKPDGKWRMVLDYREVNKTIPLIAAQNQHSAGILSSIFRGKYKTTLDLSNGFWAHSITPESYWLTAFTWLGQQYCWTRLPQGFLNSPALFNADVVDLLKEVPNVQVYVDDIYISHDDPREHLEQLEKVFSLLLNAGYVVSLKKSEIAQHEVEFLGFNITKEGRGLTETFKQKLLNITPPRDLKQLQSILGLLNFARNFIPNFSELVKPLYNIIATAPGKYITWTTDNSQQLQNIISMLNSAENLEERNPEVRLIMKVNTSPSAGYIRFYNEFAKRPIMYLNYVYTKAEVKFTNTEKLLTTIHKGLIKALDLGMGQEILVYSPIVSMTKIQKTPLPERKALPIRWITWMSYLEDPRIQFHYDKTLPELQQVPTVTDDIIAKIKHPSEFSMVFYTDGSAIKHPNVNKSHNAGMGIAQVQFKPEFTVINTWSIPLGDHTAQLAEVAAVEFACKKALKIDGPVLIVTDSFYVAESVNKELPYWQSNGFFNNKKKPLKHVSKWKSIADCIQLKPDIIIIHEKGHQPTASTFHTEGNNLADKLATQGSYVVNAGKRTADGSEFEKRTADGSEFESPKKKAKVE

SEQ ID NO: 539 - protein, 2096 aa, synthetic construct
MPAAKRVKLDGGDKKYSIGLDIGTNSVGWAVITDEYKVPSKKFKVLGNTDRHSIKKNLIGALLFDSGETAEATRLKRTARRRYTRRKNRICYLQEIFSNEMAKVDDSFFHRLEESFLVEEDKKHERHPIFGNIVDEVAYHEKYPTIYHLRKKLVDSTDKADLRLIYLALAHMIKFRGHFLIEGDLNPDNSDVDKLFIQLVQTYNQLFEENPINASGVDAKAILSARLSKSRRLENLIAQLPGEKKNGLFGNLIALSLGLTPNFKSNFDLAEDAKLQLSKDTYDDDLDNLLAQIGDQYADLFLAAKNLSDAILLSDILRVNTEITKAPLSASMIKRYDEHHQDLTLLKALVRQQLPEKYKEIFFDQSKNGYAGYIDGGASQEEFYKFIKPILEKMDGTEELLVKLNREDLLRKQRTFDNGSIPHQIHLGELHAILRRQEDFYPFLKDNREKIEKILTFRIPYYVGPLARGNSRFAWMTRKSEETITPWNFEEVVDKGASAQSFIERMTNFDKNLPNEKVLPKHSLLYEYFTVYNELTKVKYVTEGMRKPAFLSGEQKKAIVDLLFKTNRKVTVKQLKEDYFKKIECFDSVEISGVEDRFNASLGTYHDLLKIIKDKDFLDNEENEDILEDIVLTLTLFEDREMIEERLKTYAHLFDDKVMKQLKRRRYTGWGRLSRKLINGIRDKQSGKTILDFLKSDGFANRNFMQLIHDDSLTFKEDIQKAQVSGQGDSLHEHIANLAGSPAIKKGILQTVKVVDELVKVMGRHKPENIVIEMARENQTTQKGQKNSRERMKRIEEGIKELGSQILKEHPVENTQLQNEKLYLYYLQNGRDMYVDQELDINRLSDYDVDHIVPQSFLKDDSIDNKVLTRSDKARGKSDNVPSEEVVKKMKNYWRQLLNAKLITQRKFDNLTKAERGGLSELDKAGFIKRQLVETRQITKHVAQILDSRMNTKYDENDKLIREVKVITLKSKLVSDFRKDFQFYKVREINNYHHAHDAYLNAVVGTALIKKYPKLESEFVYGDYKVYDVRKMIAKSEQEIGKATAKYFFYSNIMNFFKTEITLANGEIRKRPLIETNGETGEIVWDKGRDFATVRKVLSMPQVNIVKKTEVQTGGFSKESILPKRNSDKLIARKKDWDPKKYGGFDSPTVAYSVLVVAKVEKGKSKKLKSVKELLGITIMERSSFEKNPIDFLEAKGYKEVKKDLIIKLPKYSLFELENGRKRMLASAGELQKGNELALPSKYVNFLYLASHYEKLKGSPEDNEQKQLFVEQHKHYLDEIIEQISEFSKRVILADANLDKVLSAYNKHRDKPIREQAENIIHLFTLTNLGAPAAFKYFDTTIDRKRYTSTKEVLDATLIHQSITGLYETRIDLSQLGGDGGEAAAKEAAAKEAAAKEAAAKGGIPWLMKKPLQLTTLVPLQEYEERLLKQTMLTGSYKEKLQSLFLKYDALWQHWENQVGHRRIKPHHIATGTVNPRPQKQYPINPKAKASIQTVINDLLKQGVLIQQNSIMNTPVYPVPKPDGKWRMVLDYREVNKTIPLIAAQNQHSAGILSSIFRGKYKTTLDLSNGFWAHSITPESYWLTAFTWLGQQYCWTRLPQGFLNSPALFNADVVDLLKEVPNVQVYVDDIYISHDDPREHLEQLEKVFSLLLNAGYVVSLKKSEIAQHEVEFLGFNITKEGRGLTETFKQKLLNITPPRDLKQLQSILGLLNFARNFIPNFSELVKPLYNIIATAPGKYITWTTDNSQQLQNIISMLNSAENLEERNPEVRLIMKVNTSPSAGYIRFYNEFAKRPIMYLNYVYTKAEVKFTNTEKLLTTIHKGLIKALDLGMGQEILVYSPIVSMTKIQKTPLPERKALPIRWITWMSYLEDPRIQFHYDKTLPELQQVPTVTDDIIAKIKHPSEFSMVFYTDGSAIKHPNVNKSHNAGMGIAQVQFKPEFTVINTWSIPLGDHTAQLAEVAAVEFACKKALKIDGPVLIVTDSFYVAESVNKELPYWQSNGFFNNKKKPLKHVSKWKSIADCIQLKPDIIIIHEKGHQPTASTFHTEGNNLADKLATQGSYVVNAGKRTADGSEFEKRTADGSEFESPKKKAKVE

SEQ ID NO: 540 - protein, 2085 aa, synthetic construct
MPAAKRVKLDGGDKKYSIGLDIGTNSVGWAVITDEYKVPSKKFKVLGNTDRHSIKKNLIGALLFDSGETAEATRLKRTARRRYTRRKNRICYLQEIFSNEMAKVDDSFFHRLEESFLVEEDKKHERHPIFGNIVDEVAYHEKYPTIYHLRKKLVDSTDKADLRLIYLALAHMIKFRGHFLIEGDLNPDNSDVDKLFIQLVQTYNQLFEENPINASGVDAKAILSARLSKSRRLENLIAQLPGEKKNGLFGNLIALSLGLTPNFKSNFDLAEDAKLQLSKDTYDDDLDNLLAQIGDQYADLFLAAKNLSDAILLSDILRVNTEITKAPLSASMIKRYDEHHQDLTLLKALVRQQLPEKYKEIFFDQSKNGYAGYIDGGASQEEFYKFIKPILEKMDGTEELLVKLNREDLLRKQRTFDNGSIPHQIHLGELHAILRRQEDFYPFLKDNREKIEKILTFRIPYYVGPLARGNSRFAWMTRKSEETITPWNFEEVVDKGASAQSFIERMTNFDKNLPNEKVLPKHSLLYEYFTVYNELTKVKYVTEGMRKPAFLSGEQKKAIVDLLFKTNRKVTVKQLKEDYFKKIECFDSVEISGVEDRFNASLGTYHDLLKIIKDKDFLDNEENEDILEDIVLTLTLFEDREMIEERLKTYAHLFDDKVMKQLKRRRYTGWGRLSRKLINGIRDKQSGKTILDFLKSDGFANRNFMQLIHDDSLTFKEDIQKAQVSGQGDSLHEHIANLAGSPAIKKGILQTVKVVDELVKVMGRHKPENIVIEMARENQTTQKGQKNSRERMKRIEEGIKELGSQILKEHPVENTQLQNEKLYLYYLQNGRDMYVDQELDINRLSDYDVDHIVPQSFLKDDSIDNKVLTRSDKARGKSDNVPSEEVVKKMKNYWRQLLNAKLITQRKFDNLTKAERGGLSELDKAGFIKRQLVETRQITKHVAQILDSRMNTKYDENDKLIREVKVITLKSKLVSDFRKDFQFYKVREINNYHHAHDAYLNAVVGTALIKKYPKLESEFVYGDYKVYDVRKMIAKSEQEIGKATAKYFFYSNIMNFFKTEITLANGEIRKRPLIETNGETGEIVWDKGRDFATVRKVLSMPQVNIVKKTEVQTGGFSKESILPKRNSDKLIARKKDWDPKKYGGFDSPTVAYSVLVVAKVEKGKSKKLKSVKELLGITIMERSSFEKNPIDFLEAKGYKEVKKDLIIKLPKYSLFELENGRKRMLASAGELQKGNELALPSKYVNFLYLASHYEKLKGSPEDNEQKQLFVEQHKHYLDEIIEQISEFSKRVILADANLDKVLSAYNKHRDKPIREQAENIIHLFTLTNLGAPAAFKYFDTTIDRKRYTSTKEVLDATLIHQSITGLYETRIDLSQLGGDGGGGSPAPGSSGGIPWLMKKPLQLTTLVPLQEYEERLLKQTMLTGSYKEKLQSLFLKYDALWQHWENQVGHRRIKPHHIATGTVNPRPQKQYPINPKAKASIQTVINDLLKQGVLIQQNSIMNTPVYPVPKPDGKWRMVLDYREVNKTIPLIAAQNQHSAGILSSIFRGKYKTTLDLSNGFWAHSITPESYWLTAFTWLGQQYCWTRLPQGFLNSPALFNADVVDLLKEVPNVQVYVDDIYISHDDPREHLEQLEKVFSLLLNAGYVVSLKKSEIAQHEVEFLGFNITKEGRGLTETFKQKLLNITPPRDLKQLQSILGLLNFARNFIPNFSELVKPLYNIIATAPGKYITWTTDNSQQLQNIISMLNSAENLEERNPEVRLIMKVNTSPSAGYIRFYNEFAKRPIMYLNYVYTKAEVKFTNTEKLLTTIHKGLIKALDLGMGQEILVYSPIVSMTKIQKTPLPERKALPIRWITWMSYLEDPRIQFHYDKTLPELQQVPTVTDDIIAKIKHPSEFSMVFYTDGSAIKHPNVNKSHNAGMGIAQVQFKPEFTVINTWSIPLGDHTAQLAEVAAVEFACKKALKIDGPVLIVTDSFYVAESVNKELPYWQSNGFFNNKKKPLKHVSKWKSIADCIQLKPDIIIIHEKGHQPTASTFHTEGNNLADKLATQGSYVVNAGKRTADGSEFEKRTADGSEFESPKKKAKVE

SEQ ID NO: 541 - protein, 2091 aa, synthetic construct
MPAAKRVKLDGGDKKYSIGLDIGTNSVGWAVITDEYKVPSKKFKVLGNTDRHSIKKNLIGALLFDSGETAEATRLKRTARRRYTRRKNRICYLQEIFSNEMAKVDDSFFHRLEESFLVEEDKKHERHPIFGNIVDEVAYHEKYPTIYHLRKKLVDSTDKADLRLIYLALAHMIKFRGHFLIEGDLNPDNSDVDKLFIQLVQTYNQLFEENPINASGVDAKAILSARLSKSRRLENLIAQLPGEKKNGLFGNLIALSLGLTPNFKSNFDLAEDAKLQLSKDTYDDDLDNLLAQIGDQYADLFLAAKNLSDAILLSDILRVNTEITKAPLSASMIKRYDEHHQDLTLLKALVRQQLPEKYKEIFFDQSKNGYAGYIDGGASQEEFYKFIKPILEKMDGTEELLVKLNREDLLRKQRTFDNGSIPHQIHLGELHAILRRQEDFYPFLKDNREKIEKILTFRIPYYVGPLARGNSRFAWMTRKSEETITPWNFEEVVDKGASAQSFIERMTNFDKNLPNEKVLPKHSLLYEYFTVYNELTKVKYVTEGMRKPAFLSGEQKKAIVDLLFKTNRKVTVKQLKEDYFKKIECFDSVEISGVEDRFNASLGTYHDLLKIIKDKDFLDNEENEDILEDIVLTLTLFEDREMIEERLKTYAHLFDDKVMKQLKRRRYTGWGRLSRKLINGIRDKQSGKTILDFLKSDGFANRNFMQLIHDDSLTFKEDIQKAQVSGQGDSLHEHIANLAGSPAIKKGILQTVKVVDELVKVMGRHKPENIVIEMARENQTTQKGQKNSRERMKRIEEGIKELGSQILKEHPVENTQLQNEKLYLYYLQNGRDMYVDQELDINRLSDYDVDHIVPQSFLKDDSIDNKVLTRSDKARGKSDNVPSEEVVKKMKNYWRQLLNAKLITQRKFDNLTKAERGGLSELDKAGFIKRQLVETRQITKHVAQILDSRMNTKYDENDKLIREVKVITLKSKLVSDFRKDFQFYKVREINNYHHAHDAYLNAVVGTALIKKYPKLESEFVYGDYKVYDVRKMIAKSEQEIGKATAKYFFYSNIMNFFKTEITLANGEIRKRPLIETNGETGEIVWDKGRDFATVRKVLSMPQVNIVKKTEVQTGGFSKESILPKRNSDKLIARKKDWDPKKYGGFDSPTVAYSVLVVAKVEKGKSKKLKSVKELLGITIMERSSFEKNPIDFLEAKGYKEVKKDLIIKLPKYSLFELENGRKRMLASAGELQKGNELALPSKYVNFLYLASHYEKLKGSPEDNEQKQLFVEQHKHYLDEIIEQISEFSKRVILADANLDKVLSAYNKHRDKPIREQAENIIHLFTLTNLGAPAAFKYFDTTIDRKRYTSTKEVLDATLIHQSITGLYETRIDLSQLGGDGGEAAAKGGGGSEAAAKGGIPWLMKKPLQLTTLVPLQEYEERLLKQTMLTGSYKEKLQSLFLKYDALWQHWENQVGHRRIKPHHIATGTVNPRPQKQYPINPKAKASIQTVINDLLKQGVLIQQNSIMNTPVYPVPKPDGKWRMVLDYREVNKTIPLIAAQNQHSAGILSSIFRGKYKTTLDLSNGFWAHSITPESYWLTAFTWLGQQYCWTRLPQGFLNSPALFNADVVDLLKEVPNVQVYVDDIYISHDDPREHLEQLEKVFSLLLNAGYVVSLKKSEIAQHEVEFLGFNITKEGRGLTETFKQKLLNITPPRDLKQLQSILGLLNFARNFIPNFSELVKPLYNIIATAPGKYITWTTDNSQQLQNIISMLNSAENLEERNPEVRLIMKVNTSPSAGYIRFYNEFAKRPIMYLNYVYTKAEVKFTNTEKLLTTIHKGLIKALDLGMGQEILVYSPIVSMTKIQKTPLPERKALPIRWITWMSYLEDPRIQFHYDKTLPELQQVPTVTDDIIAKIKHPSEFSMVFYTDGSAIKHPNVNKSHNAGMGIAQVQFKPEFTVINTWSIPLGDHTAQLAEVAAVEFACKKALKIDGPVLIVTDSFYVAESVNKELPYWQSNGFFNNKKKPLKHVSKWKSIADCIQLKPDIIIIHEKGHQPTASTFHTEGNNLADKLATQGSYVVNAGKRTADGSEFEKRTADGSEFESPKKKAKVE

SEQ ID NO: 542 - protein, 2085 aa, synthetic construct
MPAAKRVKLDGGDKKYSIGLDIGTNSVGWAVITDEYKVPSKKFKVLGNTDRHSIKKNLIGALLFDSGETAEATRLKRTARRRYTRRKNRICYLQEIFSNEMAKVDDSFFHRLEESFLVEEDKKHERHPIFGNIVDEVAYHEKYPTIYHLRKKLVDSTDKADLRLIYLALAHMIKFRGHFLIEGDLNPDNSDVDKLFIQLVQTYNQLFEENPINASGVDAKAILSARLSKSRRLENLIAQLPGEKKNGLFGNLIALSLGLTPNFKSNFDLAEDAKLQLSKDTYDDDLDNLLAQIGDQYADLFLAAKNLSDAILLSDILRVNTEITKAPLSASMIKRYDEHHQDLTLLKALVRQQLPEKYKEIFFDQSKNGYAGYIDGGASQEEFYKFIKPILEKMDGTEELLVKLNREDLLRKQRTFDNGSIPHQIHLGELHAILRRQEDFYPFLKDNREKIEKILTFRIPYYVGPLARGNSRFAWMTRKSEETITPWNFEEVVDKGASAQSFIERMTNFDKNLPNEKVLPKHSLLYEYFTVYNELTKVKYVTEGMRKPAFLSGEQKKAIVDLLFKTNRKVTVKQLKEDYFKKIECFDSVEISGVEDRFNASLGTYHDLLKIIKDKDFLDNEENEDILEDIVLTLTLFEDREMIEERLKTYAHLFDDKVMKQLKRRRYTGWGRLSRKLINGIRDKQSGKTILDFLKSDGFANRNFMQLIHDDSLTFKEDIQKAQVSGQGDSLHEHIANLAGSPAIKKGILQTVKVVDELVKVMGRHKPENIVIEMARENQTTQKGQKNSRERMKRIEEGIKELGSQILKEHPVENTQLQNEKLYLYYLQNGRDMYVDQELDINRLSDYDVDHIVPQSFLKDDSIDNKVLTRSDKARGKSDNVPSEEVVKKMKNYWRQLLNAKLITQRKFDNLTKAERGGLSELDKAGFIKRQLVETRQITKHVAQILDSRMNTKYDENDKLIREVKVITLKSKLVSDFRKDFQFYKVREINNYHHAHDAYLNAVVGTALIKKYPKLESEFVYGDYKVYDVRKMIAKSEQEIGKATAKYFFYSNIMNFFKTEITLANGEIRKRPLIETNGETGEIVWDKGRDFATVRKVLSMPQVNIVKKTEVQTGGFSKESILPKRNSDKLIARKKDWDPKKYGGFDSPTVAYSVLVVAKVEKGKSKKLKSVKELLGITIMERSSFEKNPIDFLEAKGYKEVKKDLIIKLPKYSLFELENGRKRMLASAGELQKGNELALPSKYVNFLYLASHYEKLKGSPEDNEQKQLFVEQHKHYLDEIIEQISEFSKRVILADANLDKVLSAYNKHRDKPIREQAENIIHLFTLTNLGAPAAFKYFDTTIDRKRYTSTKEVLDATLIHQSITGLYETRIDLSQLGGDGGPAPGGGGGSGGIPWLMKKPLQLTTLVPLQEYEERLLKQTMLTGSYKEKLQSLFLKYDALWQHWENQVGHRRIKPHHIATGTVNPRPQKQYPINPKAKASIQTVINDLLKQGVLIQQNSIMNTPVYPVPKPDGKWRMVLDYREVNKTIPLIAAQNQHSAGILSSIFRGKYKTTLDLSNGFWAHSITPESYWLTAFTWLGQQYCWTRLPQGFLNSPALFNADVVDLLKEVPNVQVYVDDIYISHDDPREHLEQLEKVFSLLLNAGYVVSLKKSEIAQHEVEFLGFNITKEGRGLTETFKQKLLNITPPRDLKQLQSILGLLNFARNFIPNFSELVKPLYNIIATAPGKYITWTTDNSQQLQNIISMLNSAENLEERNPEVRLIMKVNTSPSAGYIRFYNEFAKRPIMYLNYVYTKAEVKFTNTEKLLTTIHKGLIKALDLGMGQEILVYSPIVSMTKIQKTPLPERKALPIRWITWMSYLEDPRIQFHYDKTLPELQQVPTVTDDIIAKIKHPSEFSMVFYTDGSAIKHPNVNKSHNAGMGIAQVQFKPEFTVINTWSIPLGDHTAQLAEVAAVEFACKKALKIDGPVLIVTDSFYVAESVNKELPYWQSNGFFNNKKKPLKHVSKWKSIADCIQLKPDIIIIHEKGHQPTASTFHTEGNNLADKLATQGSYVVNAGKRTADGSEFEKRTADGSEFESPKKKAKVE

SEQ ID NO: 543 - protein, 2087 aa, synthetic construct
MPAAKRVKLDGGDKKYSIGLDIGTNSVGWAVITDEYKVPSKKFKVLGNTDRHSIKKNLIGALLFDSGETAEATRLKRTARRRYTRRKNRICYLQEIFSNEMAKVDDSFFHRLEESFLVEEDKKHERHPIFGNIVDEVAYHEKYPTIYHLRKKLVDSTDKADLRLIYLALAHMIKFRGHFLIEGDLNPDNSDVDKLFIQLVQTYNQLFEENPINASGVDAKAILSARLSKSRRLENLIAQLPGEKKNGLFGNLIALSLGLTPNFKSNFDLAEDAKLQLSKDTYDDDLDNLLAQIGDQYADLFLAAKNLSDAILLSDILRVNTEITKAPLSASMIKRYDEHHQDLTLLKALVRQQLPEKYKEIFFDQSKNGYAGYIDGGASQEEFYKFIKPILEKMDGTEELLVKLNREDLLRKQRTFDNGSIPHQIHLGELHAILRRQEDFYPFLKDNREKIEKILTFRIPYYVGPLARGNSRFAWMTRKSEETITPWNFEEVVDKGASAQSFIERMTNFDKNLPNEKVLPKHSLLYEYFTVYNELTKVKYVTEGMRKPAFLSGEQKKAIVDLLFKTNRKVTVKQLKEDYFKKIECFDSVEISGVEDRFNASLGTYHDLLKIIKDKDFLDNEENEDILEDIVLTLTLFEDREMIEERLKTYAHLFDDKVMKQLKRRRYTGWGRLSRKLINGIRDKQSGKTILDFLKSDGFANRNFMQLIHDDSLTFKEDIQKAQVSGQGDSLHEHIANLAGSPAIKKGILQTVKVVDELVKVMGRHKPENIVIEMARENQTTQKGQKNSRERMKRIEEGIKELGSQILKEHPVENTQLQNEKLYLYYLQNGRDMYVDQELDINRLSDYDVDHIVPQSFLKDDSIDNKVLTRSDKARGKSDNVPSEEVVKKMKNYWRQLLNAKLITQRKFDNLTKAERGGLSELDKAGFIKRQLVETRQITKHVAQILDSRMNTKYDENDKLIREVKVITLKSKLVSDFRKDFQFYKVREINNYHHAHDAYLNAVVGTALIKKYPKLESEFVYGDYKVYDVRKMIAKSEQEIGKATAKYFFYSNIMNFFKTEITLANGEIRKRPLIETNGETGEIVWDKGRDFATVRKVLSMPQVNIVKKTEVQTGGFSKESILPKRNSDKLIARKKDWDPKKYGGFDSPTVAYSVLVVAKVEKGKSKKLKSVKELLGITIMERSSFEKNPIDFLEAKGYKEVKKDLIIKLPKYSLFELENGRKRMLASAGELQKGNELALPSKYVNFLYLASHYEKLKGSPEDNEQKQLFVEQHKHYLDEIIEQISEFSKRVILADANLDKVLSAYNKHRDKPIREQAENIIHLFTLTNLGAPAAFKYFDTTIDRKRYTSTKEVLDATLIHQSITGLYETRIDLSQLGGDGGGGSEAAAKGGGGGIPWLMKKPLQLTTLVPLQEYEERLLKQTMLTGSYKEKLQSLFLKYDALWQHWENQVGHRRIKPHHIATGTVNPRPQKQYPINPKAKASIQTVINDLLKQGVLIQQNSIMNTPVYPVPKPDGKWRMVLDYREVNKTIPLIAAQNQHSAGILSSIFRGKYKTTLDLSNGFWAHSITPESYWLTAFTWLGQQYCWTRLPQGFLNSPALFNADVVDLLKEVPNVQVYVDDIYISHDDPREHLEQLEKVFSLLLNAGYVVSLKKSEIAQHEVEFLGFNITKEGRGLTETFKQKLLNITPPRDLKQLQSILGLLNFARNFIPNFSELVKPLYNIIATAPGKYITWTTDNSQQLQNIISMLNSAENLEERNPEVRLIMKVNTSPSAGYIRFYNEFAKRPIMYLNYVYTKAEVKFTNTEKLLTTIHKGLIKALDLGMGQEILVYSPIVSMTKIQKTPLPERKALPIRWITWMSYLEDPRIQFHYDKTLPELQQVPTVTDDIIAKIKHPSEFSMVFYTDGSAIKHPNVNKSHNAGMGIAQVQFKPEFTVINTWSIPLGDHTAQLAEVAAVEFACKKALKIDGPVLIVTDSFYVAESVNKELPYWQSNGFFNNKKKPLKHVSKWKSIADCIQLKPDIIIIHEKGHQPTASTFHTEGNNLADKLATQGSYVVNAGKRTADGSEFEKRTADGSEFESPKKKAKVE

SEQ ID NO: 544 - protein, 2082 aa, synthetic construct
MPAAKRVKLDGGDKKYSIGLDIGTNSVGWAVITDEYKVPSKKFKVLGNTDRHSIKKNLIGALLFDSGETAEATRLKRTARRRYTRRKNRICYLQEIFSNEMAKVDDSFFHRLEESFLVEEDKKHERHPIFGNIVDEVAYHEKYPTIYHLRKKLVDSTDKADLRLIYLALAHMIKFRGHFLIEGDLNPDNSDVDKLFIQLVQTYNQLFEENPINASGVDAKAILSARLSKSRRLENLIAQLPGEKKNGLFGNLIALSLGLTPNFKSNFDLAEDAKLQLSKDTYDDDLDNLLAQIGDQYADLFLAAKNLSDAILLSDILRVNTEITKAPLSASMIKRYDEHHQDLTLLKALVRQQLPEKYKEIFFDQSKNGYAGYIDGGASQEEFYKFIKPILEKMDGTEELLVKLNREDLLRKQRTFDNGSIPHQIHLGELHAILRRQEDFYPFLKDNREKIEKILTFRIPYYVGPLARGNSRFAWMTRKSEETITPWNFEEVVDKGASAQSFIERMTNFDKNLPNEKVLPKHSLLYEYFTVYNELTKVKYVTEGMRKPAFLSGEQKKAIVDLLFKTNRKVTVKQLKEDYFKKIECFDSVEISGVEDRFNASLGTYHDLLKIIKDKDFLDNEENEDILEDIVLTLTLFEDREMIEERLKTYAHLFDDKVMKQLKRRRYTGWGRLSRKLINGIRDKQSGKTILDFLKSDGFANRNFMQLIHDDSLTFKEDIQKAQVSGQGDSLHEHIANLAGSPAIKKGILQTVKVVDELVKVMGRHKPENIVIEMARENQTTQKGQKNSRERMKRIEEGIKELGSQILKEHPVENTQLQNEKLYLYYLQNGRDMYVDQELDINRLSDYDVDHIVPQSFLKDDSIDNKVLTRSDKARGKSDNVPSEEVVKKMKNYWRQLLNAKLITQRKFDNLTKAERGGLSELDKAGFIKRQLVETRQITKHVAQILDSRMNTKYDENDKLIREVKVITLKSKLVSDFRKDFQFYKVREINNYHHAHDAYLNAVVGTALIKKYPKLESEFVYGDYKVYDVRKMIAKSEQEIGKATAKYFFYSNIMNFFKTEITLANGEIRKRPLIETNGETGEIVWDKGRDFATVRKVLSMPQVNIVKKTEVQTGGFSKESILPKRNSDKLIARKKDWDPKKYGGFDSPTVAYSVLVVAKVEKGKSKKLKSVKELLGITIMERSSFEKNPIDFLEAKGYKEVKKDLIIKLPKYSLFELENGRKRMLASAGELQKGNELALPSKYVNFLYLASHYEKLKGSPEDNEQKQLFVEQHKHYLDEIIEQISEFSKRVILADANLDKVLSAYNKHRDKPIREQAENIIHLFTLTNLGAPAAFKYFDTTIDRKRYTSTKEVLDATLIHQSITGLYETRIDLSQLGGDGGGSSGGGGGIPWLMKKPLQLTTLVPLQEYEERLLKQTMLTGSYKEKLQSLFLKYDALWQHWENQVGHRRIKPHHIATGTVNPRPQKQYPINPKAKASIQTVINDLLKQGVLIQQNSIMNTPVYPVPKPDGKWRMVLDYREVNKTIPLIAAQNQHSAGILSSIFRGKYKTTLDLSNGFWAHSITPESYWLTAFTWLGQQYCWTRLPQGFLNSPALFNADVVDLLKEVPNVQVYVDDIYISHDDPREHLEQLEKVFSLLLNAGYVVSLKKSEIAQHEVEFLGFNITKEGRGLTETFKQKLLNITPPRDLKQLQSILGLLNFARNFIPNFSELVKPLYNIIATAPGKYITWTTDNSQQLQNIISMLNSAENLEERNPEVRLIMKVNTSPSAGYIRFYNEFAKRPIMYLNYVYTKAEVKFTNTEKLLTTIHKGLIKALDLGMGQEILVYSPIVSMTKIQKTPLPERKALPIRWITWMSYLEDPRIQFHYDKTLPELQQVPTVTDDIIAKIKHPSEFSMVFYTDGSAIKHPNVNKSHNAGMGIAQVQFKPEFTVINTWSIPLGDHTAQLAEVAAVEFACKKALKIDGPVLIVTDSFYVAESVNKELPYWQSNGFFNNKKKPLKHVSKWKSIADCIQLKPDIIIIHEKGHQPTASTFHTEGNNLADKLATQGSYVVNAGKRTADGSEFEKRTADGSEFESPKKKAKVE

SEQ ID NO: 545 - protein, 2085 aa, synthetic construct
MPAAKRVKLDGGDKKYSIGLDIGTNSVGWAVITDEYKVPSKKFKVLGNTDRHSIKKNLIGALLFDSGETAEATRLKRTARRRYTRRKNRICYLQEIFSNEMAKVDDSFFHRLEESFLVEEDKKHERHPIFGNIVDEVAYHEKYPTIYHLRKKLVDSTDKADLRLIYLALAHMIKFRGHFLIEGDLNPDNSDVDKLFIQLVQTYNQLFEENPINASGVDAKAILSARLSKSRRLENLIAQLPGEKKNGLFGNLIALSLGLTPNFKSNFDLAEDAKLQLSKDTYDDDLDNLLAQIGDQYADLFLAAKNLSDAILLSDILRVNTEITKAPLSASMIKRYDEHHQDLTLLKALVRQQLPEKYKEIFFDQSKNGYAGYIDGGASQEEFYKFIKPILEKMDGTEELLVKLNREDLLRKQRTFDNGSIPHQIHLGELHAILRRQEDFYPFLKDNREKIEKILTFRIPYYVGPLARGNSRFAWMTRKSEETITPWNFEEVVDKGASAQSFIERMTNFDKNLPNEKVLPKHSLLYEYFTVYNELTKVKYVTEGMRKPAFLSGEQKKAIVDLLFKTNRKVTVKQLKEDYFKKIECFDSVEISGVEDRFNASLGTYHDLLKIIKDKDFLDNEENEDILEDIVLTLTLFEDREMIEERLKTYAHLFDDKVMKQLKRRRYTGWGRLSRKLINGIRDKQSGKTILDFLKSDGFANRNFMQLIHDDSLTFKEDIQKAQVSGQGDSLHEHIANLAGSPAIKKGILQTVKVVDELVKVMGRHKPENIVIEMARENQTTQKGQKNSRERMKRIEEGIKELGSQILKEHPVENTQLQNEKLYLYYLQNGRDMYVDQELDINRLSDYDVDHIVPQSFLKDDSIDNKVLTRSDKARGKSDNVPSEEVVKKMKNYWRQLLNAKLITQRKFDNLTKAERGGLSELDKAGFIKRQLVETRQITKHVAQILDSRMNTKYDENDKLIREVKVITLKSKLVSDFRKDFQFYKVREINNYHHAHDAYLNAVVGTALIKKYPKLESEFVYGDYKVYDVRKMIAKSEQEIGKATAKYFFYSNIMNFFKTEITLANGEIRKRPLIETNGETGEIVWDKGRDFATVRKVLSMPQVNIVKKTEVQTGGFSKESILPKRNSDKLIARKKDWDPKKYGGFDSPTVAYSVLVVAKVEKGKSKKLKSVKELLGITIMERSSFEKNPIDFLEAKGYKEVKKDLIIKLPKYSLFELENGRKRMLASAGELQKGNELALPSKYVNFLYLASHYEKLKGSPEDNEQKQLFVEQHKHYLDEIIEQISEFSKRVILADANLDKVLSAYNKHRDKPIREQAENIIHLFTLTNLGAPAAFKYFDTTIDRKRYTSTKEVLDATLIHQSITGLYETRIDLSQLGGDGGGSSGGSPAPGGIPWLMKKPLQLTTLVPLQEYEERLLKQTMLTGSYKEKLQSLFLKYDALWQHWENQVGHRRIKPHHIATGTVNPRPQKQYPINPKAKASIQTVINDLLKQGVLIQQNSIMNTPVYPVPKPDGKWRMVLDYREVNKTIPLIAAQNQHSAGILSSIFRGKYKTTLDLSNGFWAHSITPESYWLTAFTWLGQQYCWTRLPQGFLNSPALFNADVVDLLKEVPNVQVYVDDIYISHDDPREHLEQLEKVFSLLLNAGYVVSLKKSEIAQHEVEFLGFNITKEGRGLTETFKQKLLNITPPRDLKQLQSILGLLNFARNFIPNFSELVKPLYNIIATAPGKYITWTTDNSQQLQNIISMLNSAENLEERNPEVRLIMKVNTSPSAGYIRFYNEFAKRPIMYLNYVYTKAEVKFTNTEKLLTTIHKGLIKALDLGMGQEILVYSPIVSMTKIQKTPLPERKALPIRWITWMSYLEDPRIQFHYDKTLPELQQVPTVTDDIIAKIKHPSEFSMVFYTDGSAIKHPNVNKSHNAGMGIAQVQFKPEFTVINTWSIPLGDHTAQLAEVAAVEFACKKALKIDGPVLIVTDSFYVAESVNKELPYWQSNGFFNNKKKPLKHVSKWKSIADCIQLKPDIIIIHEKGHQPTASTFHTEGNNLADKLATQGSYVVNAGKRTADGSEFEKRTADGSEFESPKKKAKVE

SEQ ID NO: 546 - protein, 2085 aa, synthetic construct
MPAAKRVKLDGGDKKYSIGLDIGTNSVGWAVITDEYKVPSKKFKVLGNTDRHSIKKNLIGALLFDSGETAEATRLKRTARRRYTRRKNRICYLQEIFSNEMAKVDDSFFHRLEESFLVEEDKKHERHPIFGNIVDEVAYHEKYPTIYHLRKKLVDSTDKADLRLIYLALAHMIKFRGHFLIEGDLNPDNSDVDKLFIQLVQTYNQLFEENPINASGVDAKAILSARLSKSRRLENLIAQLPGEKKNGLFGNLIALSLGLTPNFKSNFDLAEDAKLQLSKDTYDDDLDNLLAQIGDQYADLFLAAKNLSDAILLSDILRVNTEITKAPLSASMIKRYDEHHQDLTLLKALVRQQLPEKYKEIFFDQSKNGYAGYIDGGASQEEFYKFIKPILEKMDGTEELLVKLNREDLLRKQRTFDNGSIPHQIHLGELHAILRRQEDFYPFLKDNREKIEKILTFRIPYYVGPLARGNSRFAWMTRKSEETITPWNFEEVVDKGASAQSFIERMTNFDKNLPNEKVLPKHSLLYEYFTVYNELTKVKYVTEGMRKPAFLSGEQKKAIVDLLFKTNRKVTVKQLKEDYFKKIECFDSVEISGVEDRFNASLGTYHDLLKIIKDKDFLDNEENEDILEDIVLTLTLFEDREMIEERLKTYAHLFDDKVMKQLKRRRYTGWGRLSRKLINGIRDKQSGKTILDFLKSDGFANRNFMQLIHDDSLTFKEDIQKAQVSGQGDSLHEHIANLAGSPAIKKGILQTVKVVDELVKVMGRHKPENIVIEMARENQTTQKGQKNSRERMKRIEEGIKELGSQILKEHPVENTQLQNEKLYLYYLQNGRDMYVDQELDINRLSDYDVDHIVPQSFLKDDSIDNKVLTRSDKARGKSDNVPSEEVVKKMKNYWRQLLNAKLITQRKFDNLTKAERGGLSELDKAGFIKRQLVETRQITKHVAQILDSRMNTKYDENDKLIREVKVITLKSKLVSDFRKDFQFYKVREINNYHHAHDAYLNAVVGTALIKKYPKLESEFVYGDYKVYDVRKMIAKSEQEIGKATAKYFFYSNIMNFFKTEITLANGEIRKRPLIETNGETGEIVWDKGRDFATVRKVLSMPQVNIVKKTEVQTGGFSKESILPKRNSDKLIARKKDWDPKKYGGFDSPTVAYSVLVVAKVEKGKSKKLKSVKELLGITIMERSSFEKNPIDFLEAKGYKEVKKDLIIKLPKYSLFELENGRKRMLASAGELQKGNELALPSKYVNFLYLASHYEKLKGSPEDNEQKQLFVEQHKHYLDEIIEQISEFSKRVILADANLDKVLSAYNKHRDKPIREQAENIIHLFTLTNLGAPAAFKYFDTTIDRKRYTSTKEVLDATLIHQSITGLYETRIDLSQLGGDGGPAPGSSGGGGGIPWLMKKPLQLTTLVPLQEYEERLLKQTMLTGSYKEKLQSLFLKYDALWQHWENQVGHRRIKPHHIATGTVNPRPQKQYPINPKAKASIQTVINDLLKQGVLIQQNSIMNTPVYPVPKPDGKWRMVLDYREVNKTIPLIAAQNQHSAGILSSIFRGKYKTTLDLSNGFWAHSITPESYWLTAFTWLGQQYCWTRLPQGFLNSPALFNADVVDLLKEVPNVQVYVDDIYISHDDPREHLEQLEKVFSLLLNAGYVVSLKKSEIAQHEVEFLGFNITKEGRGLTETFKQKLLNITPPRDLKQLQSILGLLNFARNFIPNFSELVKPLYNIIATAPGKYITWTTDNSQQLQNIISMLNSAENLEERNPEVRLIMKVNTSPSAGYIRFYNEFAKRPIMYLNYVYTKAEVKFTNTEKLLTTIHKGLIKALDLGMGQEILVYSPIVSMTKIQKTPLPERKALPIRWITWMSYLEDPRIQFHYDKTLPELQQVPTVTDDIIAKIKHPSEFSMVFYTDGSAIKHPNVNKSHNAGMGIAQVQFKPEFTVINTWSIPLGDHTAQLAEVAAVEFACKKALKIDGPVLIVTDSFYVAESVNKELPYWQSNGFFNNKKKPLKHVSKWKSIADCIQLKPDIIIIHEKGHQPTASTFHTEGNNLADKLATQGSYVVNAGKRTADGSEFEKRTADGSEFESPKKKAKVE

SEQ ID NO: 547 - protein, 2085 aa, synthetic construct
MPAAKRVKLDGGDKKYSIGLDIGTNSVGWAVITDEYKVPSKKFKVLGNTDRHSIKKNLIGALLFDSGETAEATRLKRTARRRYTRRKNRICYLQEIFSNEMAKVDDSFFHRLEESFLVEEDKKHERHPIFGNIVDEVAYHEKYPTIYHLRKKLVDSTDKADLRLIYLALAHMIKFRGHFLIEGDLNPDNSDVDKLFIQLVQTYNQLFEENPINASGVDAKAILSARLSKSRRLENLIAQLPGEKKNGLFGNLIALSLGLTPNFKSNFDLAEDAKLQLSKDTYDDDLDNLLAQIGDQYADLFLAAKNLSDAILLSDILRVNTEITKAPLSASMIKRYDEHHQDLTLLKALVRQQLPEKYKEIFFDQSKNGYAGYIDGGASQEEFYKFIKPILEKMDGTEELLVKLNREDLLRKQRTFDNGSIPHQIHLGELHAILRRQEDFYPFLKDNREKIEKILTFRIPYYVGPLARGNSRFAWMTRKSEETITPWNFEEVVDKGASAQSFIERMTNFDKNLPNEKVLPKHSLLYEYFTVYNELTKVKYVTEGMRKPAFLSGEQKKAIVDLLFKTNRKVTVKQLKEDYFKKIECFDSVEISGVEDRFNASLGTYHDLLKIIKDKDFLDNEENEDILEDIVLTLTLFEDREMIEERLKTYAHLFDDKVMKQLKRRRYTGWGRLSRKLINGIRDKQSGKTILDFLKSDGFANRNFMQLIHDDSLTFKEDIQKAQVSGQGDSLHEHIANLAGSPAIKKGILQTVKVVDELVKVMGRHKPENIVIEMARENQTTQKGQKNSRERMKRIEEGIKELGSQILKEHPVENTQLQNEKLYLYYLQNGRDMYVDQELDINRLSDYDVDHIVPQSFLKDDSIDNKVLTRSDKARGKSDNVPSEEVVKKMKNYWRQLLNAKLITQRKFDNLTKAERGGLSELDKAGFIKRQLVETRQITKHVAQILDSRMNTKYDENDKLIREVKVITLKSKLVSDFRKDFQFYKVREINNYHHAHDAYLNAVVGTALIKKYPKLESEFVYGDYKVYDVRKMIAKSEQEIGKATAKYFFYSNIMNFFKTEITLANGEIRKRPLIETNGETGEIVWDKGRDFATVRKVLSMPQVNIVKKTEVQTGGFSKESILPKRNSDKLIARKKDWDPKKYGGFDSPTVAYSVLVVAKVEKGKSKKLKSVKELLGITIMERSSFEKNPIDFLEAKGYKEVKKDLIIKLPKYSLFELENGRKRMLASAGELQKGNELALPSKYVNFLYLASHYEKLKGSPEDNEQKQLFVEQHKHYLDEIIEQISEFSKRVILADANLDKVLSAYNKHRDKPIREQAENIIHLFTLTNLGAPAAFKYFDTTIDRKRYTSTKEVLDATLIHQSITGLYETRIDLSQLGGDGGGSSGGGPAPGGIPWLMKKPLQLTTLVPLQEYEERLLKQTMLTGSYKEKLQSLFLKYDALWQHWENQVGHRRIKPHHIATGTVNPRPQKQYPINPKAKASIQTVINDLLKQGVLIQQNSIMNTPVYPVPKPDGKWRMVLDYREVNKTIPLIAAQNQHSAGILSSIFRGKYKTTLDLSNGFWAHSITPESYWLTAFTWLGQQYCWTRLPQGFLNSPALFNADVVDLLKEVPNVQVYVDDIYISHDDPREHLEQLEKVFSLLLNAGYVVSLKKSEIAQHEVEFLGFNITKEGRGLTETFKQKLLNITPPRDLKQLQSILGLLNFARNFIPNFSELVKPLYNIIATAPGKYITWTTDNSQQLQNIISMLNSAENLEERNPEVRLIMKVNTSPSAGYIRFYNEFAKRPIMYLNYVYTKAEVKFTNTEKLLTTIHKGLIKALDLGMGQEILVYSPIVSMTKIQKTPLPERKALPIRWITWMSYLEDPRIQFHYDKTLPELQQVPTVTDDIIAKIKHPSEFSMVFYTDGSAIKHPNVNKSHNAGMGIAQVQFKPEFTVINTWSIPLGDHTAQLAEVAAVEFACKKALKIDGPVLIVTDSFYVAESVNKELPYWQSNGFFNNKKKPLKHVSKWKSIADCIQLKPDIIIIHEKGHQPTASTFHTEGNNLADKLATQGSYVVNAGKRTADGSEFEKRTADGSEFESPKKKAKVE

SEQ ID NO: 548 - protein, 2087 aa, synthetic construct
MPAAKRVKLDGGDKKYSIGLDIGTNSVGWAVITDEYKVPSKKFKVLGNTDRHSIKKNLIGALLFDSGETAEATRLKRTARRRYTRRKNRICYLQEIFSNEMAKVDDSFFHRLEESFLVEEDKKHERHPIFGNIVDEVAYHEKYPTIYHLRKKLVDSTDKADLRLIYLALAHMIKFRGHFLIEGDLNPDNSDVDKLFIQLVQTYNQLFEENPINASGVDAKAILSARLSKSRRLENLIAQLPGEKKNGLFGNLIALSLGLTPNFKSNFDLAEDAKLQLSKDTYDDDLDNLLAQIGDQYADLFLAAKNLSDAILLSDILRVNTEITKAPLSASMIKRYDEHHQDLTLLKALVRQQLPEKYKEIFFDQSKNGYAGYIDGGASQEEFYKFIKPILEKMDGTEELLVKLNREDLLRKQRTFDNGSIPHQIHLGELHAILRRQEDFYPFLKDNREKIEKILTFRIPYYVGPLARGNSRFAWMTRKSEETITPWNFEEVVDKGASAQSFIERMTNFDKNLPNEKVLPKHSLLYEYFTVYNELTKVKYVTEGMRKPAFLSGEQKKAIVDLLFKTNRKVTVKQLKEDYFKKIECFDSVEISGVEDRFNASLGTYHDLLKIIKDKDFLDNEENEDILEDIVLTLTLFEDREMIEERLKTYAHLFDDKVMKQLKRRRYTGWGRLSRKLINGIRDKQSGKTILDFLKSDGFANRNFMQLIHDDSLTFKEDIQKAQVSGQGDSLHEHIANLAGSPAIKKGILQTVKVVDELVKVMGRHKPENIVIEMARENQTTQKGQKNSRERMKRIEEGIKELGSQILKEHPVENTQLQNEKLYLYYLQNGRDMYVDQELDINRLSDYDVDHIVPQSFLKDDSIDNKVLTRSDKARGKSDNVPSEEVVKKMKNYWRQLLNAKLITQRKFDNLTKAERGGLSELDKAGFIKRQLVETRQITKHVAQILDSRMNTKYDENDKLIREVKVITLKSKLVSDFRKDFQFYKVREINNYHHAHDAYLNAVVGTALIKKYPKLESEFVYGDYKVYDVRKMIAKSEQEIGKATAKYFFYSNIMNFFKTEITLANGEIRKRPLIETNGETGEIVWDKGRDFATVRKVLSMPQVNIVKKTEVQTGGFSKESILPKRNSDKLIARKKDWDPKKYGGFDSPTVAYSVLVVAKVEKGKSKKLKSVKELLGITIMERSSFEKNPIDFLEAKGYKEVKKDLIIKLPKYSLFELENGRKRMLASAGELQKGNELALPSKYVNFLYLASHYEKLKGSPEDNEQKQLFVEQHKHYLDEIIEQISEFSKRVILADANLDKVLSAYNKHRDKPIREQAENIIHLFTLTNLGAPAAFKYFDTTIDRKRYTSTKEVLDATLIHQSITGLYETRIDLSQLGGDGGGGSEAAAKPAPGGIPWLMKKPLQLTTLVPLQEYEERLLKQTMLTGSYKEKLQSLFLKYDALWQHWENQVGHRRIKPHHIATGTVNPRPQKQYPINPKAKASIQTVINDLLKQGVLIQQNSIMNTPVYPVPKPDGKWRMVLDYREVNKTIPLIAAQNQHSAGILSSIFRGKYKTTLDLSNGFWAHSITPESYWLTAFTWLGQQYCWTRLPQGFLNSPALFNADVVDLLKEVPNVQVYVDDIYISHDDPREHLEQLEKVFSLLLNAGYVVSLKKSEIAQHEVEFLGFNITKEGRGLTETFKQKLLNITPPRDLKQLQSILGLLNFARNFIPNFSELVKPLYNIIATAPGKYITWTTDNSQQLQNIISMLNSAENLEERNPEVRLIMKVNTSPSAGYIRFYNEFAKRPIMYLNYVYTKAEVKFTNTEKLLTTIHKGLIKALDLGMGQEILVYSPIVSMTKIQKTPLPERKALPIRWITWMSYLEDPRIQFHYDKTLPELQQVPTVTDDIIAKIKHPSEFSMVFYTDGSAIKHPNVNKSHNAGMGIAQVQFKPEFTVINTWSIPLGDHTAQLAEVAAVEFACKKALKIDGPVLIVTDSFYVAESVNKELPYWQSNGFFNNKKKPLKHVSKWKSIADCIQLKPDIIIIHEKGHQPTASTFHTEGNNLADKLATQGSYVVNAGKRTADGSEFEKRTADGSEFESPKKKAKVE

SEQ ID NO: 549 - protein, 2087 aa, synthetic construct
MPAAKRVKLDGGDKKYSIGLDIGTNSVGWAVITDEYKVPSKKFKVLGNTDRHSIKKNLIGALLFDSGETAEATRLKRTARRRYTRRKNRICYLQEIFSNEMAKVDDSFFHRLEESFLVEEDKKHERHPIFGNIVDEVAYHEKYPTIYHLRKKLVDSTDKADLRLIYLALAHMIKFRGHFLIEGDLNPDNSDVDKLFIQLVQTYNQLFEENPINASGVDAKAILSARLSKSRRLENLIAQLPGEKKNGLFGNLIALSLGLTPNFKSNFDLAEDAKLQLSKDTYDDDLDNLLAQIGDQYADLFLAAKNLSDAILLSDILRVNTEITKAPLSASMIKRYDEHHQDLTLLKALVRQQLPEKYKEIFFDQSKNGYAGYIDGGASQEEFYKFIKPILEKMDGTEELLVKLNREDLLRKQRTFDNGSIPHQIHLGELHAILRRQEDFYPFLKDNREKIEKILTFRIPYYVGPLARGNSRFAWMTRKSEETITPWNFEEVVDKGASAQSFIERMTNFDKNLPNEKVLPKHSLLYEYFTVYNELTKVKYVTEGMRKPAFLSGEQKKAIVDLLFKTNRKVTVKQLKEDYFKKIECFDSVEISGVEDRFNASLGTYHDLLKIIKDKDFLDNEENEDILEDIVLTLTLFEDREMIEERLKTYAHLFDDKVMKQLKRRRYTGWGRLSRKLINGIRDKQSGKTILDFLKSDGFANRNFMQLIHDDSLTFKEDIQKAQVSGQGDSLHEHIANLAGSPAIKKGILQTVKVVDELVKVMGRHKPENIVIEMARENQTTQKGQKNSRERMKRIEEGIKELGSQILKEHPVENTQLQNEKLYLYYLQNGRDMYVDQELDINRLSDYDVDHIVPQSFLKDDSIDNKVLTRSDKARGKSDNVPSEEVVKKMKNYWRQLLNAKLITQRKFDNLTKAERGGLSELDKAGFIKRQLVETRQITKHVAQILDSRMNTKYDENDKLIREVKVITLKSKLVSDFRKDFQFYKVREINNYHHAHDAYLNAVVGTALIKKYPKLESEFVYGDYKVYDVRKMIAKSEQEIGKATAKYFFYSNIMNFFKTEITLANGEIRKRPLIETNGETGEIVWDKGRDFATVRKVLSMPQVNIVKKTEVQTGGFSKESILPKRNSDKLIARKKDWDPKKYGGFDSPTVAYSVLVVAKVEKGKSKKLKSVKELLGITIMERSSFEKNPIDFLEAKGYKEVKKDLIIKLPKYSLFELENGRKRMLASAGELQKGNELALPSKYVNFLYLASHYEKLKGSPEDNEQKQLFVEQHKHYLDEIIEQISEFSKRVILADANLDKVLSAYNKHRDKPIREQAENIIHLFTLTNLGAPAAFKYFDTTIDRKRYTSTKEVLDATLIHQSITGLYETRIDLSQLGGDGGGGGPAPEAAAKGGIPWLMKKPLQLTTLVPLQEYEERLLKQTMLTGSYKEKLQSLFLKYDALWQHWENQVGHRRIKPHHIATGTVNPRPQKQYPINPKAKASIQTVINDLLKQGVLIQQNSIMNTPVYPVPKPDGKWRMVLDYREVNKTIPLIAAQNQHSAGILSSIFRGKYKTTLDLSNGFWAHSITPESYWLTAFTWLGQQYCWTRLPQGFLNSPALFNADVVDLLKEVPNVQVYVDDIYISHDDPREHLEQLEKVFSLLLNAGYVVSLKKSEIAQHEVEFLGFNITKEGRGLTETFKQKLLNITPPRDLKQLQSILGLLNFARNFIPNFSELVKPLYNIIATAPGKYITWTTDNSQQLQNIISMLNSAENLEERNPEVRLIMKVNTSPSAGYIRFYNEFAKRPIMYLNYVYTKAEVKFTNTEKLLTTIHKGLIKALDLGMGQEILVYSPIVSMTKIQKTPLPERKALPIRWITWMSYLEDPRIQFHYDKTLPELQQVPTVTDDIIAKIKHPSEFSMVFYTDGSAIKHPNVNKSHNAGMGIAQVQFKPEFTVINTWSIPLGDHTAQLAEVAAVEFACKKALKIDGPVLIVTDSFYVAESVNKELPYWQSNGFFNNKKKPLKHVSKWKSIADCIQLKPDIIIIHEKGHQPTASTFHTEGNNLADKLATQGSYVVNAGKRTADGSEFEKRTADGSEFESPKKKAKVE

SEQ ID NO: 550 - protein, 2106 aa, synthetic construct
MPAAKRVKLDGGDKKYSIGLDIGTNSVGWAVITDEYKVPSKKFKVLGNTDRHSIKKNLIGALLFDSGETAEATRLKRTARRRYTRRKNRICYLQEIFSNEMAKVDDSFFHRLEESFLVEEDKKHERHPIFGNIVDEVAYHEKYPTIYHLRKKLVDSTDKADLRLIYLALAHMIKFRGHFLIEGDLNPDNSDVDKLFIQLVQTYNQLFEENPINASGVDAKAILSARLSKSRRLENLIAQLPGEKKNGLFGNLIALSLGLTPNFKSNFDLAEDAKLQLSKDTYDDDLDNLLAQIGDQYADLFLAAKNLSDAILLSDILRVNTEITKAPLSASMIKRYDEHHQDLTLLKALVRQQLPEKYKEIFFDQSKNGYAGYIDGGASQEEFYKFIKPILEKMDGTEELLVKLNREDLLRKQRTFDNGSIPHQIHLGELHAILRRQEDFYPFLKDNREKIEKILTFRIPYYVGPLARGNSRFAWMTRKSEETITPWNFEEVVDKGASAQSFIERMTNFDKNLPNEKVLPKHSLLYEYFTVYNELTKVKYVTEGMRKPAFLSGEQKKAIVDLLFKTNRKVTVKQLKEDYFKKIECFDSVEISGVEDRFNASLGTYHDLLKIIKDKDFLDNEENEDILEDIVLTLTLFEDREMIEERLKTYAHLFDDKVMKQLKRRRYTGWGRLSRKLINGIRDKQSGKTILDFLKSDGFANRNFMQLIHDDSLTFKEDIQKAQVSGQGDSLHEHIANLAGSPAIKKGILQTVKVVDELVKVMGRHKPENIVIEMARENQTTQKGQKNSRERMKRIEEGIKELGSQILKEHPVENTQLQNEKLYLYYLQNGRDMYVDQELDINRLSDYDVDHIVPQSFLKDDSIDNKVLTRSDKARGKSDNVPSEEVVKKMKNYWRQLLNAKLITQRKFDNLTKAERGGLSELDKAGFIKRQLVETRQITKHVAQILDSRMNTKYDENDKLIREVKVITLKSKLVSDFRKDFQFYKVREINNYHHAHDAYLNAVVGTALIKKYPKLESEFVYGDYKVYDVRKMIAKSEQEIGKATAKYFFYSNIMNFFKTEITLANGEIRKRPLIETNGETGEIVWDKGRDFATVRKVLSMPQVNIVKKTEVQTGGFSKESILPKRNSDKLIARKKDWDPKKYGGFDSPTVAYSVLVVAKVEKGKSKKLKSVKELLGITIMERSSFEKNPIDFLEAKGYKEVKKDLIIKLPKYSLFELENGRKRMLASAGELQKGNELALPSKYVNFLYLASHYEKLKGSPEDNEQKQLFVEQHKHYLDEIIEQISEFSKRVILADANLDKVLSAYNKHRDKPIREQAENIIHLFTLTNLGAPAAFKYFDTTIDRKRYTSTKEVLDATLIHQSITGLYETRIDLSQLGGDGGEAAAKEAAAKEAAAKEAAAKEAAAKEAAAKGGIPWLMKKPLQLTTLVPLQEYEERLLKQTMLTGSYKEKLQSLFLKYDALWQHWENQVGHRRIKPHHIATGTVNPRPQKQYPINPKAKASIQTVINDLLKQGVLIQQNSIMNTPVYPVPKPDGKWRMVLDYREVNKTIPLIAAQNQHSAGILSSIFRGKYKTTLDLSNGFWAHSITPESYWLTAFTWLGQQYCWTRLPQGFLNSPALFNADVVDLLKEVPNVQVYVDDIYISHDDPREHLEQLEKVFSLLLNAGYVVSLKKSEIAQHEVEFLGFNITKEGRGLTETFKQKLLNITPPRDLKQLQSILGKLNFARNFIPNFSELVKPLYNIIATAPGKYITWTTDNSQQLQNIISMLNSAENLEERNPEVRLIMKVNTSPSAGYIRFYNEFAKRPIMYLNYVYTKAEVKFTNTEKLLTTIHKGLIKALDLGMGQEILVYSPIVSMTKIQKTPLPERKALPIRWITWMSYLEDPRIQFHYDKTLPELQQVPTVTDDIIAKIKHPSEFSMVFYTDGSAIKHPNVNKSHNAGMGIAQVQFKPEFTVINTWSIPLGDHTAQLAEVAAVEFACKKALKIDGPVLIVTDSFYVAESVNKELPYWQSNGFFNNKKKPLKHVSKWKSIADCIQLKPDIIIIHEKGHQPTASTFHTEGNNLADKLATQGSYVVNAGKRTADGSEFEKRTADGSEFESPKKKAKVE

SEQ ID NO: 551 - protein, 2079 aa, synthetic construct
MPAAKRVKLDGGDKKYSIGLDIGTNSVGWAVITDEYKVPSKKFKVLGNTDRHSIKKNLIGALLFDSGETAEATRLKRTARRRYTRRKNRICYLQEIFSNEMAKVDDSFFHRLEESFLVEEDKKHERHPIFGNIVDEVAYHEKYPTIYHLRKKLVDSTDKADLRLIYLALAHMIKFRGHFLIEGDLNPDNSDVDKLFIQLVQTYNQLFEENPINASGVDAKAILSARLSKSRRLENLIAQLPGEKKNGLFGNLIALSLGLTPNFKSNFDLAEDAKLQLSKDTYDDDLDNLLAQIGDQYADLFLAAKNLSDAILLSDILRVNTEITKAPLSASMIKRYDEHHQDLTLLKALVRQQLPEKYKEIFFDQSKNGYAGYIDGGASQEEFYKFIKPILEKMDGTEELLVKLNREDLLRKQRTFDNGSIPHQIHLGELHAILRRQEDFYPFLKDNREKIEKILTFRIPYYVGPLARGNSRFAWMTRKSEETITPWNFEEVVDKGASAQSFIERMTNFDKNLPNEKVLPKHSLLYEYFTVYNELTKVKYVTEGMRKPAFLSGEQKKAIVDLLFKTNRKVTVKQLKEDYFKKIECFDSVEISGVEDRFNASLGTYHDLLKIIKDKDFLDNEENEDILEDIVLTLTLFEDREMIEERLKTYAHLFDDKVMKQLKRRRYTGWGRLSRKLINGIRDKQSGKTILDFLKSDGFANRNFMQLIHDDSLTFKEDIQKAQVSGQGDSLHEHIANLAGSPAIKKGILQTVKVVDELVKVMGRHKPENIVIEMARENQTTQKGQKNSRERMKRIEEGIKELGSQILKEHPVENTQLQNEKLYLYYLQNGRDMYVDQELDINRLSDYDVDHIVPQSFLKDDSIDNKVLTRSDKARGKSDNVPSEEVVKKMKNYWRQLLNAKLITQRKFDNLTKAERGGLSELDKAGFIKRQLVETRQITKHVAQILDSRMNTKYDENDKLIREVKVITLKSKLVSDFRKDFQFYKVREINNYHHAHDAYLNAVVGTALIKKYPKLESEFVYGDYKVYDVRKMIAKSEQEIGKATAKYFFYSNIMNFFKTEITLANGEIRKRPLIETNGETGEIVWDKGRDFATVRKVLSMPQVNIVKKTEVQTGGFSKESILPKRNSDKLIARKKDWDPKKYGGFDSPTVAYSVLVVAKVEKGKSKKLKSVKELLGITIMERSSFEKNPIDFLEAKGYKEVKKDLIIKLPKYSLFELENGRKRMLASAGELQKGNELALPSKYVNFLYLASHYEKLKGSPEDNEQKQLFVEQHKHYLDEIIEQISEFSKRVILADANLDKVLSAYNKHRDKPIREQAENIIHLFTLTNLGAPAAFKYFDTTIDRKRYTSTKEVLDATLIHQSITGLYETRIDLSQLGGDGGGSSGGIPWLMKKPLQLTTLVPLQEYEERLLKQTMLTGSYKEKLQSLFLKYDALWQHWENQVGHRRIKPHHIATGTVNPRPQKQYPINPKAKASIQTVINDLLKQGVLIQQNSIMNTPVYPVPKPDGKWRMVLDYREVNKTIPLIAAQNQHSAGILSSIFRGKYKTTLDLSNGFWAHSITPESYWLTAFTWLGQQYCWTRLPQGFLNSPALFNADVVDLLKEVPNVQVYVDDIYISHDDPREHLEQLEKVFSLLLNAGYVVSLKKSEIAQHEVEFLGFNITKEGRGLTETFKQKLLNITPPRDLKQLQSILGKLNFARNFIPNFSELVKPLYNIIATAPGKYITWTTDNSQQLQNIISMLNSAENLEERNPEVRLIMKVNTSPSAGYIRFYNEFAKRPIMYLNYVYTKAEVKFTNTEKLLTTIHKGLIKALDLGMGQEILVYSPIVSMTKIQKTPLPERKALPIRWITWMSYLEDPRIQFHYDKTLPELQQVPTVTDDIIAKIKHPSEFSMVFYTDGSAIKHPNVNKSHNAGMGIAQVQFKPEFTVINTWSIPLGDHTAQLAEVAAVEFACKKALKIDGPVLIVTDSFYVAESVNKELPYWQSNGFFNNKKKPLKHVSKWKSIADCIQLKPDIIIIHEKGHQPTASTFHTEGNNLADKLATQGSYVVNAGKRTADGSEFEKRTADGSEFESPKKKAKVE

SEQ ID NO: 552 - protein, 2079 aa, synthetic construct
MPAAKRVKLDGGDKKYSIGLDIGTNSVGWAVITDEYKVPSKKFKVLGNTDRHSIKKNLIGALLFDSGETAEATRLKRTARRRYTRRKNRICYLQEIFSNEMAKVDDSFFHRLEESFLVEEDKKHERHPIFGNIVDEVAYHEKYPTIYHLRKKLVDSTDKADLRLIYLALAHMIKFRGHFLIEGDLNPDNSDVDKLFIQLVQTYNQLFEENPINASGVDAKAILSARLSKSRRLENLIAQLPGEKKNGLFGNLIALSLGLTPNFKSNFDLAEDAKLQLSKDTYDDDLDNLLAQIGDQYADLFLAAKNLSDAILLSDILRVNTEITKAPLSASMIKRYDEHHQDLTLLKALVRQQLPEKYKEIFFDQSKNGYAGYIDGGASQEEFYKFIKPILEKMDGTEELLVKLNREDLLRKQRTFDNGSIPHQIHLGELHAILRRQEDFYPFLKDNREKIEKILTFRIPYYVGPLARGNSRFAWMTRKSEETITPWNFEEVVDKGASAQSFIERMTNFDKNLPNEKVLPKHSLLYEYFTVYNELTKVKYVTEGMRKPAFLSGEQKKAIVDLLFKTNRKVTVKQLKEDYFKKIECFDSVEISGVEDRFNASLGTYHDLLKIIKDKDFLDNEENEDILEDIVLTLTLFEDREMIEERLKTYAHLFDDKVMKQLKRRRYTGWGRLSRKLINGIRDKQSGKTILDFLKSDGFANRNFMQLIHDDSLTFKEDIQKAQVSGQGDSLHEHIANLAGSPAIKKGILQTVKVVDELVKVMGRHKPENIVIEMARENQTTQKGQKNSRERMKRIEEGIKELGSQILKEHPVENTQLQNEKLYLYYLQNGRDMYVDQELDINRLSDYDVDHIVPQSFLKDDSIDNKVLTRSDKARGKSDNVPSEEVVKKMKNYWRQLLNAKLITQRKFDNLTKAERGGLSELDKAGFIKRQLVETRQITKHVAQILDSRMNTKYDENDKLIREVKVITLKSKLVSDFRKDFQFYKVREINNYHHAHDAYLNAVVGTALIKKYPKLESEFVYGDYKVYDVRKMIAKSEQEIGKATAKYFFYSNIMNFFKTEITLANGEIRKRPLIETNGETGEIVWDKGRDFATVRKVLSMPQVNIVKKTEVQTGGFSKESILPKRNSDKLIARKKDWDPKKYGGFDSPTVAYSVLVVAKVEKGKSKKLKSVKELLGITIMERSSFEKNPIDFLEAKGYKEVKKDLIIKLPKYSLFELENGRKRMLASAGELQKGNELALPSKYVNFLYLASHYEKLKGSPEDNEQKQLFVEQHKHYLDEIIEQISEFSKRVILADANLDKVLSAYNKHRDKPIREQAENIIHLFTLTNLGAPAAFKYFDTTIDRKRYTSTKEVLDATLIHQSITGLYETRIDLSQLGGDGGGGSGGIPWLMKKPLQLTTLVPLQEYEERLLKQTMLTGSYKEKLQSLFLKYDALWQHWENQVGHRRIKPHHIATGTVNPRPQKQYPINPKAKASIQTVINDLLKQGVLIQQNSIMNTPVYPVPKPDGKWRMVLDYREVNKTIPLIAAQNQHSAGILSSIFRGKYKTTLDLSNGFWAHSITPESYWLTAFTWLGQQYCWTRLPQGFLNSPALFNADVVDLLKEVPNVQVYVDDIYISHDDPREHLEQLEKVFSLLLNAGYVVSLKKSEIAQHEVEFLGFNITKEGRGLTETFKQKLLNITPPRDLKQLQSILGKLNFARNFIPNFSELVKPLYNIIATAPGKYITWTTDNSQQLQNIISMLNSAENLEERNPEVRLIMKVNTSPSAGYIRFYNEFAKRPIMYLNYVYTKAEVKFTNTEKLLTTIHKGLIKALDLGMGQEILVYSPIVSMTKIQKTPLPERKALPIRWITWMSYLEDPRIQFHYDKTLPELQQVPTVTDDIIAKIKHPSEFSMVFYTDGSAIKHPNVNKSHNAGMGIAQVQFKPEFTVINTWSIPLGDHTAQLAEVAAVEFACKKALKIDGPVLIVTDSFYVAESVNKELPYWQSNGFFNNKKKPLKHVSKWKSIADCIQLKPDIIIIHEKGHQPTASTFHTEGNNLADKLATQGSYVVNAGKRTADGSEFEKRTADGSEFESPKKKAKVE

SEQ ID NO: 553 - protein, 2087 aa, synthetic construct
MPAAKRVKLDGGDKKYSIGLDIGTNSVGWAVITDEYKVPSKKFKVLGNTDRHSIKKNLIGALLFDSGETAEATRLKRTARRRYTRRKNRICYLQEIFSNEMAKVDDSFFHRLEESFLVEEDKKHERHPIFGNIVDEVAYHEKYPTIYHLRKKLVDSTDKADLRLIYLALAHMIKFRGHFLIEGDLNPDNSDVDKLFIQLVQTYNQLFEENPINASGVDAKAILSARLSKSRRLENLIAQLPGEKKNGLFGNLIALSLGLTPNFKSNFDLAEDAKLQLSKDTYDDDLDNLLAQIGDQYADLFLAAKNLSDAILLSDILRVNTEITKAPLSASMIKRYDEHHQDLTLLKALVRQQLPEKYKEIFFDQSKNGYAGYIDGGASQEEFYKFIKPILEKMDGTEELLVKLNREDLLRKQRTFDNGSIPHQIHLGELHAILRRQEDFYPFLKDNREKIEKILTFRIPYYVGPLARGNSRFAWMTRKSEETITPWNFEEVVDKGASAQSFIERMTNFDKNLPNEKVLPKHSLLYEYFTVYNELTKVKYVTEGMRKPAFLSGEQKKAIVDLLFKTNRKVTVKQLKEDYFKKIECFDSVEISGVEDRFNASLGTYHDLLKIIKDKDFLDNEENEDILEDIVLTLTLFEDREMIEERLKTYAHLFDDKVMKQLKRRRYTGWGRLSRKLINGIRDKQSGKTILDFLKSDGFANRNFMQLIHDDSLTFKEDIQKAQVSGQGDSLHEHIANLAGSPAIKKGILQTVKVVDELVKVMGRHKPENIVIEMARENQTTQKGQKNSRERMKRIEEGIKELGSQILKEHPVENTQLQNEKLYLYYLQNGRDMYVDQELDINRLSDYDVDHIVPQSFLKDDSIDNKVLTRSDKARGKSDNVPSEEVVKKMKNYWRQLLNAKLITQRKFDNLTKAERGGLSELDKAGFIKRQLVETRQITKHVAQILDSRMNTKYDENDKLIREVKVITLKSKLVSDFRKDFQFYKVREINNYHHAHDAYLNAVVGTALIKKYPKLESEFVYGDYKVYDVRKMIAKSEQEIGKATAKYFFYSNIMNFFKTEITLANGEIRKRPLIETNGETGEIVWDKGRDFATVRKVLSMPQVNIVKKTEVQTGGFSKESILPKRNSDKLIARKKDWDPKKYGGFDSPTVAYSVLVVAKVEKGKSKKLKSVKELLGITIMERSSFEKNPIDFLEAKGYKEVKKDLIIKLPKYSLFELENGRKRMLASAGELQKGNELALPSKYVNFLYLASHYEKLKGSPEDNEQKQLFVEQHKHYLDEIIEQISEFSKRVILADANLDKVLSAYNKHRDKPIREQAENIIHLFTLTNLGAPAAFKYFDTTIDRKRYTSTKEVLDATLIHQSITGLYETRIDLSQLGGDGGGSSEAAAKPAPGGIPWLMKKPLQLTTLVPLQEYEERLLKQTMLTGSYKEKLQSLFLKYDALWQHWENQVGHRRIKPHHIATGTVNPRPQKQYPINPKAKASIQTVINDLLKQGVLIQQNSIMNTPVYPVPKPDGKWRMVLDYREVNKTIPLIAAQNQHSAGILSSIFRGKYKTTLDLSNGFWAHSITPESYWLTAFTWLGQQYCWTRLPQGFLNSPALFNADVVDLLKEVPNVQVYVDDIYISHDDPREHLEQLEKVFSLLLNAGYVVSLKKSEIAQHEVEFLGFNITKEGRGLTETFKQKLLNITPPRDLKQLQSILGKLNFARNFIPNFSELVKPLYNIIATAPGKYITWTTDNSQQLQNIISMLNSAENLEERNPEVRLIMKVNTSPSAGYIRFYNEFAKRPIMYLNYVYTKAEVKFTNTEKLLTTIHKGLIKALDLGMGQEILVYSPIVSMTKIQKTPLPERKALPIRWITWMSYLEDPRIQFHYDKTLPELQQVPTVTDDIIAKIKHPSEFSMVFYTDGSAIKHPNVNKSHNAGMGIAQVQFKPEFTVINTWSIPLGDHTAQLAEVAAVEFACKKALKIDGPVLIVTDSFYVAESVNKELPYWQSNGFFNNKKKPLKHVSKWKSIADCIQLKPDIIIIHEKGHQPTASTFHTEGNNLADKLATQGSYVVNAGKRTADGSEFEKRTADGSEFESPKKKAKVE

SEQ ID NO: 554 - protein, 2081 aa, synthetic construct
MPAAKRVKLDGGDKKYSIGLDIGTNSVGWAVITDEYKVPSKKFKVLGNTDRHSIKKNLIGALLFDSGETAEATRLKRTARRRYTRRKNRICYLQEIFSNEMAKVDDSFFHRLEESFLVEEDKKHERHPIFGNIVDEVAYHEKYPTIYHLRKKLVDSTDKADLRLIYLALAHMIKFRGHFLIEGDLNPDNSDVDKLFIQLVQTYNQLFEENPINASGVDAKAILSARLSKSRRLENLIAQLPGEKKNGLFGNLIALSLGLTPNFKSNFDLAEDAKLQLSKDTYDDDLDNLLAQIGDQYADLFLAAKNLSDAILLSDILRVNTEITKAPLSASMIKRYDEHHQDLTLLKALVRQQLPEKYKEIFFDQSKNGYAGYIDGGASQEEFYKFIKPILEKMDGTEELLVKLNREDLLRKQRTFDNGSIPHQIHLGELHAILRRQEDFYPFLKDNREKIEKILTFRIPYYVGPLARGNSRFAWMTRKSEETITPWNFEEVVDKGASAQSFIERMTNFDKNLPNEKVLPKHSLLYEYFTVYNELTKVKYVTEGMRKPAFLSGEQKKAIVDLLFKTNRKVTVKQLKEDYFKKIECFDSVEISGVEDRFNASLGTYHDLLKIIKDKDFLDNEENEDILEDIVLTLTLFEDREMIEERLKTYAHLFDDKVMKQLKRRRYTGWGRLSRKLINGIRDKQSGKTILDFLKSDGFANRNFMQLIHDDSLTFKEDIQKAQVSGQGDSLHEHIANLAGSPAIKKGILQTVKVVDELVKVMGRHKPENIVIEMARENQTTQKGQKNSRERMKRIEEGIKELGSQILKEHPVENTQLQNEKLYLYYLQNGRDMYVDQELDINRLSDYDVDHIVPQSFLKDDSIDNKVLTRSDKARGKSDNVPSEEVVKKMKNYWRQLLNAKLITQRKFDNLTKAERGGLSELDKAGFIKRQLVETRQITKHVAQILDSRMNTKYDENDKLIREVKVITLKSKLVSDFRKDFQFYKVREINNYHHAHDAYLNAVVGTALIKKYPKLESEFVYGDYKVYDVRKMIAKSEQEIGKATAKYFFYSNIMNFFKTEITLANGEIRKRPLIETNGETGEIVWDKGRDFATVRKVLSMPQVNIVKKTEVQTGGFSKESILPKRNSDKLIARKKDWDPKKYGGFDSPTVAYSVLVVAKVEKGKSKKLKSVKELLGITIMERSSFEKNPIDFLEAKGYKEVKKDLIIKLPKYSLFELENGRKRMLASAGELQKGNELALPSKYVNFLYLASHYEKLKGSPEDNEQKQLFVEQHKHYLDEIIEQISEFSKRVILADANLDKVLSAYNKHRDKPIREQAENIIHLFTLTNLGAPAAFKYFDTTIDRKRYTSTKEVLDATLIHQSITGLYETRIDLSQLGGDGGEAAAKGGIPWLMKKPLQLTTLVPLQEYEERLLKQTMLTGSYKEKLQSLFLKYDALWQHWENQVGHRRIKPHHIATGTVNPRPQKQYPINPKAKASIQTVINDLLKQGVLIQQNSIMNTPVYPVPKPDGKWRMVLDYREVNKTIPLIAAQNQHSAGILSSIFRGKYKTTLDLSNGFWAHSITPESYWLTAFTWLGQQYCWTRLPQGFLNSPALFNADVVDLLKEVPNVQVYVDDIYISHDDPREHLEQLEKVFSLLLNAGYVVSLKKSEIAQHEVEFLGFNITKEGRGLTETFKQKLLNITPPRDLKQLQSILGKLNFARNFIPNFSELVKPLYNIIATAPGKYITWTTDNSQQLQNIISMLNSAENLEERNPEVRLIMKVNTSPSAGYIRFYNEFAKRPIMYLNYVYTKAEVKFTNTEKLLTTIHKGLIKALDLGMGQEILVYSPIVSMTKIQKTPLPERKALPIRWITWMSYLEDPRIQFHYDKTLPELQQVPTVTDDIIAKIKHPSEFSMVFYTDGSAIKHPNVNKSHNAGMGIAQVQFKPEFTVINTWSIPLGDHTAQLAEVAAVEFACKKALKIDGPVLIVTDSFYVAESVNKELPYWQSNGFFNNKKKPLKHVSKWKSIADCIQLKPDIIIIHEKGHQPTASTFHTEGNNLADKLATQGSYVVNAGKRTADGSEFEKRTADGSEFESPKKKAKVE

SEQ ID NO: 555 - protein, 2087 aa, synthetic construct
MPAAKRVKLDGGDKKYSIGLDIGTNSVGWAVITDEYKVPSKKFKVLGNTDRHSIKKNLIGALLFDSGETAEATRLKRTARRRYTRRKNRICYLQEIFSNEMAKVDDSFFHRLEESFLVEEDKKHERHPIFGNIVDEVAYHEKYPTIYHLRKKLVDSTDKADLRLIYLALAHMIKFRGHFLIEGDLNPDNSDVDKLFIQLVQTYNQLFEENPINASGVDAKAILSARLSKSRRLENLIAQLPGEKKNGLFGNLIALSLGLTPNFKSNFDLAEDAKLQLSKDTYDDDLDNLLAQIGDQYADLFLAAKNLSDAILLSDILRVNTEITKAPLSASMIKRYDEHHQDLTLLKALVRQQLPEKYKEIFFDQSKNGYAGYIDGGASQEEFYKFIKPILEKMDGTEELLVKLNREDLLRKQRTFDNGSIPHQIHLGELHAILRRQEDFYPFLKDNREKIEKILTFRIPYYVGPLARGNSRFAWMTRKSEETITPWNFEEVVDKGASAQSFIERMTNFDKNLPNEKVLPKHSLLYEYFTVYNELTKVKYVTEGMRKPAFLSGEQKKAIVDLLFKTNRKVTVKQLKEDYFKKIECFDSVEISGVEDRFNASLGTYHDLLKIIKDKDFLDNEENEDILEDIVLTLTLFEDREMIEERLKTYAHLFDDKVMKQLKRRRYTGWGRLSRKLINGIRDKQSGKTILDFLKSDGFANRNFMQLIHDDSLTFKEDIQKAQVSGQGDSLHEHIANLAGSPAIKKGILQTVKVVDELVKVMGRHKPENIVIEMARENQTTQKGQKNSRERMKRIEEGIKELGSQILKEHPVENTQLQNEKLYLYYLQNGRDMYVDQELDINRLSDYDVDHIVPQSFLKDDSIDNKVLTRSDKARGKSDNVPSEEVVKKMKNYWRQLLNAKLITQRKFDNLTKAERGGLSELDKAGFIKRQLVETRQITKHVAQILDSRMNTKYDENDKLIREVKVITLKSKLVSDFRKDFQFYKVREINNYHHAHDAYLNAVVGTALIKKYPKLESEFVYGDYKVYDVRKMIAKSEQEIGKATAKYFFYSNIMNFFKTEITLANGEIRKRPLIETNGETGEIVWDKGRDFATVRKVLSMPQVNIVKKTEVQTGGFSKESILPKRNSDKLIARKKDWDPKKYGGFDSPTVAYSVLVVAKVEKGKSKKLKSVKELLGITIMERSSFEKNPIDFLEAKGYKEVKKDLIIKLPKYSLFELENGRKRMLASAGELQKGNELALPSKYVNFLYLASHYEKLKGSPEDNEQKQLFVEQHKHYLDEIIEQISEFSKRVILADANLDKVLSAYNKHRDKPIREQAENIIHLFTLTNLGAPAAFKYFDTTIDRKRYTSTKEVLDATLIHQSITGLYETRIDLSQLGGDGGEAAAKGGSGGGGGIPWLMKKPLQLTTLVPLQEYEERLLKQTMLTGSYKEKLQSLFLKYDALWQHWENQVGHRRIKPHHIATGTVNPRPQKQYPINPKAKASIQTVINDLLKQGVLIQQNSIMNTPVYPVPKPDGKWRMVLDYREVNKTIPLIAAQNQHSAGILSSIFRGKYKTTLDLSNGFWAHSITPESYWLTAFTWLGQQYCWTRLPQGFLNSPALFNADVVDLLKEVPNVQVYVDDIYISHDDPREHLEQLEKVFSLLLNAGYVVSLKKSEIAQHEVEFLGFNITKEGRGLTETFKQKLLNITPPRDLKQLQSILGKLNFARNFIPNFSELVKPLYNIIATAPGKYITWTTDNSQQLQNIISMLNSAENLEERNPEVRLIMKVNTSPSAGYIRFYNEFAKRPIMYLNYVYTKAEVKFTNTEKLLTTIHKGLIKALDLGMGQEILVYSPIVSMTKIQKTPLPERKALPIRWITWMSYLEDPRIQFHYDKTLPELQQVPTVTDDIIAKIKHPSEFSMVFYTDGSAIKHPNVNKSHNAGMGIAQVQFKPEFTVINTWSIPLGDHTAQLAEVAAVEFACKKALKIDGPVLIVTDSFYVAESVNKELPYWQSNGFFNNKKKPLKHVSKWKSIADCIQLKPDIIIIHEKGHQPTASTFHTEGNNLADKLATQGSYVVNAGKRTADGSEFEKRTADGSEFESPKKKAKVE

SEQ ID NO: 556 - protein, 2096 aa, synthetic construct
MPAAKRVKLDGGDKKYSIGLDIGTNSVGWAVITDEYKVPSKKFKVLGNTDRHSIKKNLIGALLFDSGETAEATRLKRTARRRYTRRKNRICYLQEIFSNEMAKVDDSFFHRLEESFLVEEDKKHERHPIFGNIVDEVAYHEKYPTIYHLRKKLVDSTDKADLRLIYLALAHMIKFRGHFLIEGDLNPDNSDVDKLFIQLVQTYNQLFEENPINASGVDAKAILSARLSKSRRLENLIAQLPGEKKNGLFGNLIALSLGLTPNFKSNFDLAEDAKLQLSKDTYDDDLDNLLAQIGDQYADLFLAAKNLSDAILLSDILRVNTEITKAPLSASMIKRYDEHHQDLTLLKALVRQQLPEKYKEIFFDQSKNGYAGYIDGGASQEEFYKFIKPILEKMDGTEELLVKLNREDLLRKQRTFDNGSIPHQIHLGELHAILRRQEDFYPFLKDNREKIEKILTFRIPYYVGPLARGNSRFAWMTRKSEETITPWNFEEVVDKGASAQSFIERMTNFDKNLPNEKVLPKHSLLYEYFTVYNELTKVKYVTEGMRKPAFLSGEQKKAIVDLLFKTNRKVTVKQLKEDYFKKIECFDSVEISGVEDRFNASLGTYHDLLKIIKDKDFLDNEENEDILEDIVLTLTLFEDREMIEERLKTYAHLFDDKVMKQLKRRRYTGWGRLSRKLINGIRDKQSGKTILDFLKSDGFANRNFMQLIHDDSLTFKEDIQKAQVSGQGDSLHEHIANLAGSPAIKKGILQTVKVVDELVKVMGRHKPENIVIEMARENQTTQKGQKNSRERMKRIEEGIKELGSQILKEHPVENTQLQNEKLYLYYLQNGRDMYVDQELDINRLSDYDVDHIVPQSFLKDDSIDNKVLTRSDKARGKSDNVPSEEVVKKMKNYWRQLLNAKLITQRKFDNLTKAERGGLSELDKAGFIKRQLVETRQITKHVAQILDSRMNTKYDENDKLIREVKVITLKSKLVSDFRKDFQFYKVREINNYHHAHDAYLNAVVGTALIKKYPKLESEFVYGDYKVYDVRKMIAKSEQEIGKATAKYFFYSNIMNFFKTEITLANGEIRKRPLIETNGETGEIVWDKGRDFATVRKVLSMPQVNIVKKTEVQTGGFSKESILPKRNSDKLIARKKDWDPKKYGGFDSPTVAYSVLVVAKVEKGKSKKLKSVKELLGITIMERSSFEKNPIDFLEAKGYKEVKKDLIIKLPKYSLFELENGRKRMLASAGELQKGNELALPSKYVNFLYLASHYEKLKGSPEDNEQKQLFVEQHKHYLDEIIEQISEFSKRVILADANLDKVLSAYNKHRDKPIREQAENIIHLFTLTNLGAPAAFKYFDTTIDRKRYTSTKEVLDATLIHQSITGLYETRIDLSQLGGDGGEAAAKEAAAKEAAAKEAAAKGGIPWLMKKPLQLTTLVPLQEYEERLLKQTMLTGSYKEKLQSLFLKYDALWQHWENQVGHRRIKPHHIATGTVNPRPQKQYPINPKAKASIQTVINDLLKQGVLIQQNSIMNTPVYPVPKPDGKWRMVLDYREVNKTIPLIAAQNQHSAGILSSIFRGKYKTTLDLSNGFWAHSITPESYWLTAFTWLGQQYCWTRLPQGFLNSPALFNADVVDLLKEVPNVQVYVDDIYISHDDPREHLEQLEKVFSLLLNAGYVVSLKKSEIAQHEVEFLGFNITKEGRGLTETFKQKLLNITPPRDLKQLQSILGKLNFARNFIPNFSELVKPLYNIIATAPGKYITWTTDNSQQLQNIISMLNSAENLEERNPEVRLIMKVNTSPSAGYIRFYNEFAKRPIMYLNYVYTKAEVKFTNTEKLLTTIHKGLIKALDLGMGQEILVYSPIVSMTKIQKTPLPERKALPIRWITWMSYLEDPRIQFHYDKTLPELQQVPTVTDDIIAKIKHPSEFSMVFYTDGSAIKHPNVNKSHNAGMGIAQVQFKPEFTVINTWSIPLGDHTAQLAEVAAVEFACKKALKIDGPVLIVTDSFYVAESVNKELPYWQSNGFFNNKKKPLKHVSKWKSIADCIQLKPDIIIIHEKGHQPTASTFHTEGNNLADKLATQGSYVVNAGKRTADGSEFEKRTADGSEFESPKKKAKVE

SEQ ID NO: 557 - protein, 2086 aa, synthetic construct
MPAAKRVKLDGGDKKYSIGLDIGTNSVGWAVITDEYKVPSKKFKVLGNTDRHSIKKNLIGALLFDSGETAEATRLKRTARRRYTRRKNRICYLQEIFSNEMAKVDDSFFHRLEESFLVEEDKKHERHPIFGNIVDEVAYHEKYPTIYHLRKKLVDSTDKADLRLIYLALAHMIKFRGHFLIEGDLNPDNSDVDKLFIQLVQTYNQLFEENPINASGVDAKAILSARLSKSRRLENLIAQLPGEKKNGLFGNLIALSLGLTPNFKSNFDLAEDAKLQLSKDTYDDDLDNLLAQIGDQYADLFLAAKNLSDAILLSDILRVNTEITKAPLSASMIKRYDEHHQDLTLLKALVRQQLPEKYKEIFFDQSKNGYAGYIDGGASQEEFYKFIKPILEKMDGTEELLVKLNREDLLRKQRTFDNGSIPHQIHLGELHAILRRQEDFYPFLKDNREKIEKILTFRIPYYVGPLARGNSRFAWMTRKSEETITPWNFEEVVDKGASAQSFIERMTNFDKNLPNEKVLPKHSLLYEYFTVYNELTKVKYVTEGMRKPAFLSGEQKKAIVDLLFKTNRKVTVKQLKEDYFKKIECFDSVEISGVEDRFNASLGTYHDLLKIIKDKDFLDNEENEDILEDIVLTLTLFEDREMIEERLKTYAHLFDDKVMKQLKRRRYTGWGRLSRKLINGIRDKQSGKTILDFLKSDGFANRNFMQLIHDDSLTFKEDIQKAQVSGQGDSLHEHIANLAGSPAIKKGILQTVKVVDELVKVMGRHKPENIVIEMARENQTTQKGQKNSRERMKRIEEGIKELGSQILKEHPVENTQLQNEKLYLYYLQNGRDMYVDQELDINRLSDYDVDHIVPQSFLKDDSIDNKVLTRSDKARGKSDNVPSEEVVKKMKNYWRQLLNAKLITQRKFDNLTKAERGGLSELDKAGFIKRQLVETRQITKHVAQILDSRMNTKYDENDKLIREVKVITLKSKLVSDFRKDFQFYKVREINNYHHAHDAYLNAVVGTALIKKYPKLESEFVYGDYKVYDVRKMIAKSEQEIGKATAKYFFYSNIMNFFKTEITLANGEIRKRPLIETNGETGEIVWDKGRDFATVRKVLSMPQVNIVKKTEVQTGGFSKESILPKRNSDKLIARKKDWDPKKYGGFDSPTVAYSVLVVAKVEKGKSKKLKSVKELLGITIMERSSFEKNPIDFLEAKGYKEVKKDLIIKLPKYSLFELENGRKRMLASAGELQKGNELALPSKYVNFLYLASHYEKLKGSPEDNEQKQLFVEQHKHYLDEIIEQISEFSKRVILADANLDKVLSAYNKHRDKPIREQAENIIHLFTLTNLGAPAAFKYFDTTIDRKRYTSTKEVLDATLIHQSITGLYETRIDLSQLGGDGGGGGGSGGGGSGGIPWLMKKPLQLTTLVPLQEYEERLLKQTMLTGSYKEKLQSLFLKYDALWQHWENQVGHRRIKPHHIATGTVNPRPQKQYPINPKAKASIQTVINDLLKQGVLIQQNSIMNTPVYPVPKPDGKWRMVLDYREVNKTIPLIAAQNQHSAGILSSIFRGKYKTTLDLSNGFWAHSITPESYWLTAFTWLGQQYCWTRLPQGFLNSPALFNADVVDLLKEVPNVQVYVDDIYISHDDPREHLEQLEKVFSLLLNAGYVVSLKKSEIAQHEVEFLGFNITKEGRGLTETFKQKLLNITPPRDLKQLQSILGKLNFARNFIPNFSELVKPLYNIIATAPGKYITWTTDNSQQLQNIISMLNSAENLEERNPEVRLIMKVNTSPSAGYIRFYNEFAKRPIMYLNYVYTKAEVKFTNTEKLLTTIHKGLIKALDLGMGQEILVYSPIVSMTKIQKTPLPERKALPIRWITWMSYLEDPRIQFHYDKTLPELQQVPTVTDDIIAKIKHPSEFSMVFYTDGSAIKHPNVNKSHNAGMGIAQVQFKPEFTVINTWSIPLGDHTAQLAEVAAVEFACKKALKIDGPVLIVTDSFYVAESVNKELPYWQSNGFFNNKKKPLKHVSKWKSIADCIQLKPDIIIIHEKGHQPTASTFHTEGNNLADKLATQGSYVVNAGKRTADGSEFEKRTADGSEFESPKKKAKVE

SEQ ID NO: 558 - protein, 2087 aa, synthetic construct
MPAAKRVKLDGGDKKYSIGLDIGTNSVGWAVITDEYKVPSKKFKVLGNTDRHSIKKNLIGALLFDSGETAEATRLKRTARRRYTRRKNRICYLQEIFSNEMAKVDDSFFHRLEESFLVEEDKKHERHPIFGNIVDEVAYHEKYPTIYHLRKKLVDSTDKADLRLIYLALAHMIKFRGHFLIEGDLNPDNSDVDKLFIQLVQTYNQLFEENPINASGVDAKAILSARLSKSRRLENLIAQLPGEKKNGLFGNLIALSLGLTPNFKSNFDLAEDAKLQLSKDTYDDDLDNLLAQIGDQYADLFLAAKNLSDAILLSDILRVNTEITKAPLSASMIKRYDEHHQDLTLLKALVRQQLPEKYKEIFFDQSKNGYAGYIDGGASQEEFYKFIKPILEKMDGTEELLVKLNREDLLRKQRTFDNGSIPHQIHLGELHAILRRQEDFYPFLKDNREKIEKILTFRIPYYVGPLARGNSRFAWMTRKSEETITPWNFEEVVDKGASAQSFIERMTNFDKNLPNEKVLPKHSLLYEYFTVYNELTKVKYVTEGMRKPAFLSGEQKKAIVDLLFKTNRKVTVKQLKEDYFKKIECFDSVEISGVEDRFNASLGTYHDLLKIIKDKDFLDNEENEDILEDIVLTLTLFEDREMIEERLKTYAHLFDDKVMKQLKRRRYTGWGRLSRKLINGIRDKQSGKTILDFLKSDGFANRNFMQLIHDDSLTFKEDIQKAQVSGQGDSLHEHIANLAGSPAIKKGILQTVKVVDELVKVMGRHKPENIVIEMARENQTTQKGQKNSRERMKRIEEGIKELGSQILKEHPVENTQLQNEKLYLYYLQNGRDMYVDQELDINRLSDYDVDHIVPQSFLKDDSIDNKVLTRSDKARGKSDNVPSEEVVKKMKNYWRQLLNAKLITQRKFDNLTKAERGGLSELDKAGFIKRQLVETRQITKHVAQILDSRMNTKYDENDKLIREVKVITLKSKLVSDFRKDFQFYKVREINNYHHAHDAYLNAVVGTALIKKYPKLESEFVYGDYKVYDVRKMIAKSEQEIGKATAKYFFYSNIMNFFKTEITLANGEIRKRPLIETNGETGEIVWDKGRDFATVRKVLSMPQVNIVKKTEVQTGGFSKESILPKRNSDKLIARKKDWDPKKYGGFDSPTVAYSVLVVAKVEKGKSKKLKSVKELLGITIMERSSFEKNPIDFLEAKGYKEVKKDLIIKLPKYSLFELENGRKRMLASAGELQKGNELALPSKYVNFLYLASHYEKLKGSPEDNEQKQLFVEQHKHYLDEIIEQISEFSKRVILADANLDKVLSAYNKHRDKPIREQAENIIHLFTLTNLGAPAAFKYFDTTIDRKRYTSTKEVLDATLIHQSITGLYETRIDLSQLGGDGGEAAAKPAPGSSGGIPWLMKKPLQLTTLVPLQEYEERLLKQTMLTGSYKEKLQSLFLKYDALWQHWENQVGHRRIKPHHIATGTVNPRPQKQYPINPKAKASIQTVINDLLKQGVLIQQNSIMNTPVYPVPKPDGKWRMVLDYREVNKTIPLIAAQNQHSAGILSSIFRGKYKTTLDLSNGFWAHSITPESYWLTAFTWLGQQYCWTRLPQGFLNSPALFNADVVDLLKEVPNVQVYVDDIYISHDDPREHLEQLEKVFSLLLNAGYVVSLKKSEIAQHEVEFLGFNITKEGRGLTETFKQKLLNITPPRDLKQLQSILGKLNFARNFIPNFSELVKPLYNIIATAPGKYITWTTDNSQQLQNIISMLNSAENLEERNPEVRLIMKVNTSPSAGYIRFYNEFAKRPIMYLNYVYTKAEVKFTNTEKLLTTIHKGLIKALDLGMGQEILVYSPIVSMTKIQKTPLPERKALPIRWITWMSYLEDPRIQFHYDKTLPELQQVPTVTDDIIAKIKHPSEFSMVFYTDGSAIKHPNVNKSHNAGMGIAQVQFKPEFTVINTWSIPLGDHTAQLAEVAAVEFACKKALKIDGPVLIVTDSFYVAESVNKELPYWQSNGFFNNKKKPLKHVSKWKSIADCIQLKPDIIIIHEKGHQPTASTFHTEGNNLADKLATQGSYVVNAGKRTADGSEFEKRTADGSEFESPKKKAKVE

SEQ ID NO: 559 - protein, 2087 aa, synthetic construct
MPAAKRVKLDGGDKKYSIGLDIGTNSVGWAVITDEYKVPSKKFKVLGNTDRHSIKKNLIGALLFDSGETAEATRLKRTARRRYTRRKNRICYLQEIFSNEMAKVDDSFFHRLEESFLVEEDKKHERHPIFGNIVDEVAYHEKYPTIYHLRKKLVDSTDKADLRLIYLALAHMIKFRGHFLIEGDLNPDNSDVDKLFIQLVQTYNQLFEENPINASGVDAKAILSARLSKSRRLENLIAQLPGEKKNGLFGNLIALSLGLTPNFKSNFDLAEDAKLQLSKDTYDDDLDNLLAQIGDQYADLFLAAKNLSDAILLSDILRVNTEITKAPLSASMIKRYDEHHQDLTLLKALVRQQLPEKYKEIFFDQSKNGYAGYIDGGASQEEFYKFIKPILEKMDGTEELLVKLNREDLLRKQRTFDNGSIPHQIHLGELHAILRRQEDFYPFLKDNREKIEKILTFRIPYYVGPLARGNSRFAWMTRKSEETITPWNFEEVVDKGASAQSFIERMTNFDKNLPNEKVLPKHSLLYEYFTVYNELTKVKYVTEGMRKPAFLSGEQKKAIVDLLFKTNRKVTVKQLKEDYFKKIECFDSVEISGVEDRFNASLGTYHDLLKIIKDKDFLDNEENEDILEDIVLTLTLFEDREMIEERLKTYAHLFDDKVMKQLKRRRYTGWGRLSRKLINGIRDKQSGKTILDFLKSDGFANRNFMQLIHDDSLTFKEDIQKAQVSGQGDSLHEHIANLAGSPAIKKGILQTVKVVDELVKVMGRHKPENIVIEMARENQTTQKGQKNSRERMKRIEEGIKELGSQILKEHPVENTQLQNEKLYLYYLQNGRDMYVDQELDINRLSDYDVDHIVPQSFLKDDSIDNKVLTRSDKARGKSDNVPSEEVVKKMKNYWRQLLNAKLITQRKFDNLTKAERGGLSELDKAGFIKRQLVETRQITKHVAQILDSRMNTKYDENDKLIREVKVITLKSKLVSDFRKDFQFYKVREINNYHHAHDAYLNAVVGTALIKKYPKLESEFVYGDYKVYDVRKMIAKSEQEIGKATAKYFFYSNIMNFFKTEITLANGEIRKRPLIETNGETGEIVWDKGRDFATVRKVLSMPQVNIVKKTEVQTGGFSKESILPKRNSDKLIARKKDWDPKKYGGFDSPTVAYSVLVVAKVEKGKSKKLKSVKELLGITIMERSSFEKNPIDFLEAKGYKEVKKDLIIKLPKYSLFELENGRKRMLASAGELQKGNELALPSKYVNFLYLASHYEKLKGSPEDNEQKQLFVEQHKHYLDEIIEQISEFSKRVILADANLDKVLSAYNKHRDKPIREQAENIIHLFTLTNLGAPAAFKYFDTTIDRKRYTSTKEVLDATLIHQSITGLYETRIDLSQLGGDGGPAPEAAAKGGGGGIPWLMKKPLQLTTLVPLQEYEERLLKQTMLTGSYKEKLQSLFLKYDALWQHWENQVGHRRIKPHHIATGTVNPRPQKQYPINPKAKASIQTVINDLLKQGVLIQQNSIMNTPVYPVPKPDGKWRMVLDYREVNKTIPLIAAQNQHSAGILSSIFRGKYKTTLDLSNGFWAHSITPESYWLTAFTWLGQQYCWTRLPQGFLNSPALFNADVVDLLKEVPNVQVYVDDIYISHDDPREHLEQLEKVFSLLLNAGYVVSLKKSEIAQHEVEFLGFNITKEGRGLTETFKQKLLNITPPRDLKQLQSILGKLNFARNFIPNFSELVKPLYNIIATAPGKYITWTTDNSQQLQNIISMLNSAENLEERNPEVRLIMKVNTSPSAGYIRFYNEFAKRPIMYLNYVYTKAEVKFTNTEKLLTTIHKGLIKALDLGMGQEILVYSPIVSMTKIQKTPLPERKALPIRWITWMSYLEDPRIQFHYDKTLPELQQVPTVTDDIIAKIKHPSEFSMVFYTDGSAIKHPNVNKSHNAGMGIAQVQFKPEFTVINTWSIPLGDHTAQLAEVAAVEFACKKALKIDGPVLIVTDSFYVAESVNKELPYWQSNGFFNNKKKPLKHVSKWKSIADCIQLKPDIIIIHEKGHQPTASTFHTEGNNLADKLATQGSYVVNAGKRTADGSEFEKRTADGSEFESPKKKAKVE

SEQ ID NO: 560 - protein, 2083 aa, synthetic construct
MPAAKRVKLDGGDKKYSIGLDIGTNSVGWAVITDEYKVPSKKFKVLGNTDRHSIKKNLIGALLFDSGETAEATRLKRTARRRYTRRKNRICYLQEIFSNEMAKVDDSFFHRLEESFLVEEDKKHERHPIFGNIVDEVAYHEKYPTIYHLRKKLVDSTDKADLRLIYLALAHMIKFRGHFLIEGDLNPDNSDVDKLFIQLVQTYNQLFEENPINASGVDAKAILSARLSKSRRLENLIAQLPGEKKNGLFGNLIALSLGLTPNFKSNFDLAEDAKLQLSKDTYDDDLDNLLAQIGDQYADLFLAAKNLSDAILLSDILRVNTEITKAPLSASMIKRYDEHHQDLTLLKALVRQQLPEKYKEIFFDQSKNGYAGYIDGGASQEEFYKFIKPILEKMDGTEELLVKLNREDLLRKQRTFDNGSIPHQIHLGELHAILRRQEDFYPFLKDNREKIEKILTFRIPYYVGPLARGNSRFAWMTRKSEETITPWNFEEVVDKGASAQSFIERMTNFDKNLPNEKVLPKHSLLYEYFTVYNELTKVKYVTEGMRKPAFLSGEQKKAIVDLLFKTNRKVTVKQLKEDYFKKIECFDSVEISGVEDRFNASLGTYHDLLKIIKDKDFLDNEENEDILEDIVLTLTLFEDREMIEERLKTYAHLFDDKVMKQLKRRRYTGWGRLSRKLINGIRDKQSGKTILDFLKSDGFANRNFMQLIHDDSLTFKEDIQKAQVSGQGDSLHEHIANLAGSPAIKKGILQTVKVVDELVKVMGRHKPENIVIEMARENQTTQKGQKNSRERMKRIEEGIKELGSQILKEHPVENTQLQNEKLYLYYLQNGRDMYVDQELDINRLSDYDVDHIVPQSFLKDDSIDNKVLTRSDKARGKSDNVPSEEVVKKMKNYWRQLLNAKLITQRKFDNLTKAERGGLSELDKAGFIKRQLVETRQITKHVAQILDSRMNTKYDENDKLIREVKVITLKSKLVSDFRKDFQFYKVREINNYHHAHDAYLNAVVGTALIKKYPKLESEFVYGDYKVYDVRKMIAKSEQEIGKATAKYFFYSNIMNFFKTEITLANGEIRKRPLIETNGETGEIVWDKGRDFATVRKVLSMPQVNIVKKTEVQTGGFSKESILPKRNSDKLIARKKDWDPKKYGGFDSPTVAYSVLVVAKVEKGKSKKLKSVKELLGITIMERSSFEKNPIDFLEAKGYKEVKKDLIIKLPKYSLFELENGRKRMLASAGELQKGNELALPSKYVNFLYLASHYEKLKGSPEDNEQKQLFVEQHKHYLDEIIEQISEFSKRVILADANLDKVLSAYNKHRDKPIREQAENIIHLFTLTNLGAPAAFKYFDTTIDRKRYTSTKEVLDATLIHQSITGLYETRIDLSQLGGDGGPAPAPAPGGIPWLMKKPLQLTTLVPLQEYEERLLKQTMLTGSYKEKLQSLFLKYDALWQHWENQVGHRRIKPHHIATGTVNPRPQKQYPINPKAKASIQTVINDLLKQGVLIQQNSIMNTPVYPVPKPDGKWRMVLDYREVNKTIPLIAAQNQHSAGILSSIFRGKYKTTLDLSNGFWAHSITPESYWLTAFTWLGQQYCWTRLPQGFLNSPALFNADVVDLLKEVPNVQVYVDDIYISHDDPREHLEQLEKVFSLLLNAGYVVSLKKSEIAQHEVEFLGFNITKEGRGLTETFKQKLLNITPPRDLKQLQSILGKLNFARNFIPNFSELVKPLYNIIATAPGKYITWTTDNSQQLQNIISMLNSAENLEERNPEVRLIMKVNTSPSAGYIRFYNEFAKRPIMYLNYVYTKAEVKFTNTEKLLTTIHKGLIKALDLGMGQEILVYSPIVSMTKIQKTPLPERKALPIRWITWMSYLEDPRIQFHYDKTLPELQQVPTVTDDIIAKIKHPSEFSMVFYTDGSAIKHPNVNKSHNAGMGIAQVQFKPEFTVINTWSIPLGDHTAQLAEVAAVEFACKKALKIDGPVLIVTDSFYVAESVNKELPYWQSNGFFNNKKKPLKHVSKWKSIADCIQLKPDIIIIHEKGHQPTASTFHTEGNNLADKLATQGSYVVNAGKRTADGSEFEKRTADGSEFESPKKKAKVE

SEQ ID NO: 561 - protein, 2087 aa, synthetic construct
MPAAKRVKLDGGDKKYSIGLDIGTNSVGWAVITDEYKVPSKKFKVLGNTDRHSIKKNLIGALLFDSGETAEATRLKRTARRRYTRRKNRICYLQEIFSNEMAKVDDSFFHRLEESFLVEEDKKHERHPIFGNIVDEVAYHEKYPTIYHLRKKLVDSTDKADLRLIYLALAHMIKFRGHFLIEGDLNPDNSDVDKLFIQLVQTYNQLFEENPINASGVDAKAILSARLSKSRRLENLIAQLPGEKKNGLFGNLIALSLGLTPNFKSNFDLAEDAKLQLSKDTYDDDLDNLLAQIGDQYADLFLAAKNLSDAILLSDILRVNTEITKAPLSASMIKRYDEHHQDLTLLKALVRQQLPEKYKEIFFDQSKNGYAGYIDGGASQEEFYKFIKPILEKMDGTEELLVKLNREDLLRKQRTFDNGSIPHQIHLGELHAILRRQEDFYPFLKDNREKIEKILTFRIPYYVGPLARGNSRFAWMTRKSEETITPWNFEEVVDKGASAQSFIERMTNFDKNLPNEKVLPKHSLLYEYFTVYNELTKVKYVTEGMRKPAFLSGEQKKAIVDLLFKTNRKVTVKQLKEDYFKKIECFDSVEISGVEDRFNASLGTYHDLLKIIKDKDFLDNEENEDILEDIVLTLTLFEDREMIEERLKTYAHLFDDKVMKQLKRRRYTGWGRLSRKLINGIRDKQSGKTILDFLKSDGFANRNFMQLIHDDSLTFKEDIQKAQVSGQGDSLHEHIANLAGSPAIKKGILQTVKVVDELVKVMGRHKPENIVIEMARENQTTQKGQKNSRERMKRIEEGIKELGSQILKEHPVENTQLQNEKLYLYYLQNGRDMYVDQELDINRLSDYDVDHIVPQSFLKDDSIDNKVLTRSDKARGKSDNVPSEEVVKKMKNYWRQLLNAKLITQRKFDNLTKAERGGLSELDKAGFIKRQLVETRQITKHVAQILDSRMNTKYDENDKLIREVKVITLKSKLVSDFRKDFQFYKVREINNYHHAHDAYLNAVVGTALIKKYPKLESEFVYGDYKVYDVRKMIAKSEQEIGKATAKYFFYSNIMNFFKTEITLANGEIRKRPLIETNGETGEIVWDKGRDFATVRKVLSMPQVNIVKKTEVQTGGFSKESILPKRNSDKLIARKKDWDPKKYGGFDSPTVAYSVLVVAKVEKGKSKKLKSVKELLGITIMERSSFEKNPIDFLEAKGYKEVKKDLIIKLPKYSLFELENGRKRMLASAGELQKGNELALPSKYVNFLYLASHYEKLKGSPEDNEQKQLFVEQHKHYLDEIIEQISEFSKRVILADANLDKVLSAYNKHRDKPIREQAENIIHLFTLTNLGAPAAFKYFDTTIDRKRYTSTKEVLDATLIHQSITGLYETRIDLSQLGGDGGGGSEAAAKGSSGGIPWLMKKPLQLTTLVPLQEYEERLLKQTMLTGSYKEKLQSLFLKYDALWQHWENQVGHRRIKPHHIATGTVNPRPQKQYPINPKAKASIQTVINDLLKQGVLIQQNSIMNTPVYPVPKPDGKWRMVLDYREVNKTIPLIAAQNQHSAGILSSIFRGKYKTTLDLSNGFWAHSITPESYWLTAFTWLGQQYCWTRLPQGFLNSPALFNADVVDLLKEVPNVQVYVDDIYISHDDPREHLEQLEKVFSLLLNAGYVVSLKKSEIAQHEVEFLGFNITKEGRGLTETFKQKLLNITPPRDLKQLQSILGKLNFARNFIPNFSELVKPLYNIIATAPGKYITWTTDNSQQLQNIISMLNSAENLEERNPEVRLIMKVNTSPSAGYIRFYNEFAKRPIMYLNYVYTKAEVKFTNTEKLLTTIHKGLIKALDLGMGQEILVYSPIVSMTKIQKTPLPERKALPIRWITWMSYLEDPRIQFHYDKTLPELQQVPTVTDDIIAKIKHPSEFSMVFYTDGSAIKHPNVNKSHNAGMGIAQVQFKPEFTVINTWSIPLGDHTAQLAEVAAVEFACKKALKIDGPVLIVTDSFYVAESVNKELPYWQSNGFFNNKKKPLKHVSKWKSIADCIQLKPDIIIIHEKGHQPTASTFHTEGNNLADKLATQGSYVVNAGKRTADGSEFEKRTADGSEFESPKKKAKVE

SEQ ID NO: 562 - protein, 2085 aa, synthetic construct
MPAAKRVKLDGGDKKYSIGLDIGTNSVGWAVITDEYKVPSKKFKVLGNTDRHSIKKNLIGALLFDSGETAEATRLKRTARRRYTRRKNRICYLQEIFSNEMAKVDDSFFHRLEESFLVEEDKKHERHPIFGNIVDEVAYHEKYPTIYHLRKKLVDSTDKADLRLIYLALAHMIKFRGHFLIEGDLNPDNSDVDKLFIQLVQTYNQLFEENPINASGVDAKAILSARLSKSRRLENLIAQLPGEKKNGLFGNLIALSLGLTPNFKSNFDLAEDAKLQLSKDTYDDDLDNLLAQIGDQYADLFLAAKNLSDAILLSDILRVNTEITKAPLSASMIKRYDEHHQDLTLLKALVRQQLPEKYKEIFFDQSKNGYAGYIDGGASQEEFYKFIKPILEKMDGTEELLVKLNREDLLRKQRTFDNGSIPHQIHLGELHAILRRQEDFYPFLKDNREKIEKILTFRIPYYVGPLARGNSRFAWMTRKSEETITPWNFEEVVDKGASAQSFIERMTNFDKNLPNEKVLPKHSLLYEYFTVYNELTKVKYVTEGMRKPAFLSGEQKKAIVDLLFKTNRKVTVKQLKEDYFKKIECFDSVEISGVEDRFNASLGTYHDLLKIIKDKDFLDNEENEDILEDIVLTLTLFEDREMIEERLKTYAHLFDDKVMKQLKRRRYTGWGRLSRKLINGIRDKQSGKTILDFLKSDGFANRNFMQLIHDDSLTFKEDIQKAQVSGQGDSLHEHIANLAGSPAIKKGILQTVKVVDELVKVMGRHKPENIVIEMARENQTTQKGQKNSRERMKRIEEGIKELGSQILKEHPVENTQLQNEKLYLYYLQNGRDMYVDQELDINRLSDYDVDHIVPQSFLKDDSIDNKVLTRSDKARGKSDNVPSEEVVKKMKNYWRQLLNAKLITQRKFDNLTKAERGGLSELDKAGFIKRQLVETRQITKHVAQILDSRMNTKYDENDKLIREVKVITLKSKLVSDFRKDFQFYKVREINNYHHAHDAYLNAVVGTALIKKYPKLESEFVYGDYKVYDVRKMIAKSEQEIGKATAKYFFYSNIMNFFKTEITLANGEIRKRPLIETNGETGEIVWDKGRDFATVRKVLSMPQVNIVKKTEVQTGGFSKESILPKRNSDKLIARKKDWDPKKYGGFDSPTVAYSVLVVAKVEKGKSKKLKSVKELLGITIMERSSFEKNPIDFLEAKGYKEVKKDLIIKLPKYSLFELENGRKRMLASAGELQKGNELALPSKYVNFLYLASHYEKLKGSPEDNEQKQLFVEQHKHYLDEIIEQISEFSKRVILADANLDKVLSAYNKHRDKPIREQAENIIHLFTLTNLGAPAAFKYFDTTIDRKRYTSTKEVLDATLIHQSITGLYETRIDLSQLGGDGGGSSPAPGGGGGIPWLMKKPLQLTTLVPLQEYEERLLKQTMLTGSYKEKLQSLFLKYDALWQHWENQVGHRRIKPHHIATGTVNPRPQKQYPINPKAKASIQTVINDLLKQGVLIQQNSIMNTPVYPVPKPDGKWRMVLDYREVNKTIPLIAAQNQHSAGILSSIFRGKYKTTLDLSNGFWAHSITPESYWLTAFTWLGQQYCWTRLPQGFLNSPALFNADVVDLLKEVPNVQVYVDDIYISHDDPREHLEQLEKVFSLLLNAGYVVSLKKSEIAQHEVEFLGFNITKEGRGLTETFKQKLLNITPPRDLKQLQSILGKLNFARNFIPNFSELVKPLYNIIATAPGKYITWTTDNSQQLQNIISMLNSAENLEERNPEVRLIMKVNTSPSAGYIRFYNEFAKRPIMYLNYVYTKAEVKFTNTEKLLTTIHKGLIKALDLGMGQEILVYSPIVSMTKIQKTPLPERKALPIRWITWMSYLEDPRIQFHYDKTLPELQQVPTVTDDIIAKIKHPSEFSMVFYTDGSAIKHPNVNKSHNAGMGIAQVQFKPEFTVINTWSIPLGDHTAQLAEVAAVEFACKKALKIDGPVLIVTDSFYVAESVNKELPYWQSNGFFNNKKKPLKHVSKWKSIADCIQLKPDIIIIHEKGHQPTASTFHTEGNNLADKLATQGSYVVNAGKRTADGSEFEKRTADGSEFESPKKKAKVE

SEQ ID NO: 563 - protein, 2087 aa, synthetic construct
MPAAKRVKLDGGDKKYSIGLDIGTNSVGWAVITDEYKVPSKKFKVLGNTDRHSIKKNLIGALLFDSGETAEATRLKRTARRRYTRRKNRICYLQEIFSNEMAKVDDSFFHRLEESFLVEEDKKHERHPIFGNIVDEVAYHEKYPTIYHLRKKLVDSTDKADLRLIYLALAHMIKFRGHFLIEGDLNPDNSDVDKLFIQLVQTYNQLFEENPINASGVDAKAILSARLSKSRRLENLIAQLPGEKKNGLFGNLIALSLGLTPNFKSNFDLAEDAKLQLSKDTYDDDLDNLLAQIGDQYADLFLAAKNLSDAILLSDILRVNTEITKAPLSASMIKRYDEHHQDLTLLKALVRQQLPEKYKEIFFDQSKNGYAGYIDGGASQEEFYKFIKPILEKMDGTEELLVKLNREDLLRKQRTFDNGSIPHQIHLGELHAILRRQEDFYPFLKDNREKIEKILTFRIPYYVGPLARGNSRFAWMTRKSEETITPWNFEEVVDKGASAQSFIERMTNFDKNLPNEKVLPKHSLLYEYFTVYNELTKVKYVTEGMRKPAFLSGEQKKAIVDLLFKTNRKVTVKQLKEDYFKKIECFDSVEISGVEDRFNASLGTYHDLLKIIKDKDFLDNEENEDILEDIVLTLTLFEDREMIEERLKTYAHLFDDKVMKQLKRRRYTGWGRLSRKLINGIRDKQSGKTILDFLKSDGFANRNFMQLIHDDSLTFKEDIQKAQVSGQGDSLHEHIANLAGSPAIKKGILQTVKVVDELVKVMGRHKPENIVIEMARENQTTQKGQKNSRERMKRIEEGIKELGSQILKEHPVENTQLQNEKLYLYYLQNGRDMYVDQELDINRLSDYDVDHIVPQSFLKDDSIDNKVLTRSDKARGKSDNVPSEEVVKKMKNYWRQLLNAKLITQRKFDNLTKAERGGLSELDKAGFIKRQLVETRQITKHVAQILDSRMNTKYDENDKLIREVKVITLKSKLVSDFRKDFQFYKVREINNYHHAHDAYLNAVVGTALIKKYPKLESEFVYGDYKVYDVRKMIAKSEQEIGKATAKYFFYSNIMNFFKTEITLANGEIRKRPLIETNGETGEIVWDKGRDFATVRKVLSMPQVNIVKKTEVQTGGFSKESILPKRNSDKLIARKKDWDPKKYGGFDSPTVAYSVLVVAKVEKGKSKKLKSVKELLGITIMERSSFEKNPIDFLEAKGYKEVKKDLIIKLPKYSLFELENGRKRMLASAGELQKGNELALPSKYVNFLYLASHYEKLKGSPEDNEQKQLFVEQHKHYLDEIIEQISEFSKRVILADANLDKVLSAYNKHRDKPIREQAENIIHLFTLTNLGAPAAFKYFDTTIDRKRYTSTKEVLDATLIHQSITGLYETRIDLSQLGGDGGGGSEAAAKGGGGGIPWLMKKPLQLTTLVPLQEYEERLLKQTMLTGSYKEKLQSLFLKYDALWQHWENQVGHRRIKPHHIATGTVNPRPQKQYPINPKAKASIQTVINDLLKQGVLIQQNSIMNTPVYPVPKPDGKWRMVLDYREVNKTIPLIAAQNQHSAGILSSIFRGKYKTTLDLSNGFWAHSITPESYWLTAFTWLGQQYCWTRLPQGFLNSPALFNADVVDLLKEVPNVQVYVDDIYISHDDPREHLEQLEKVFSLLLNAGYVVSLKKSEIAQHEVEFLGFNITKEGRGLTETFKQKLLNITPPRDLKQLQSILGKLNFARNFIPNFSELVKPLYNIIATAPGKYITWTTDNSQQLQNIISMLNSAENLEERNPEVRLIMKVNTSPSAGYIRFYNEFAKRPIMYLNYVYTKAEVKFTNTEKLLTTIHKGLIKALDLGMGQEILVYSPIVSMTKIQKTPLPERKALPIRWITWMSYLEDPRIQFHYDKTLPELQQVPTVTDDIIAKIKHPSEFSMVFYTDGSAIKHPNVNKSHNAGMGIAQVQFKPEFTVINTWSIPLGDHTAQLAEVAAVEFACKKALKIDGPVLIVTDSFYVAESVNKELPYWQSNGFFNNKKKPLKHVSKWKSIADCIQLKPDIIIIHEKGHQPTASTFHTEGNNLADKLATQGSYVVNAGKRTADGSEFEKRTADGSEFESPKKKAKVE

SEQ ID NO: 564 - protein, 2082 aa, synthetic construct
MPAAKRVKLDGGDKKYSIGLDIGTNSVGWAVITDEYKVPSKKFKVLGNTDRHSIKKNLIGALLFDSGETAEATRLKRTARRRYTRRKNRICYLQEIFSNEMAKVDDSFFHRLEESFLVEEDKKHERHPIFGNIVDEVAYHEKYPTIYHLRKKLVDSTDKADLRLIYLALAHMIKFRGHFLIEGDLNPDNSDVDKLFIQLVQTYNQLFEENPINASGVDAKAILSARLSKSRRLENLIAQLPGEKKNGLFGNLIALSLGLTPNFKSNFDLAEDAKLQLSKDTYDDDLDNLLAQIGDQYADLFLAAKNLSDAILLSDILRVNTEITKAPLSASMIKRYDEHHQDLTLLKALVRQQLPEKYKEIFFDQSKNGYAGYIDGGASQEEFYKFIKPILEKMDGTEELLVKLNREDLLRKQRTFDNGSIPHQIHLGELHAILRRQEDFYPFLKDNREKIEKILTFRIPYYVGPLARGNSRFAWMTRKSEETITPWNFEEVVDKGASAQSFIERMTNFDKNLPNEKVLPKHSLLYEYFTVYNELTKVKYVTEGMRKPAFLSGEQKKAIVDLLFKTNRKVTVKQLKEDYFKKIECFDSVEISGVEDRFNASLGTYHDLLKIIKDKDFLDNEENEDILEDIVLTLTLFEDREMIEERLKTYAHLFDDKVMKQLKRRRYTGWGRLSRKLINGIRDKQSGKTILDFLKSDGFANRNFMQLIHDDSLTFKEDIQKAQVSGQGDSLHEHIANLAGSPAIKKGILQTVKVVDELVKVMGRHKPENIVIEMARENQTTQKGQKNSRERMKRIEEGIKELGSQILKEHPVENTQLQNEKLYLYYLQNGRDMYVDQELDINRLSDYDVDHIVPQSFLKDDSIDNKVLTRSDKARGKSDNVPSEEVVKKMKNYWRQLLNAKLITQRKFDNLTKAERGGLSELDKAGFIKRQLVETRQITKHVAQILDSRMNTKYDENDKLIREVKVITLKSKLVSDFRKDFQFYKVREINNYHHAHDAYLNAVVGTALIKKYPKLESEFVYGDYKVYDVRKMIAKSEQEIGKATAKYFFYSNIMNFFKTEITLANGEIRKRPLIETNGETGEIVWDKGRDFATVRKVLSMPQVNIVKKTEVQTGGFSKESILPKRNSDKLIARKKDWDPKKYGGFDSPTVAYSVLVVAKVEKGKSKKLKSVKELLGITIMERSSFEKNPIDFLEAKGYKEVKKDLIIKLPKYSLFELENGRKRMLASAGELQKGNELALPSKYVNFLYLASHYEKLKGSPEDNEQKQLFVEQHKHYLDEIIEQISEFSKRVILADANLDKVLSAYNKHRDKPIREQAENIIHLFTLTNLGAPAAFKYFDTTIDRKRYTSTKEVLDATLIHQSITGLYETRIDLSQLGGDGGGGGGSSGGIPWLMKKPLQLTTLVPLQEYEERLLKQTMLTGSYKEKLQSLFLKYDALWQHWENQVGHRRIKPHHIATGTVNPRPQKQYPINPKAKASIQTVINDLLKQGVLIQQNSIMNTPVYPVPKPDGKWRMVLDYREVNKTIPLIAAQNQHSAGILSSIFRGKYKTTLDLSNGFWAHSITPESYWLTAFTWLGQQYCWTRLPQGFLNSPALFNADVVDLLKEVPNVQVYVDDIYISHDDPREHLEQLEKVFSLLLNAGYVVSLKKSEIAQHEVEFLGFNITKEGRGLTETFKQKLLNITPPRDLKQLQSILGKLNFARNFIPNFSELVKPLYNIIATAPGKYITWTTDNSQQLQNIISMLNSAENLEERNPEVRLIMKVNTSPSAGYIRFYNEFAKRPIMYLNYVYTKAEVKFTNTEKLLTTIHKGLIKALDLGMGQEILVYSPIVSMTKIQKTPLPERKALPIRWITWMSYLEDPRIQFHYDKTLPELQQVPTVTDDIIAKIKHPSEFSMVFYTDGSAIKHPNVNKSHNAGMGIAQVQFKPEFTVINTWSIPLGDHTAQLAEVAAVEFACKKALKIDGPVLIVTDSFYVAESVNKELPYWQSNGFFNNKKKPLKHVSKWKSIADCIQLKPDIIIIHEKGHQPTASTFHTEGNNLADKLATQGSYVVNAGKRTADGSEFEKRTADGSEFESPKKKAKVE

SEQ ID NO: 565 - protein, 2085 aa, synthetic construct
MPAAKRVKLDGGDKKYSIGLDIGTNSVGWAVITDEYKVPSKKFKVLGNTDRHSIKKNLIGALLFDSGETAEATRLKRTARRRYTRRKNRICYLQEIFSNEMAKVDDSFFHRLEESFLVEEDKKHERHPIFGNIVDEVAYHEKYPTIYHLRKKLVDSTDKADLRLIYLALAHMIKFRGHFLIEGDLNPDNSDVDKLFIQLVQTYNQLFEENPINASGVDAKAILSARLSKSRRLENLIAQLPGEKKNGLFGNLIALSLGLTPNFKSNFDLAEDAKLQLSKDTYDDDLDNLLAQIGDQYADLFLAAKNLSDAILLSDILRVNTEITKAPLSASMIKRYDEHHQDLTLLKALVRQQLPEKYKEIFFDQSKNGYAGYIDGGASQEEFYKFIKPILEKMDGTEELLVKLNREDLLRKQRTFDNGSIPHQIHLGELHAILRRQEDFYPFLKDNREKIEKILTFRIPYYVGPLARGNSRFAWMTRKSEETITPWNFEEVVDKGASAQSFIERMTNFDKNLPNEKVLPKHSLLYEYFTVYNELTKVKYVTEGMRKPAFLSGEQKKAIVDLLFKTNRKVTVKQLKEDYFKKIECFDSVEISGVEDRFNASLGTYHDLLKIIKDKDFLDNEENEDILEDIVLTLTLFEDREMIEERLKTYAHLFDDKVMKQLKRRRYTGWGRLSRKLINGIRDKQSGKTILDFLKSDGFANRNFMQLIHDDSLTFKEDIQKAQVSGQGDSLHEHIANLAGSPAIKKGILQTVKVVDELVKVMGRHKPENIVIEMARENQTTQKGQKNSRERMKRIEEGIKELGSQILKEHPVENTQLQNEKLYLYYLQNGRDMYVDQELDINRLSDYDVDHIVPQSFLKDDSIDNKVLTRSDKARGKSDNVPSEEVVKKMKNYWRQLLNAKLITQRKFDNLTKAERGGLSELDKAGFIKRQLVETRQITKHVAQILDSRMNTKYDENDKLIREVKVITLKSKLVSDFRKDFQFYKVREINNYHHAHDAYLNAVVGTALIKKYPKLESEFVYGDYKVYDVRKMIAKSEQEIGKATAKYFFYSNIMNFFKTEITLANGEIRKRPLIETNGETGEIVWDKGRDFATVRKVLSMPQVNIVKKTEVQTGGFSKESILPKRNSDKLIARKKDWDPKKYGGFDSPTVAYSVLVVAKVEKGKSKKLKSVKELLGITIMERSSFEKNPIDFLEAKGYKEVKKDLIIKLPKYSLFELENGRKRMLASAGELQKGNELALPSKYVNFLYLASHYEKLKGSPEDNEQKQLFVEQHKHYLDEIIEQISEFSKRVILADANLDKVLSAYNKHRDKPIREQAENIIHLFTLTNLGAPAAFKYFDTTIDRKRYTSTKEVLDATLIHQSITGLYETRIDLSQLGGDGGGGSGSSGGGGGIPWLMKKPLQLTTLVPLQEYEERLLKQTMLTGSYKEKLQSLFLKYDALWQHWENQVGHRRIKPHHIATGTVNPRPQKQYPINPKAKASIQTVINDLLKQGVLIQQNSIMNTPVYPVPKPDGKWRMVLDYREVNKTIPLIAAQNQHSAGILSSIFRGKYKTTLDLSNGFWAHSITPESYWLTAFTWLGQQYCWTRLPQGFLNSPALFNADVVDLLKEVPNVQVYVDDIYISHDDPREHLEQLEKVFSLLLNAGYVVSLKKSEIAQHEVEFLGFNITKEGRGLTETFKQKLLNITPPRDLKQLQSILGKLNFARNFIPNFSELVKPLYNIIATAPGKYITWTTDNSQQLQNIISMLNSAENLEERNPEVRLIMKVNTSPSAGYIRFYNEFAKRPIMYLNYVYTKAEVKFTNTEKLLTTIHKGLIKALDLGMGQEILVYSPIVSMTKIQKTPLPERKALPIRWITWMSYLEDPRIQFHYDKTLPELQQVPTVTDDIIAKIKHPSEFSMVFYTDGSAIKHPNVNKSHNAGMGIAQVQFKPEFTVINTWSIPLGDHTAQLAEVAAVEFACKKALKIDGPVLIVTDSFYVAESVNKELPYWQSNGFFNNKKKPLKHVSKWKSIADCIQLKPDIIIIHEKGHQPTASTFHTEGNNLADKLATQGSYVVNAGKRTADGSEFEKRTADGSEFESPKKKAKVE

SEQ ID NO: 566 - protein, 2091 aa, synthetic construct
MPAAKRVKLDGGDKKYSIGLDIGTNSVGWAVITDEYKVPSKKFKVLGNTDRHSIKKNLIGALLFDSGETAEATRLKRTARRRYTRRKNRICYLQEIFSNEMAKVDDSFFHRLEESFLVEEDKKHERHPIFGNIVDEVAYHEKYPTIYHLRKKLVDSTDKADLRLIYLALAHMIKFRGHFLIEGDLNPDNSDVDKLFIQLVQTYNQLFEENPINASGVDAKAILSARLSKSRRLENLIAQLPGEKKNGLFGNLIALSLGLTPNFKSNFDLAEDAKLQLSKDTYDDDLDNLLAQIGDQYADLFLAAKNLSDAILLSDILRVNTEITKAPLSASMIKRYDEHHQDLTLLKALVRQQLPEKYKEIFFDQSKNGYAGYIDGGASQEEFYKFIKPILEKMDGTEELLVKLNREDLLRKQRTFDNGSIPHQIHLGELHAILRRQEDFYPFLKDNREKIEKILTFRIPYYVGPLARGNSRFAWMTRKSEETITPWNFEEVVDKGASAQSFIERMTNFDKNLPNEKVLPKHSLLYEYFTVYNELTKVKYVTEGMRKPAFLSGEQKKAIVDLLFKTNRKVTVKQLKEDYFKKIECFDSVEISGVEDRFNASLGTYHDLLKIIKDKDFLDNEENEDILEDIVLTLTLFEDREMIEERLKTYAHLFDDKVMKQLKRRRYTGWGRLSRKLINGIRDKQSGKTILDFLKSDGFANRNFMQLIHDDSLTFKEDIQKAQVSGQGDSLHEHIANLAGSPAIKKGILQTVKVVDELVKVMGRHKPENIVIEMARENQTTQKGQKNSRERMKRIEEGIKELGSQILKEHPVENTQLQNEKLYLYYLQNGRDMYVDQELDINRLSDYDVDHIVPQSFLKDDSIDNKVLTRSDKARGKSDNVPSEEVVKKMKNYWRQLLNAKLITQRKFDNLTKAERGGLSELDKAGFIKRQLVETRQITKHVAQILDSRMNTKYDENDKLIREVKVITLKSKLVSDFRKDFQFYKVREINNYHHAHDAYLNAVVGTALIKKYPKLESEFVYGDYKVYDVRKMIAKSEQEIGKATAKYFFYSNIMNFFKTEITLANGEIRKRPLIETNGETGEIVWDKGRDFATVRKVLSMPQVNIVKKTEVQTGGFSKESILPKRNSDKLIARKKDWDPKKYGGFDSPTVAYSVLVVAKVEKGKSKKLKSVKELLGITIMERSSFEKNPIDFLEAKGYKEVKKDLIIKLPKYSLFELENGRKRMLASAGELQKGNELALPSKYVNFLYLASHYEKLKGSPEDNEQKQLFVEQHKHYLDEIIEQISEFSKRVILADANLDKVLSAYNKHRDKPIREQAENIIHLFTLTNLGAPAAFKYFDTTIDRKRYTSTKEVLDATLIHQSITGLYETRIDLSQLGGDGGGGSGGSGGSGGSGGSGGIPWLMKKPLQLTTLVPLQEYEERLLKQTMLTGSYKEKLQSLFLKYDALWQHWENQVGHRRIKPHHIATGTVNPRPQKQYPINPKAKASIQTVINDLLKQGVLIQQNSIMNTPVYPVPKPDGKWRMVLDYREVNKTIPLIAAQNQHSAGILSSIFRGKYKTTLDLSNGFWAHSITPESYWLTAFTWLGQQYCWTRLPQGFLNSPALFNADVVDLLKEVPNVQVYVDDIYISHDDPREHLEQLEKVFSLLLNAGYVVSLKKSEIAQHEVEFLGFNITKEGRGLTETFKQKLLNITPPRDLKQLQSILGKLNFARNFIPNFSELVKPLYNIIATAPGKYITWTTDNSQQLQNIISMLNSAENLEERNPEVRLIMKVNTSPSAGYIRFYNEFAKRPIMYLNYVYTKAEVKFTNTEKLLTTIHKGLIKALDLGMGQEILVYSPIVSMTKIQKTPLPERKALPIRWITWMSYLEDPRIQFHYDKTLPELQQVPTVTDDIIAKIKHPSEFSMVFYTDGSAIKHPNVNKSHNAGMGIAQVQFKPEFTVINTWSIPLGDHTAQLAEVAAVEFACKKALKIDGPVLIVTDSFYVAESVNKELPYWQSNGFFNNKKKPLKHVSKWKSIADCIQLKPDIIIIHEKGHQPTASTFHTEGNNLADKLATQGSYVVNAGKRTADGSEFEKRTADGSEFESPKKKAKVE

SEQ ID NO: 567 - protein, 2087 aa, synthetic construct
MPAAKRVKLDGGDKKYSIGLDIGTNSVGWAVITDEYKVPSKKFKVLGNTDRHSIKKNLIGALLFDSGETAEATRLKRTARRRYTRRKNRICYLQEIFSNEMAKVDDSFFHRLEESFLVEEDKKHERHPIFGNIVDEVAYHEKYPTIYHLRKKLVDSTDKADLRLIYLALAHMIKFRGHFLIEGDLNPDNSDVDKLFIQLVQTYNQLFEENPINASGVDAKAILSARLSKSRRLENLIAQLPGEKKNGLFGNLIALSLGLTPNFKSNFDLAEDAKLQLSKDTYDDDLDNLLAQIGDQYADLFLAAKNLSDAILLSDILRVNTEITKAPLSASMIKRYDEHHQDLTLLKALVRQQLPEKYKEIFFDQSKNGYAGYIDGGASQEEFYKFIKPILEKMDGTEELLVKLNREDLLRKQRTFDNGSIPHQIHLGELHAILRRQEDFYPFLKDNREKIEKILTFRIPYYVGPLARGNSRFAWMTRKSEETITPWNFEEVVDKGASAQSFIERMTNFDKNLPNEKVLPKHSLLYEYFTVYNELTKVKYVTEGMRKPAFLSGEQKKAIVDLLFKTNRKVTVKQLKEDYFKKIECFDSVEISGVEDRFNASLGTYHDLLKIIKDKDFLDNEENEDILEDIVLTLTLFEDREMIEERLKTYAHLFDDKVMKQLKRRRYTGWGRLSRKLINGIRDKQSGKTILDFLKSDGFANRNFMQLIHDDSLTFKEDIQKAQVSGQGDSLHEHIANLAGSPAIKKGILQTVKVVDELVKVMGRHKPENIVIEMARENQTTQKGQKNSRERMKRIEEGIKELGSQILKEHPVENTQLQNEKLYLYYLQNGRDMYVDQELDINRLSDYDVDHIVPQSFLKDDSIDNKVLTRSDKARGKSDNVPSEEVVKKMKNYWRQLLNAKLITQRKFDNLTKAERGGLSELDKAGFIKRQLVETRQITKHVAQILDSRMNTKYDENDKLIREVKVITLKSKLVSDFRKDFQFYKVREINNYHHAHDAYLNAVVGTALIKKYPKLESEFVYGDYKVYDVRKMIAKSEQEIGKATAKYFFYSNIMNFFKTEITLANGEIRKRPLIETNGETGEIVWDKGRDFATVRKVLSMPQVNIVKKTEVQTGGFSKESILPKRNSDKLIARKKDWDPKKYGGFDSPTVAYSVLVVAKVEKGKSKKLKSVKELLGITIMERSSFEKNPIDFLEAKGYKEVKKDLIIKLPKYSLFELENGRKRMLASAGELQKGNELALPSKYVNFLYLASHYEKLKGSPEDNEQKQLFVEQHKHYLDEIIEQISEFSKRVILADANLDKVLSAYNKHRDKPIREQAENIIHLFTLTNLGAPAAFKYFDTTIDRKRYTSTKEVLDATLIHQSITGLYETRIDLSQLGGDGGGSSEAAAKGGGGGIPWLMKKPLQLTTLVPLQEYEERLLKQTMLTGSYKEKLQSLFLKYDALWQHWENQVGHRRIKPHHIATGTVNPRPQKQYPINPKAKASIQTVINDLLKQGVLIQQNSIMNTPVYPVPKPDGKWRMVLDYREVNKTIPLIAAQNQHSAGILSSIFRGKYKTTLDLSNGFWAHSITPESYWLTAFTWLGQQYCWTRLPQGFLNSPALFNADVVDLLKEVPNVQVYVDDIYISHDDPREHLEQLEKVFSLLLNAGYVVSLKKSEIAQHEVEFLGFNITKEGRGLTETFKQKLLNITPPRDLKQLQSILGKLNFARNFIPNFSELVKPLYNIIATAPGKYITWTTDNSQQLQNIISMLNSAENLEERNPEVRLIMKVNTSPSAGYIRFYNEFAKRPIMYLNYVYTKAEVKFTNTEKLLTTIHKGLIKALDLGMGQEILVYSPIVSMTKIQKTPLPERKALPIRWITWMSYLEDPRIQFHYDKTLPELQQVPTVTDDIIAKIKHPSEFSMVFYTDGSAIKHPNVNKSHNAGMGIAQVQFKPEFTVINTWSIPLGDHTAQLAEVAAVEFACKKALKIDGPVLIVTDSFYVAESVNKELPYWQSNGFFNNKKKPLKHVSKWKSIADCIQLKPDIIIIHEKGHQPTASTFHTEGNNLADKLATQGSYVVNAGKRTADGSEFEKRTADGSEFESPKKKAKVE

SEQ ID NO: 568 - protein, 2085 aa, synthetic construct
MPAAKRVKLDGGDKKYSIGLDIGTNSVGWAVITDEYKVPSKKFKVLGNTDRHSIKKNLIGALLFDSGETAEATRLKRTARRRYTRRKNRICYLQEIFSNEMAKVDDSFFHRLEESFLVEEDKKHERHPIFGNIVDEVAYHEKYPTIYHLRKKLVDSTDKADLRLIYLALAHMIKFRGHFLIEGDLNPDNSDVDKLFIQLVQTYNQLFEENPINASGVDAKAILSARLSKSRRLENLIAQLPGEKKNGLFGNLIALSLGLTPNFKSNFDLAEDAKLQLSKDTYDDDLDNLLAQIGDQYADLFLAAKNLSDAILLSDILRVNTEITKAPLSASMIKRYDEHHQDLTLLKALVRQQLPEKYKEIFFDQSKNGYAGYIDGGASQEEFYKFIKPILEKMDGTEELLVKLNREDLLRKQRTFDNGSIPHQIHLGELHAILRRQEDFYPFLKDNREKIEKILTFRIPYYVGPLARGNSRFAWMTRKSEETITPWNFEEVVDKGASAQSFIERMTNFDKNLPNEKVLPKHSLLYEYFTVYNELTKVKYVTEGMRKPAFLSGEQKKAIVDLLFKTNRKVTVKQLKEDYFKKIECFDSVEISGVEDRFNASLGTYHDLLKIIKDKDFLDNEENEDILEDIVLTLTLFEDREMIEERLKTYAHLFDDKVMKQLKRRRYTGWGRLSRKLINGIRDKQSGKTILDFLKSDGFANRNFMQLIHDDSLTFKEDIQKAQVSGQGDSLHEHIANLAGSPAIKKGILQTVKVVDELVKVMGRHKPENIVIEMARENQTTQKGQKNSRERMKRIEEGIKELGSQILKEHPVENTQLQNEKLYLYYLQNGRDMYVDQELDINRLSDYDVDHIVPQSFLKDDSIDNKVLTRSDKARGKSDNVPSEEVVKKMKNYWRQLLNAKLITQRKFDNLTKAERGGLSELDKAGFIKRQLVETRQITKHVAQILDSRMNTKYDENDKLIREVKVITLKSKLVSDFRKDFQFYKVREINNYHHAHDAYLNAVVGTALIKKYPKLESEFVYGDYKVYDVRKMIAKSEQEIGKATAKYFFYSNIMNFFKTEITLANGEIRKRPLIETNGETGEIVWDKGRDFATVRKVLSMPQVNIVKKTEVQTGGFSKESILPKRNSDKLIARKKDWDPKKYGGFDSPTVAYSVLVVAKVEKGKSKKLKSVKELLGITIMERSSFEKNPIDFLEAKGYKEVKKDLIIKLPKYSLFELENGRKRMLASAGELQKGNELALPSKYVNFLYLASHYEKLKGSPEDNEQKQLFVEQHKHYLDEIIEQISEFSKRVILADANLDKVLSAYNKHRDKPIREQAENIIHLFTLTNLGAPAAFKYFDTTIDRKRYTSTKEVLDATLIHQSITGLYETRIDLSQLGGDGGGGGPAPGSSGGIPWLMKKPLQLTTLVPLQEYEERLLKQTMLTGSYKEKLQSLFLKYDALWQHWENQVGHRRIKPHHIATGTVNPRPQKQYPINPKAKASIQTVINDLLKQGVLIQQNSIMNTPVYPVPKPDGKWRMVLDYREVNKTIPLIAAQNQHSAGILSSIFRGKYKTTLDLSNGFWAHSITPESYWLTAFTWLGQQYCWTRLPQGFLNSPALFNADVVDLLKEVPNVQVYVDDIYISHDDPREHLEQLEKVFSLLLNAGYVVSLKKSEIAQHEVEFLGFNITKEGRGLTETFKQKLLNITPPRDLKQLQSILGKLNFARNFIPNFSELVKPLYNIIATAPGKYITWTTDNSQQLQNIISMLNSAENLEERNPEVRLIMKVNTSPSAGYIRFYNEFAKRPIMYLNYVYTKAEVKFTNTEKLLTTIHKGLIKALDLGMGQEILVYSPIVSMTKIQKTPLPERKALPIRWITWMSYLEDPRIQFHYDKTLPELQQVPTVTDDIIAKIKHPSEFSMVFYTDGSAIKHPNVNKSHNAGMGIAQVQFKPEFTVINTWSIPLGDHTAQLAEVAAVEFACKKALKIDGPVLIVTDSFYVAESVNKELPYWQSNGFFNNKKKPLKHVSKWKSIADCIQLKPDIIIIHEKGHQPTASTFHTEGNNLADKLATQGSYVVNAGKRTADGSEFEKRTADGSEFESPKKKAKVE

SEQ ID NO: 569 - protein, 2087 aa, synthetic construct
MPAAKRVKLDGGDKKYSIGLDIGTNSVGWAVITDEYKVPSKKFKVLGNTDRHSIKKNLIGALLFDSGETAEATRLKRTARRRYTRRKNRICYLQEIFSNEMAKVDDSFFHRLEESFLVEEDKKHERHPIFGNIVDEVAYHEKYPTIYHLRKKLVDSTDKADLRLIYLALAHMIKFRGHFLIEGDLNPDNSDVDKLFIQLVQTYNQLFEENPINASGVDAKAILSARLSKSRRLENLIAQLPGEKKNGLFGNLIALSLGLTPNFKSNFDLAEDAKLQLSKDTYDDDLDNLLAQIGDQYADLFLAAKNLSDAILLSDILRVNTEITKAPLSASMIKRYDEHHQDLTLLKALVRQQLPEKYKEIFFDQSKNGYAGYIDGGASQEEFYKFIKPILEKMDGTEELLVKLNREDLLRKQRTFDNGSIPHQIHLGELHAILRRQEDFYPFLKDNREKIEKILTFRIPYYVGPLARGNSRFAWMTRKSEETITPWNFEEVVDKGASAQSFIERMTNFDKNLPNEKVLPKHSLLYEYFTVYNELTKVKYVTEGMRKPAFLSGEQKKAIVDLLFKTNRKVTVKQLKEDYFKKIECFDSVEISGVEDRFNASLGTYHDLLKIIKDKDFLDNEENEDILEDIVLTLTLFEDREMIEERLKTYAHLFDDKVMKQLKRRRYTGWGRLSRKLINGIRDKQSGKTILDFLKSDGFANRNFMQLIHDDSLTFKEDIQKAQVSGQGDSLHEHIANLAGSPAIKKGILQTVKVVDELVKVMGRHKPENIVIEMARENQTTQKGQKNSRERMKRIEEGIKELGSQILKEHPVENTQLQNEKLYLYYLQNGRDMYVDQELDINRLSDYDVDHIVPQSFLKDDSIDNKVLTRSDKARGKSDNVPSEEVVKKMKNYWRQLLNAKLITQRKFDNLTKAERGGLSELDKAGFIKRQLVETRQITKHVAQILDSRMNTKYDENDKLIREVKVITLKSKLVSDFRKDFQFYKVREINNYHHAHDAYLNAVVGTALIKKYPKLESEFVYGDYKVYDVRKMIAKSEQEIGKATAKYFFYSNIMNFFKTEITLANGEIRKRPLIETNGETGEIVWDKGRDFATVRKVLSMPQVNIVKKTEVQTGGFSKESILPKRNSDKLIARKKDWDPKKYGGFDSPTVAYSVLVVAKVEKGKSKKLKSVKELLGITIMERSSFEKNPIDFLEAKGYKEVKKDLIIKLPKYSLFELENGRKRMLASAGELQKGNELALPSKYVNFLYLASHYEKLKGSPEDNEQKQLFVEQHKHYLDEIIEQISEFSKRVILADANLDKVLSAYNKHRDKPIREQAENIIHLFTLTNLGAPAAFKYFDTTIDRKRYTSTKEVLDATLIHQSITGLYETRIDLSQLGGDGGPAPAPAPAPAPGGIPWLMKKPLQLTTLVPLQEYEERLLKQTMLTGSYKEKLQSLFLKYDALWQHWENQVGHRRIKPHHIATGTVNPRPQKQYPINPKAKASIQTVINDLLKQGVLIQQNSIMNTPVYPVPKPDGKWRMVLDYREVNKTIPLIAAQNQHSAGILSSIFRGKYKTTLDLSNGFWAHSITPESYWLTAFTWLGQQYCWTRLPQGFLNSPALFNADVVDLLKEVPNVQVYVDDIYISHDDPREHLEQLEKVFSLLLNAGYVVSLKKSEIAQHEVEFLGFNITKEGRGLTETFKQKLLNITPPRDLKQLQSILGKLNFARNFIPNFSELVKPLYNIIATAPGKYITWTTDNSQQLQNIISMLNSAENLEERNPEVRLIMKVNTSPSAGYIRFYNEFAKRPIMYLNYVYTKAEVKFTNTEKLLTTIHKGLIKALDLGMGQEILVYSPIVSMTKIQKTPLPERKALPIRWITWMSYLEDPRIQFHYDKTLPELQQVPTVTDDIIAKIKHPSEFSMVFYTDGSAIKHPNVNKSHNAGMGIAQVQFKPEFTVINTWSIPLGDHTAQLAEVAAVEFACKKALKIDGPVLIVTDSFYVAESVNKELPYWQSNGFFNNKKKPLKHVSKWKSIADCIQLKPDIIIIHEKGHQPTASTFHTEGNNLADKLATQGSYVVNAGKRTADGSEFEKRTADGSEFESPKKKAKVE

SEQ ID NO: 570 - protein, 2101 aa, synthetic construct
MPAAKRVKLDGGDKKYSIGLDIGTNSVGWAVITDEYKVPSKKFKVLGNTDRHSIKKNLIGALLFDSGETAEATRLKRTARRRYTRRKNRICYLQEIFSNEMAKVDDSFFHRLEESFLVEEDKKHERHPIFGNIVDEVAYHEKYPTIYHLRKKLVDSTDKADLRLIYLALAHMIKFRGHFLIEGDLNPDNSDVDKLFIQLVQTYNQLFEENPINASGVDAKAILSARLSKSRRLENLIAQLPGEKKNGLFGNLIALSLGLTPNFKSNFDLAEDAKLQLSKDTYDDDLDNLLAQIGDQYADLFLAAKNLSDAILLSDILRVNTEITKAPLSASMIKRYDEHHQDLTLLKALVRQQLPEKYKEIFFDQSKNGYAGYIDGGASQEEFYKFIKPILEKMDGTEELLVKLNREDLLRKQRTFDNGSIPHQIHLGELHAILRRQEDFYPFLKDNREKIEKILTFRIPYYVGPLARGNSRFAWMTRKSEETITPWNFEEVVDKGASAQSFIERMTNFDKNLPNEKVLPKHSLLYEYFTVYNELTKVKYVTEGMRKPAFLSGEQKKAIVDLLFKTNRKVTVKQLKEDYFKKIECFDSVEISGVEDRFNASLGTYHDLLKIIKDKDFLDNEENEDILEDIVLTLTLFEDREMIEERLKTYAHLFDDKVMKQLKRRRYTGWGRLSRKLINGIRDKQSGKTILDFLKSDGFANRNFMQLIHDDSLTFKEDIQKAQVSGQGDSLHEHIANLAGSPAIKKGILQTVKVVDELVKVMGRHKPENIVIEMARENQTTQKGQKNSRERMKRIEEGIKELGSQILKEHPVENTQLQNEKLYLYYLQNGRDMYVDQELDINRLSDYDVDHIVPQSFLKDDSIDNKVLTRSDKARGKSDNVPSEEVVKKMKNYWRQLLNAKLITQRKFDNLTKAERGGLSELDKAGFIKRQLVETRQITKHVAQILDSRMNTKYDENDKLIREVKVITLKSKLVSDFRKDFQFYKVREINNYHHAHDAYLNAVVGTALIKKYPKLESEFVYGDYKVYDVRKMIAKSEQEIGKATAKYFFYSNIMNFFKTEITLANGEIRKRPLIETNGETGEIVWDKGRDFATVRKVLSMPQVNIVKKTEVQTGGFSKESILPKRNSDKLIARKKDWDPKKYGGFDSPTVAYSVLVVAKVEKGKSKKLKSVKELLGITIMERSSFEKNPIDFLEAKGYKEVKKDLIIKLPKYSLFELENGRKRMLASAGELQKGNELALPSKYVNFLYLASHYEKLKGSPEDNEQKQLFVEQHKHYLDEIIEQISEFSKRVILADANLDKVLSAYNKHRDKPIREQAENIIHLFTLTNLGAPAAFKYFDTTIDRKRYTSTKEVLDATLIHQSITGLYETRIDLSQLGGDGGEAAAKEAAAKEAAAKEAAAKEAAAKGGIPWLMKKPLQLTTLVPLQEYEERLLKQTMLTGSYKEKLQSLFLKYDALWQHWENQVGHRRIKPHHIATGTVNPRPQKQYPINPKAKASIQTVINDLLKQGVLIQQNSIMNTPVYPVPKPDGKWRMVLDYREVNKTIPLIAAQNQHSAGILSSIFRGKYKTTLDLSNGFWAHSITPESYWLTAFTWLGQQYCWTRLPQGFLNSPALFNADVVDLLKEVPNVQVYVDDIYISHDDPREHLEQLEKVFSLLLNAGYVVSLKKSEIAQHEVEFLGFNITKEGRGLTETFKQKLLNITPPRDLKQLQSILGKLNFARNFIPNFSELVKPLYNIIATAPGKYITWTTDNSQQLQNIISMLNSAENLEERNPEVRLIMKVNTSPSAGYIRFYNEFAKRPIMYLNYVYTKAEVKFTNTEKLLTTIHKGLIKALDLGMGQEILVYSPIVSMTKIQKTPLPERKALPIRWITWMSYLEDPRIQFHYDKTLPELQQVPTVTDDIIAKIKHPSEFSMVFYTDGSAIKHPNVNKSHNAGMGIAQVQFKPEFTVINTWSIPLGDHTAQLAEVAAVEFACKKALKIDGPVLIVTDSFYVAESVNKELPYWQSNGFFNNKKKPLKHVSKWKSIADCIQLKPDIIIIHEKGHQPTASTFHTEGNNLADKLATQGSYVVNAGKRTADGSEFEKRTADGSEFESPKKKAKVE

SEQ ID NO: 571 - protein, 2087 aa, synthetic construct
MPAAKRVKLDGGDKKYSIGLDIGTNSVGWAVITDEYKVPSKKFKVLGNTDRHSIKKNLIGALLFDSGETAEATRLKRTARRRYTRRKNRICYLQEIFSNEMAKVDDSFFHRLEESFLVEEDKKHERHPIFGNIVDEVAYHEKYPTIYHLRKKLVDSTDKADLRLIYLALAHMIKFRGHFLIEGDLNPDNSDVDKLFIQLVQTYNQLFEENPINASGVDAKAILSARLSKSRRLENLIAQLPGEKKNGLFGNLIALSLGLTPNFKSNFDLAEDAKLQLSKDTYDDDLDNLLAQIGDQYADLFLAAKNLSDAILLSDILRVNTEITKAPLSASMIKRYDEHHQDLTLLKALVRQQLPEKYKEIFFDQSKNGYAGYIDGGASQEEFYKFIKPILEKMDGTEELLVKLNREDLLRKQRTFDNGSIPHQIHLGELHAILRRQEDFYPFLKDNREKIEKILTFRIPYYVGPLARGNSRFAWMTRKSEETITPWNFEEVVDKGASAQSFIERMTNFDKNLPNEKVLPKHSLLYEYFTVYNELTKVKYVTEGMRKPAFLSGEQKKAIVDLLFKTNRKVTVKQLKEDYFKKIECFDSVEISGVEDRFNASLGTYHDLLKIIKDKDFLDNEENEDILEDIVLTLTLFEDREMIEERLKTYAHLFDDKVMKQLKRRRYTGWGRLSRKLINGIRDKQSGKTILDFLKSDGFANRNFMQLIHDDSLTFKEDIQKAQVSGQGDSLHEHIANLAGSPAIKKGILQTVKVVDELVKVMGRHKPENIVIEMARENQTTQKGQKNSRERMKRIEEGIKELGSQILKEHPVENTQLQNEKLYLYYLQNGRDMYVDQELDINRLSDYDVDHIVPQSFLKDDSIDNKVLTRSDKARGKSDNVPSEEVVKKMKNYWRQLLNAKLITQRKFDNLTKAERGGLSELDKAGFIKRQLVETRQITKHVAQILDSRMNTKYDENDKLIREVKVITLKSKLVSDFRKDFQFYKVREINNYHHAHDAYLNAVVGTALIKKYPKLESEFVYGDYKVYDVRKMIAKSEQEIGKATAKYFFYSNIMNFFKTEITLANGEIRKRPLIETNGETGEIVWDKGRDFATVRKVLSMPQVNIVKKTEVQTGGFSKESILPKRNSDKLIARKKDWDPKKYGGFDSPTVAYSVLVVAKVEKGKSKKLKSVKELLGITIMERSSFEKNPIDFLEAKGYKEVKKDLIIKLPKYSLFELENGRKRMLASAGELQKGNELALPSKYVNFLYLASHYEKLKGSPEDNEQKQLFVEQHKHYLDEIIEQISEFSKRVILADANLDKVLSAYNKHRDKPIREQAENIIHLFTLTNLGAPAAFKYFDTTIDRKRYTSTKEVLDATLIHQSITGLYETRIDLSQLGGDGGGGSGSSEAAAKGGIPWLMKKPLQLTTLVPLQEYEERLLKQTMLTGSYKEKLQSLFLKYDALWQHWENQVGHRRIKPHHIATGTVNPRPQKQYPINPKAKASIQTVINDLLKQGVLIQQNSIMNTPVYPVPKPDGKWRMVLDYREVNKTIPLIAAQNQHSAGILSSIFRGKYKTTLDLSNGFWAHSITPESYWLTAFTWLGQQYCWTRLPQGFLNSPALFNADVVDLLKEVPNVQVYVDDIYISHDDPREHLEQLEKVFSLLLNAGYVVSLKKSEIAQHEVEFLGFNITKEGRGLTETFKQKLLNITPPRDLKQLQSILGKLNFARNFIPNFSELVKPLYNIIATAPGKYITWTTDNSQQLQNIISMLNSAENLEERNPEVRLIMKVNTSPSAGYIRFYNEFAKRPIMYLNYVYTKAEVKFTNTEKLLTTIHKGLIKALDLGMGQEILVYSPIVSMTKIQKTPLPERKALPIRWITWMSYLEDPRIQFHYDKTLPELQQVPTVTDDIIAKIKHPSEFSMVFYTDGSAIKHPNVNKSHNAGMGIAQVQFKPEFTVINTWSIPLGDHTAQLAEVAAVEFACKKALKIDGPVLIVTDSFYVAESVNKELPYWQSNGFFNNKKKPLKHVSKWKSIADCIQLKPDIIIIHEKGHQPTASTFHTEGNNLADKLATQGSYVVNAGKRTADGSEFEKRTADGSEFESPKKKAKVE

SEQ ID NO: 572 - protein, 2087 aa, synthetic construct
MPAAKRVKLDGGDKKYSIGLDIGTNSVGWAVITDEYKVPSKKFKVLGNTDRHSIKKNLIGALLFDSGETAEATRLKRTARRRYTRRKNRICYLQEIFSNEMAKVDDSFFHRLEESFLVEEDKKHERHPIFGNIVDEVAYHEKYPTIYHLRKKLVDSTDKADLRLIYLALAHMIKFRGHFLIEGDLNPDNSDVDKLFIQLVQTYNQLFEENPINASGVDAKAILSARLSKSRRLENLIAQLPGEKKNGLFGNLIALSLGLTPNFKSNFDLAEDAKLQLSKDTYDDDLDNLLAQIGDQYADLFLAAKNLSDAILLSDILRVNTEITKAPLSASMIKRYDEHHQDLTLLKALVRQQLPEKYKEIFFDQSKNGYAGYIDGGASQEEFYKFIKPILEKMDGTEELLVKLNREDLLRKQRTFDNGSIPHQIHLGELHAILRRQEDFYPFLKDNREKIEKILTFRIPYYVGPLARGNSRFAWMTRKSEETITPWNFEEVVDKGASAQSFIERMTNFDKNLPNEKVLPKHSLLYEYFTVYNELTKVKYVTEGMRKPAFLSGEQKKAIVDLLFKTNRKVTVKQLKEDYFKKIECFDSVEISGVEDRFNASLGTYHDLLKIIKDKDFLDNEENEDILEDIVLTLTLFEDREMIEERLKTYAHLFDDKVMKQLKRRRYTGWGRLSRKLINGIRDKQSGKTILDFLKSDGFANRNFMQLIHDDSLTFKEDIQKAQVSGQGDSLHEHIANLAGSPAIKKGILQTVKVVDELVKVMGRHKPENIVIEMARENQTTQKGQKNSRERMKRIEEGIKELGSQILKEHPVENTQLQNEKLYLYYLQNGRDMYVDQELDINRLSDYDVDHIVPQSFLKDDSIDNKVLTRSDKARGKSDNVPSEEVVKKMKNYWRQLLNAKLITQRKFDNLTKAERGGLSELDKAGFIKRQLVETRQITKHVAQILDSRMNTKYDENDKLIREVKVITLKSKLVSDFRKDFQFYKVREINNYHHAHDAYLNAVVGTALIKKYPKLESEFVYGDYKVYDVRKMIAKSEQEIGKATAKYFFYSNIMNFFKTEITLANGEIRKRPLIETNGETGEIVWDKGRDFATVRKVLSMPQVNIVKKTEVQTGGFSKESILPKRNSDKLIARKKDWDPKKYGGFDSPTVAYSVLVVAKVEKGKSKKLKSVKELLGITIMERSSFEKNPIDFLEAKGYKEVKKDLIIKLPKYSLFELENGRKRMLASAGELQKGNELALPSKYVNFLYLASHYEKLKGSPEDNEQKQLFVEQHKHYLDEIIEQISEFSKRVILADANLDKVLSAYNKHRDKPIREQAENIIHLFTLTNLGAPAAFKYFDTTIDRKRYTSTKEVLDATLIHQSITGLYETRIDLSQLGGDGGEAAAKGGSPAPGGIPWLMKKPLQLTTLVPLQEYEERLLKQTMLTGSYKEKLQSLFLKYDALWQHWENQVGHRRIKPHHIATGTVNPRPQKQYPINPKAKASIQTVINDLLKQGVLIQQNSIMNTPVYPVPKPDGKWRMVLDYREVNKTIPLIAAQNQHSAGILSSIFRGKYKTTLDLSNGFWAHSITPESYWLTAFTWLGQQYCWTRLPQGFLNSPALFNADVVDLLKEVPNVQVYVDDIYISHDDPREHLEQLEKVFSLLLNAGYVVSLKKSEIAQHEVEFLGFNITKEGRGLTETFKQKLLNITPPRDLKQLQSILGKLNFARNFIPNFSELVKPLYNIIATAPGKYITWTTDNSQQLQNIISMLNSAENLEERNPEVRLIMKVNTSPSAGYIRFYNEFAKRPIMYLNYVYTKAEVKFTNTEKLLTTIHKGLIKALDLGMGQEILVYSPIVSMTKIQKTPLPERKALPIRWITWMSYLEDPRIQFHYDKTLPELQQVPTVTDDIIAKIKHPSEFSMVFYTDGSAIKHPNVNKSHNAGMGIAQVQFKPEFTVINTWSIPLGDHTAQLAEVAAVEFACKKALKIDGPVLIVTDSFYVAESVNKELPYWQSNGFFNNKKKPLKHVSKWKSIADCIQLKPDIIIIHEKGHQPTASTFHTEGNNLADKLATQGSYVVNAGKRTADGSEFEKRTADGSEFESPKKKAKVE

SEQ ID NO: 573 - protein, 2085 aa, synthetic construct
MPAAKRVKLDGGDKKYSIGLDIGTNSVGWAVITDEYKVPSKKFKVLGNTDRHSIKKNLIGALLFDSGETAEATRLKRTARRRYTRRKNRICYLQEIFSNEMAKVDDSFFHRLEESFLVEEDKKHERHPIFGNIVDEVAYHEKYPTIYHLRKKLVDSTDKADLRLIYLALAHMIKFRGHFLIEGDLNPDNSDVDKLFIQLVQTYNQLFEENPINASGVDAKAILSARLSKSRRLENLIAQLPGEKKNGLFGNLIALSLGLTPNFKSNFDLAEDAKLQLSKDTYDDDLDNLLAQIGDQYADLFLAAKNLSDAILLSDILRVNTEITKAPLSASMIKRYDEHHQDLTLLKALVRQQLPEKYKEIFFDQSKNGYAGYIDGGASQEEFYKFIKPILEKMDGTEELLVKLNREDLLRKQRTFDNGSIPHQIHLGELHAILRRQEDFYPFLKDNREKIEKILTFRIPYYVGPLARGNSRFAWMTRKSEETITPWNFEEVVDKGASAQSFIERMTNFDKNLPNEKVLPKHSLLYEYFTVYNELTKVKYVTEGMRKPAFLSGEQKKAIVDLLFKTNRKVTVKQLKEDYFKKIECFDSVEISGVEDRFNASLGTYHDLLKIIKDKDFLDNEENEDILEDIVLTLTLFEDREMIEERLKTYAHLFDDKVMKQLKRRRYTGWGRLSRKLINGIRDKQSGKTILDFLKSDGFANRNFMQLIHDDSLTFKEDIQKAQVSGQGDSLHEHIANLAGSPAIKKGILQTVKVVDELVKVMGRHKPENIVIEMARENQTTQKGQKNSRERMKRIEEGIKELGSQILKEHPVENTQLQNEKLYLYYLQNGRDMYVDQELDINRLSDYDVDHIVPQSFLKDDSIDNKVLTRSDKARGKSDNVPSEEVVKKMKNYWRQLLNAKLITQRKFDNLTKAERGGLSELDKAGFIKRQLVETRQITKHVAQILDSRMNTKYDENDKLIREVKVITLKSKLVSDFRKDFQFYKVREINNYHHAHDAYLNAVVGTALIKKYPKLESEFVYGDYKVYDVRKMIAKSEQEIGKATAKYFFYSNIMNFFKTEITLANGEIRKRPLIETNGETGEIVWDKGRDFATVRKVLSMPQVNIVKKTEVQTGGFSKESILPKRNSDKLIARKKDWDPKKYGGFDSPTVAYSVLVVAKVEKGKSKKLKSVKELLGITIMERSSFEKNPIDFLEAKGYKEVKKDLIIKLPKYSLFELENGRKRMLASAGELQKGNELALPSKYVNFLYLASHYEKLKGSPEDNEQKQLFVEQHKHYLDEIIEQISEFSKRVILADANLDKVLSAYNKHRDKPIREQAENIIHLFTLTNLGAPAAFKYFDTTIDRKRYTSTKEVLDATLIHQSITGLYETRIDLSQLGGDGGGGSPAPGGGGGIPWLMKKPLQLTTLVPLQEYEERLLKQTMLTGSYKEKLQSLFLKYDALWQHWENQVGHRRIKPHHIATGTVNPRPQKQYPINPKAKASIQTVINDLLKQGVLIQQNSIMNTPVYPVPKPDGKWRMVLDYREVNKTIPLIAAQNQHSAGILSSIFRGKYKTTLDLSNGFWAHSITPESYWLTAFTWLGQQYCWTRLPQGFLNSPALFNADVVDLLKEVPNVQVYVDDIYISHDDPREHLEQLEKVFSLLLNAGYVVSLKKSEIAQHEVEFLGFNITKEGRGLTETFKQKLLNITPPRDLKQLQSILGKLNFARNFIPNFSELVKPLYNIIATAPGKYITWTTDNSQQLQNIISMLNSAENLEERNPEVRLIMKVNTSPSAGYIRFYNEFAKRPIMYLNYVYTKAEVKFTNTEKLLTTIHKGLIKALDLGMGQEILVYSPIVSMTKIQKTPLPERKALPIRWITWMSYLEDPRIQFHYDKTLPELQQVPTVTDDIIAKIKHPSEFSMVFYTDGSAIKHPNVNKSHNAGMGIAQVQFKPEFTVINTWSIPLGDHTAQLAEVAAVEFACKKALKIDGPVLIVTDSFYVAESVNKELPYWQSNGFFNNKKKPLKHVSKWKSIADCIQLKPDIIIIHEKGHQPTASTFHTEGNNLADKLATQGSYVVNAGKRTADGSEFEKRTADGSEFESPKKKAKVE

SEQ ID NO: 574 - protein, 2091 aa, synthetic construct
MPAAKRVKLDGGDKKYSIGLDIGTNSVGWAVITDEYKVPSKKFKVLGNTDRHSIKKNLIGALLFDSGETAEATRLKRTARRRYTRRKNRICYLQEIFSNEMAKVDDSFFHRLEESFLVEEDKKHERHPIFGNIVDEVAYHEKYPTIYHLRKKLVDSTDKADLRLIYLALAHMIKFRGHFLIEGDLNPDNSDVDKLFIQLVQTYNQLFEENPINASGVDAKAILSARLSKSRRLENLIAQLPGEKKNGLFGNLIALSLGLTPNFKSNFDLAEDAKLQLSKDTYDDDLDNLLAQIGDQYADLFLAAKNLSDAILLSDILRVNTEITKAPLSASMIKRYDEHHQDLTLLKALVRQQLPEKYKEIFFDQSKNGYAGYIDGGASQEEFYKFIKPILEKMDGTEELLVKLNREDLLRKQRTFDNGSIPHQIHLGELHAILRRQEDFYPFLKDNREKIEKILTFRIPYYVGPLARGNSRFAWMTRKSEETITPWNFEEVVDKGASAQSFIERMTNFDKNLPNEKVLPKHSLLYEYFTVYNELTKVKYVTEGMRKPAFLSGEQKKAIVDLLFKTNRKVTVKQLKEDYFKKIECFDSVEISGVEDRFNASLGTYHDLLKIIKDKDFLDNEENEDILEDIVLTLTLFEDREMIEERLKTYAHLFDDKVMKQLKRRRYTGWGRLSRKLINGIRDKQSGKTILDFLKSDGFANRNFMQLIHDDSLTFKEDIQKAQVSGQGDSLHEHIANLAGSPAIKKGILQTVKVVDELVKVMGRHKPENIVIEMARENQTTQKGQKNSRERMKRIEEGIKELGSQILKEHPVENTQLQNEKLYLYYLQNGRDMYVDQELDINRLSDYDVDHIVPQSFLKDDSIDNKVLTRSDKARGKSDNVPSEEVVKKMKNYWRQLLNAKLITQRKFDNLTKAERGGLSELDKAGFIKRQLVETRQITKHVAQILDSRMNTKYDENDKLIREVKVITLKSKLVSDFRKDFQFYKVREINNYHHAHDAYLNAVVGTALIKKYPKLESEFVYGDYKVYDVRKMIAKSEQEIGKATAKYFFYSNIMNFFKTEITLANGEIRKRPLIETNGETGEIVWDKGRDFATVRKVLSMPQVNIVKKTEVQTGGFSKESILPKRNSDKLIARKKDWDPKKYGGFDSPTVAYSVLVVAKVEKGKSKKLKSVKELLGITIMERSSFEKNPIDFLEAKGYKEVKKDLIIKLPKYSLFELENGRKRMLASAGELQKGNELALPSKYVNFLYLASHYEKLKGSPEDNEQKQLFVEQHKHYLDEIIEQISEFSKRVILADANLDKVLSAYNKHRDKPIREQAENIIHLFTLTNLGAPAAFKYFDTTIDRKRYTSTKEVLDATLIHQSITGLYETRIDLSQLGGDGGEAAAKGGGGSEAAAKGGIPWLMKKPLQLTTLVPLQEYEERLLKQTMLTGSYKEKLQSLFLKYDALWQHWENQVGHRRIKPHHIATGTVNPRPQKQYPINPKAKASIQTVINDLLKQGVLIQQNSIMNTPVYPVPKPDGKWRMVLDYREVNKTIPLIAAQNQHSAGILSSIFRGKYKTTLDLSNGFWAHSITPESYWLTAFTWLGQQYCWTRLPQGFLNSPALFNADVVDLLKEVPNVQVYVDDIYISHDDPREHLEQLEKVFSLLLNAGYVVSLKKSEIAQHEVEFLGFNITKEGRGLTETFKQKLLNITPPRDLKQLQSILGKLNFARNFIPNFSELVKPLYNIIATAPGKYITWTTDNSQQLQNIISMLNSAENLEERNPEVRLIMKVNTSPSAGYIRFYNEFAKRPIMYLNYVYTKAEVKFTNTEKLLTTIHKGLIKALDLGMGQEILVYSPIVSMTKIQKTPLPERKALPIRWITWMSYLEDPRIQFHYDKTLPELQQVPTVTDDIIAKIKHPSEFSMVFYTDGSAIKHPNVNKSHNAGMGIAQVQFKPEFTVINTWSIPLGDHTAQLAEVAAVEFACKKALKIDGPVLIVTDSFYVAESVNKELPYWQSNGFFNNKKKPLKHVSKWKSIADCIQLKPDIIIIHEKGHQPTASTFHTEGNNLADKLATQGSYVVNAGKRTADGSEFEKRTADGSEFESPKKKAKVE

SEQ ID NO: 575 - protein, 2082 aa, synthetic construct
MPAAKRVKLDGGDKKYSIGLDIGTNSVGWAVITDEYKVPSKKFKVLGNTDRHSIKKNLIGALLFDSGETAEATRLKRTARRRYTRRKNRICYLQEIFSNEMAKVDDSFFHRLEESFLVEEDKKHERHPIFGNIVDEVAYHEKYPTIYHLRKKLVDSTDKADLRLIYLALAHMIKFRGHFLIEGDLNPDNSDVDKLFIQLVQTYNQLFEENPINASGVDAKAILSARLSKSRRLENLIAQLPGEKKNGLFGNLIALSLGLTPNFKSNFDLAEDAKLQLSKDTYDDDLDNLLAQIGDQYADLFLAAKNLSDAILLSDILRVNTEITKAPLSASMIKRYDEHHQDLTLLKALVRQQLPEKYKEIFFDQSKNGYAGYIDGGASQEEFYKFIKPILEKMDGTEELLVKLNREDLLRKQRTFDNGSIPHQIHLGELHAILRRQEDFYPFLKDNREKIEKILTFRIPYYVGPLARGNSRFAWMTRKSEETITPWNFEEVVDKGASAQSFIERMTNFDKNLPNEKVLPKHSLLYEYFTVYNELTKVKYVTEGMRKPAFLSGEQKKAIVDLLFKTNRKVTVKQLKEDYFKKIECFDSVEISGVEDRFNASLGTYHDLLKIIKDKDFLDNEENEDILEDIVLTLTLFEDREMIEERLKTYAHLFDDKVMKQLKRRRYTGWGRLSRKLINGIRDKQSGKTILDFLKSDGFANRNFMQLIHDDSLTFKEDIQKAQVSGQGDSLHEHIANLAGSPAIKKGILQTVKVVDELVKVMGRHKPENIVIEMARENQTTQKGQKNSRERMKRIEEGIKELGSQILKEHPVENTQLQNEKLYLYYLQNGRDMYVDQELDINRLSDYDVDHIVPQSFLKDDSIDNKVLTRSDKARGKSDNVPSEEVVKKMKNYWRQLLNAKLITQRKFDNLTKAERGGLSELDKAGFIKRQLVETRQITKHVAQILDSRMNTKYDENDKLIREVKVITLKSKLVSDFRKDFQFYKVREINNYHHAHDAYLNAVVGTALIKKYPKLESEFVYGDYKVYDVRKMIAKSEQEIGKATAKYFFYSNIMNFFKTEITLANGEIRKRPLIETNGETGEIVWDKGRDFATVRKVLSMPQVNIVKKTEVQTGGFSKESILPKRNSDKLIARKKDWDPKKYGGFDSPTVAYSVLVVAKVEKGKSKKLKSVKELLGITIMERSSFEKNPIDFLEAKGYKEVKKDLIIKLPKYSLFELENGRKRMLASAGELQKGNELALPSKYVNFLYLASHYEKLKGSPEDNEQKQLFVEQHKHYLDEIIEQISEFSKRVILADANLDKVLSAYNKHRDKPIREQAENIIHLFTLTNLGAPAAFKYFDTTIDRKRYTSTKEVLDATLIHQSITGLYETRIDLSQLGGDGGGSSPAPGGIPWLMKKPLQLTTLVPLQEYEERLLKQTMLTGSYKEKLQSLFLKYDALWQHWENQVGHRRIKPHHIATGTVNPRPQKQYPINPKAKASIQTVINDLLKQGVLIQQNSIMNTPVYPVPKPDGKWRMVLDYREVNKTIPLIAAQNQHSAGILSSIFRGKYKTTLDLSNGFWAHSITPESYWLTAFTWLGQQYCWTRLPQGFLNSPALFNADVVDLLKEVPNVQVYVDDIYISHDDPREHLEQLEKVFSLLLNAGYVVSLKKSEIAQHEVEFLGFNITKEGRGLTETFKQKLLNITPPRDLKQLQSILGKLNFARNFIPNFSELVKPLYNIIATAPGKYITWTTDNSQQLQNIISMLNSAENLEERNPEVRLIMKVNTSPSAGYIRFYNEFAKRPIMYLNYVYTKAEVKFTNTEKLLTTIHKGLIKALDLGMGQEILVYSPIVSMTKIQKTPLPERKALPIRWITWMSYLEDPRIQFHYDKTLPELQQVPTVTDDIIAKIKHPSEFSMVFYTDGSAIKHPNVNKSHNAGMGIAQVQFKPEFTVINTWSIPLGDHTAQLAEVAAVEFACKKALKIDGPVLIVTDSFYVAESVNKELPYWQSNGFFNNKKKPLKHVSKWKSIADCIQLKPDIIIIHEKGHQPTASTFHTEGNNLADKLATQGSYVVNAGKRTADGSEFEKRTADGSEFESPKKKAKVE

SEQ ID NO: 576 - protein, 2087 aa, synthetic construct
MPAAKRVKLDGGDKKYSIGLDIGTNSVGWAVITDEYKVPSKKFKVLGNTDRHSIKKNLIGALLFDSGETAEATRLKRTARRRYTRRKNRICYLQEIFSNEMAKVDDSFFHRLEESFLVEEDKKHERHPIFGNIVDEVAYHEKYPTIYHLRKKLVDSTDKADLRLIYLALAHMIKFRGHFLIEGDLNPDNSDVDKLFIQLVQTYNQLFEENPINASGVDAKAILSARLSKSRRLENLIAQLPGEKKNGLFGNLIALSLGLTPNFKSNFDLAEDAKLQLSKDTYDDDLDNLLAQIGDQYADLFLAAKNLSDAILLSDILRVNTEITKAPLSASMIKRYDEHHQDLTLLKALVRQQLPEKYKEIFFDQSKNGYAGYIDGGASQEEFYKFIKPILEKMDGTEELLVKLNREDLLRKQRTFDNGSIPHQIHLGELHAILRRQEDFYPFLKDNREKIEKILTFRIPYYVGPLARGNSRFAWMTRKSEETITPWNFEEVVDKGASAQSFIERMTNFDKNLPNEKVLPKHSLLYEYFTVYNELTKVKYVTEGMRKPAFLSGEQKKAIVDLLFKTNRKVTVKQLKEDYFKKIECFDSVEISGVEDRFNASLGTYHDLLKIIKDKDFLDNEENEDILEDIVLTLTLFEDREMIEERLKTYAHLFDDKVMKQLKRRRYTGWGRLSRKLINGIRDKQSGKTILDFLKSDGFANRNFMQLIHDDSLTFKEDIQKAQVSGQGDSLHEHIANLAGSPAIKKGILQTVKVVDELVKVMGRHKPENIVIEMARENQTTQKGQKNSRERMKRIEEGIKELGSQILKEHPVENTQLQNEKLYLYYLQNGRDMYVDQELDINRLSDYDVDHIVPQSFLKDDSIDNKVLTRSDKARGKSDNVPSEEVVKKMKNYWRQLLNAKLITQRKFDNLTKAERGGLSELDKAGFIKRQLVETRQITKHVAQILDSRMNTKYDENDKLIREVKVITLKSKLVSDFRKDFQFYKVREINNYHHAHDAYLNAVVGTALIKKYPKLESEFVYGDYKVYDVRKMIAKSEQEIGKATAKYFFYSNIMNFFKTEITLANGEIRKRPLIETNGETGEIVWDKGRDFATVRKVLSMPQVNIVKKTEVQTGGFSKESILPKRNSDKLIARKKDWDPKKYGGFDSPTVAYSVLVVAKVEKGKSKKLKSVKELLGITIMERSSFEKNPIDFLEAKGYKEVKKDLIIKLPKYSLFELENGRKRMLASAGELQKGNELALPSKYVNFLYLASHYEKLKGSPEDNEQKQLFVEQHKHYLDEIIEQISEFSKRVILADANLDKVLSAYNKHRDKPIREQAENIIHLFTLTNLGAPAAFKYFDTTIDRKRYTSTKEVLDATLIHQSITGLYETRIDLSQLGGDGGPAPGGSEAAAKGGIPWLMKKPLQLTTLVPLQEYEERLLKQTMLTGSYKEKLQSLFLKYDALWQHWENQVGHRRIKPHHIATGTVNPRPQKQYPINPKAKASIQTVINDLLKQGVLIQQNSIMNTPVYPVPKPDGKWRMVLDYREVNKTIPLIAAQNQHSAGILSSIFRGKYKTTLDLSNGFWAHSITPESYWLTAFTWLGQQYCWTRLPQGFLNSPALFNADVVDLLKEVPNVQVYVDDIYISHDDPREHLEQLEKVFSLLLNAGYVVSLKKSEIAQHEVEFLGFNITKEGRGLTETFKQKLLNITPPRDLKQLQSILGKLNFARNFIPNFSELVKPLYNIIATAPGKYITWTTDNSQQLQNIISMLNSAENLEERNPEVRLIMKVNTSPSAGYIRFYNEFAKRPIMYLNYVYTKAEVKFTNTEKLLTTIHKGLIKALDLGMGQEILVYSPIVSMTKIQKTPLPERKALPIRWITWMSYLEDPRIQFHYDKTLPELQQVPTVTDDIIAKIKHPSEFSMVFYTDGSAIKHPNVNKSHNAGMGIAQVQFKPEFTVINTWSIPLGDHTAQLAEVAAVEFACKKALKIDGPVLIVTDSFYVAESVNKELPYWQSNGFFNNKKKPLKHVSKWKSIADCIQLKPDIIIIHEKGHQPTASTFHTEGNNLADKLATQGSYVVNAGKRTADGSEFEKRTADGSEFESPKKKAKVE

SEQ ID NO: 577 - protein, 2087 aa, synthetic construct
MPAAKRVKLDGGDKKYSIGLDIGTNSVGWAVITDEYKVPSKKFKVLGNTDRHSIKKNLIGALLFDSGETAEATRLKRTARRRYTRRKNRICYLQEIFSNEMAKVDDSFFHRLEESFLVEEDKKHERHPIFGNIVDEVAYHEKYPTIYHLRKKLVDSTDKADLRLIYLALAHMIKFRGHFLIEGDLNPDNSDVDKLFIQLVQTYNQLFEENPINASGVDAKAILSARLSKSRRLENLIAQLPGEKKNGLFGNLIALSLGLTPNFKSNFDLAEDAKLQLSKDTYDDDLDNLLAQIGDQYADLFLAAKNLSDAILLSDILRVNTEITKAPLSASMIKRYDEHHQDLTLLKALVRQQLPEKYKEIFFDQSKNGYAGYIDGGASQEEFYKFIKPILEKMDGTEELLVKLNREDLLRKQRTFDNGSIPHQIHLGELHAILRRQEDFYPFLKDNREKIEKILTFRIPYYVGPLARGNSRFAWMTRKSEETITPWNFEEVVDKGASAQSFIERMTNFDKNLPNEKVLPKHSLLYEYFTVYNELTKVKYVTEGMRKPAFLSGEQKKAIVDLLFKTNRKVTVKQLKEDYFKKIECFDSVEISGVEDRFNASLGTYHDLLKIIKDKDFLDNEENEDILEDIVLTLTLFEDREMIEERLKTYAHLFDDKVMKQLKRRRYTGWGRLSRKLINGIRDKQSGKTILDFLKSDGFANRNFMQLIHDDSLTFKEDIQKAQVSGQGDSLHEHIANLAGSPAIKKGILQTVKVVDELVKVMGRHKPENIVIEMARENQTTQKGQKNSRERMKRIEEGIKELGSQILKEHPVENTQLQNEKLYLYYLQNGRDMYVDQELDINRLSDYDVDHIVPQSFLKDDSIDNKVLTRSDKARGKSDNVPSEEVVKKMKNYWRQLLNAKLITQRKFDNLTKAERGGLSELDKAGFIKRQLVETRQITKHVAQILDSRMNTKYDENDKLIREVKVITLKSKLVSDFRKDFQFYKVREINNYHHAHDAYLNAVVGTALIKKYPKLESEFVYGDYKVYDVRKMIAKSEQEIGKATAKYFFYSNIMNFFKTEITLANGEIRKRPLIETNGETGEIVWDKGRDFATVRKVLSMPQVNIVKKTEVQTGGFSKESILPKRNSDKLIARKKDWDPKKYGGFDSPTVAYSVLVVAKVEKGKSKKLKSVKELLGITIMERSSFEKNPIDFLEAKGYKEVKKDLIIKLPKYSLFELENGRKRMLASAGELQKGNELALPSKYVNFLYLASHYEKLKGSPEDNEQKQLFVEQHKHYLDEIIEQISEFSKRVILADANLDKVLSAYNKHRDKPIREQAENIIHLFTLTNLGAPAAFKYFDTTIDRKRYTSTKEVLDATLIHQSITGLYETRIDLSQLGGDGGGGGEAAAKGGSGGIPWLMKKPLQLTTLVPLQEYEERLLKQTMLTGSYKEKLQSLFLKYDALWQHWENQVGHRRIKPHHIATGTVNPRPQKQYPINPKAKASIQTVINDLLKQGVLIQQNSIMNTPVYPVPKPDGKWRMVLDYREVNKTIPLIAAQNQHSAGILSSIFRGKYKTTLDLSNGFWAHSITPESYWLTAFTWLGQQYCWTRLPQGFLNSPALFNADVVDLLKEVPNVQVYVDDIYISHDDPREHLEQLEKVFSLLLNAGYVVSLKKSEIAQHEVEFLGFNITKEGRGLTETFKQKLLNITPPRDLKQLQSILGKLNFARNFIPNFSELVKPLYNIIATAPGKYITWTTDNSQQLQNIISMLNSAENLEERNPEVRLIMKVNTSPSAGYIRFYNEFAKRPIMYLNYVYTKAEVKFTNTEKLLTTIHKGLIKALDLGMGQEILVYSPIVSMTKIQKTPLPERKALPIRWITWMSYLEDPRIQFHYDKTLPELQQVPTVTDDIIAKIKHPSEFSMVFYTDGSAIKHPNVNKSHNAGMGIAQVQFKPEFTVINTWSIPLGDHTAQLAEVAAVEFACKKALKIDGPVLIVTDSFYVAESVNKELPYWQSNGFFNNKKKPLKHVSKWKSIADCIQLKPDIIIIHEKGHQPTASTFHTEGNNLADKLATQGSYVVNAGKRTADGSEFEKRTADGSEFESPKKKAKVE

SEQ ID NO: 578 - protein, 2084 aa, synthetic construct
MPAAKRVKLDGGDKKYSIGLDIGTNSVGWAVITDEYKVPSKKFKVLGNTDRHSIKKNLIGALLFDSGETAEATRLKRTARRRYTRRKNRICYLQEIFSNEMAKVDDSFFHRLEESFLVEEDKKHERHPIFGNIVDEVAYHEKYPTIYHLRKKLVDSTDKADLRLIYLALAHMIKFRGHFLIEGDLNPDNSDVDKLFIQLVQTYNQLFEENPINASGVDAKAILSARLSKSRRLENLIAQLPGEKKNGLFGNLIALSLGLTPNFKSNFDLAEDAKLQLSKDTYDDDLDNLLAQIGDQYADLFLAAKNLSDAILLSDILRVNTEITKAPLSASMIKRYDEHHQDLTLLKALVRQQLPEKYKEIFFDQSKNGYAGYIDGGASQEEFYKFIKPILEKMDGTEELLVKLNREDLLRKQRTFDNGSIPHQIHLGELHAILRRQEDFYPFLKDNREKIEKILTFRIPYYVGPLARGNSRFAWMTRKSEETITPWNFEEVVDKGASAQSFIERMTNFDKNLPNEKVLPKHSLLYEYFTVYNELTKVKYVTEGMRKPAFLSGEQKKAIVDLLFKTNRKVTVKQLKEDYFKKIECFDSVEISGVEDRFNASLGTYHDLLKIIKDKDFLDNEENEDILEDIVLTLTLFEDREMIEERLKTYAHLFDDKVMKQLKRRRYTGWGRLSRKLINGIRDKQSGKTILDFLKSDGFANRNFMQLIHDDSLTFKEDIQKAQVSGQGDSLHEHIANLAGSPAIKKGILQTVKVVDELVKVMGRHKPENIVIEMARENQTTQKGQKNSRERMKRIEEGIKELGSQILKEHPVENTQLQNEKLYLYYLQNGRDMYVDQELDINRLSDYDVDHIVPQSFLKDDSIDNKVLTRSDKARGKSDNVPSEEVVKKMKNYWRQLLNAKLITQRKFDNLTKAERGGLSELDKAGFIKRQLVETRQITKHVAQILDSRMNTKYDENDKLIREVKVITLKSKLVSDFRKDFQFYKVREINNYHHAHDAYLNAVVGTALIKKYPKLESEFVYGDYKVYDVRKMIAKSEQEIGKATAKYFFYSNIMNFFKTEITLANGEIRKRPLIETNGETGEIVWDKGRDFATVRKVLSMPQVNIVKKTEVQTGGFSKESILPKRNSDKLIARKKDWDPKKYGGFDSPTVAYSVLVVAKVEKGKSKKLKSVKELLGITIMERSSFEKNPIDFLEAKGYKEVKKDLIIKLPKYSLFELENGRKRMLASAGELQKGNELALPSKYVNFLYLASHYEKLKGSPEDNEQKQLFVEQHKHYLDEIIEQISEFSKRVILADANLDKVLSAYNKHRDKPIREQAENIIHLFTLTNLGAPAAFKYFDTTIDRKRYTSTKEVLDATLIHQSITGLYETRIDLSQLGGDGGGGGGGGGGGGIPWLMKKPLQLTTLVPLQEYEERLLKQTMLTGSYKEKLQSLFLKYDALWQHWENQVGHRRIKPHHIATGTVNPRPQKQYPINPKAKASIQTVINDLLKQGVLIQQNSIMNTPVYPVPKPDGKWRMVLDYREVNKTIPLIAAQNQHSAGILSSIFRGKYKTTLDLSNGFWAHSITPESYWLTAFTWLGQQYCWTRLPQGFLNSPALFNADVVDLLKEVPNVQVYVDDIYISHDDPREHLEQLEKVFSLLLNAGYVVSLKKSEIAQHEVEFLGFNITKEGRGLTETFKQKLLNITPPRDLKQLQSILGKLNFARNFIPNFSELVKPLYNIIATAPGKYITWTTDNSQQLQNIISMLNSAENLEERNPEVRLIMKVNTSPSAGYIRFYNEFAKRPIMYLNYVYTKAEVKFTNTEKLLTTIHKGLIKALDLGMGQEILVYSPIVSMTKIQKTPLPERKALPIRWITWMSYLEDPRIQFHYDKTLPELQQVPTVTDDIIAKIKHPSEFSMVFYTDGSAIKHPNVNKSHNAGMGIAQVQFKPEFTVINTWSIPLGDHTAQLAEVAAVEFACKKALKIDGPVLIVTDSFYVAESVNKELPYWQSNGFFNNKKKPLKHVSKWKSIADCIQLKPDIIIIHEKGHQPTASTFHTEGNNLADKLATQGSYVVNAGKRTADGSEFEKRTADGSEFESPKKKAKVE

SEQ ID NO: 579 - protein, 2087 aa, synthetic construct
MPAAKRVKLDGGDKKYSIGLDIGTNSVGWAVITDEYKVPSKKFKVLGNTDRHSIKKNLIGALLFDSGETAEATRLKRTARRRYTRRKNRICYLQEIFSNEMAKVDDSFFHRLEESFLVEEDKKHERHPIFGNIVDEVAYHEKYPTIYHLRKKLVDSTDKADLRLIYLALAHMIKFRGHFLIEGDLNPDNSDVDKLFIQLVQTYNQLFEENPINASGVDAKAILSARLSKSRRLENLIAQLPGEKKNGLFGNLIALSLGLTPNFKSNFDLAEDAKLQLSKDTYDDDLDNLLAQIGDQYADLFLAAKNLSDAILLSDILRVNTEITKAPLSASMIKRYDEHHQDLTLLKALVRQQLPEKYKEIFFDQSKNGYAGYIDGGASQEEFYKFIKPILEKMDGTEELLVKLNREDLLRKQRTFDNGSIPHQIHLGELHAILRRQEDFYPFLKDNREKIEKILTFRIPYYVGPLARGNSRFAWMTRKSEETITPWNFEEVVDKGASAQSFIERMTNFDKNLPNEKVLPKHSLLYEYFTVYNELTKVKYVTEGMRKPAFLSGEQKKAIVDLLFKTNRKVTVKQLKEDYFKKIECFDSVEISGVEDRFNASLGTYHDLLKIIKDKDFLDNEENEDILEDIVLTLTLFEDREMIEERLKTYAHLFDDKVMKQLKRRRYTGWGRLSRKLINGIRDKQSGKTILDFLKSDGFANRNFMQLIHDDSLTFKEDIQKAQVSGQGDSLHEHIANLAGSPAIKKGILQTVKVVDELVKVMGRHKPENIVIEMARENQTTQKGQKNSRERMKRIEEGIKELGSQILKEHPVENTQLQNEKLYLYYLQNGRDMYVDQELDINRLSDYDVDHIVPQSFLKDDSIDNKVLTRSDKARGKSDNVPSEEVVKKMKNYWRQLLNAKLITQRKFDNLTKAERGGLSELDKAGFIKRQLVETRQITKHVAQILDSRMNTKYDENDKLIREVKVITLKSKLVSDFRKDFQFYKVREINNYHHAHDAYLNAVVGTALIKKYPKLESEFVYGDYKVYDVRKMIAKSEQEIGKATAKYFFYSNIMNFFKTEITLANGEIRKRPLIETNGETGEIVWDKGRDFATVRKVLSMPQVNIVKKTEVQTGGFSKESILPKRNSDKLIARKKDWDPKKYGGFDSPTVAYSVLVVAKVEKGKSKKLKSVKELLGITIMERSSFEKNPIDFLEAKGYKEVKKDLIIKLPKYSLFELENGRKRMLASAGELQKGNELALPSKYVNFLYLASHYEKLKGSPEDNEQKQLFVEQHKHYLDEIIEQISEFSKRVILADANLDKVLSAYNKHRDKPIREQAENIIHLFTLTNLGAPAAFKYFDTTIDRKRYTSTKEVLDATLIHQSITGLYETRIDLSQLGGDGGPAPGSSEAAAKGGIPWLMKKPLQLTTLVPLQEYEERLLKQTMLTGSYKEKLQSLFLKYDALWQHWENQVGHRRIKPHHIATGTVNPRPQKQYPINPKAKASIQTVINDLLKQGVLIQQNSIMNTPVYPVPKPDGKWRMVLDYREVNKTIPLIAAQNQHSAGILSSIFRGKYKTTLDLSNGFWAHSITPESYWLTAFTWLGQQYCWTRLPQGFLNSPALFNADVVDLLKEVPNVQVYVDDIYISHDDPREHLEQLEKVFSLLLNAGYVVSLKKSEIAQHEVEFLGFNITKEGRGLTETFKQKLLNITPPRDLKQLQSILGKLNFARNFIPNFSELVKPLYNIIATAPGKYITWTTDNSQQLQNIISMLNSAENLEERNPEVRLIMKVNTSPSAGYIRFYNEFAKRPIMYLNYVYTKAEVKFTNTEKLLTTIHKGLIKALDLGMGQEILVYSPIVSMTKIQKTPLPERKALPIRWITWMSYLEDPRIQFHYDKTLPELQQVPTVTDDIIAKIKHPSEFSMVFYTDGSAIKHPNVNKSHNAGMGIAQVQFKPEFTVINTWSIPLGDHTAQLAEVAAVEFACKKALKIDGPVLIVTDSFYVAESVNKELPYWQSNGFFNNKKKPLKHVSKWKSIADCIQLKPDIIIIHEKGHQPTASTFHTEGNNLADKLATQGSYVVNAGKRTADGSEFEKRTADGSEFESPKKKAKVE

SEQ ID NO: 580 - protein, 2087 aa, synthetic construct
MPAAKRVKLDGGDKKYSIGLDIGTNSVGWAVITDEYKVPSKKFKVLGNTDRHSIKKNLIGALLFDSGETAEATRLKRTARRRYTRRKNRICYLQEIFSNEMAKVDDSFFHRLEESFLVEEDKKHERHPIFGNIVDEVAYHEKYPTIYHLRKKLVDSTDKADLRLIYLALAHMIKFRGHFLIEGDLNPDNSDVDKLFIQLVQTYNQLFEENPINASGVDAKAILSARLSKSRRLENLIAQLPGEKKNGLFGNLIALSLGLTPNFKSNFDLAEDAKLQLSKDTYDDDLDNLLAQIGDQYADLFLAAKNLSDAILLSDILRVNTEITKAPLSASMIKRYDEHHQDLTLLKALVRQQLPEKYKEIFFDQSKNGYAGYIDGGASQEEFYKFIKPILEKMDGTEELLVKLNREDLLRKQRTFDNGSIPHQIHLGELHAILRRQEDFYPFLKDNREKIEKILTFRIPYYVGPLARGNSRFAWMTRKSEETITPWNFEEVVDKGASAQSFIERMTNFDKNLPNEKVLPKHSLLYEYFTVYNELTKVKYVTEGMRKPAFLSGEQKKAIVDLLFKTNRKVTVKQLKEDYFKKIECFDSVEISGVEDRFNASLGTYHDLLKIIKDKDFLDNEENEDILEDIVLTLTLFEDREMIEERLKTYAHLFDDKVMKQLKRRRYTGWGRLSRKLINGIRDKQSGKTILDFLKSDGFANRNFMQLIHDDSLTFKEDIQKAQVSGQGDSLHEHIANLAGSPAIKKGILQTVKVVDELVKVMGRHKPENIVIEMARENQTTQKGQKNSRERMKRIEEGIKELGSQILKEHPVENTQLQNEKLYLYYLQNGRDMYVDQELDINRLSDYDVDHIVPQSFLKDDSIDNKVLTRSDKARGKSDNVPSEEVVKKMKNYWRQLLNAKLITQRKFDNLTKAERGGLSELDKAGFIKRQLVETRQITKHVAQILDSRMNTKYDENDKLIREVKVITLKSKLVSDFRKDFQFYKVREINNYHHAHDAYLNAVVGTALIKKYPKLESEFVYGDYKVYDVRKMIAKSEQEIGKATAKYFFYSNIMNFFKTEITLANGEIRKRPLIETNGETGEIVWDKGRDFATVRKVLSMPQVNIVKKTEVQTGGFSKESILPKRNSDKLIARKKDWDPKKYGGFDSPTVAYSVLVVAKVEKGKSKKLKSVKELLGITIMERSSFEKNPIDFLEAKGYKEVKKDLIIKLPKYSLFELENGRKRMLASAGELQKGNELALPSKYVNFLYLASHYEKLKGSPEDNEQKQLFVEQHKHYLDEIIEQISEFSKRVILADANLDKVLSAYNKHRDKPIREQAENIIHLFTLTNLGAPAAFKYFDTTIDRKRYTSTKEVLDATLIHQSITGLYETRIDLSQLGGDGGGGSEAAAKPAPGGIPWLMKKPLQLTTLVPLQEYEERLLKQTMLTGSYKEKLQSLFLKYDALWQHWENQVGHRRIKPHHIATGTVNPRPQKQYPINPKAKASIQTVINDLLKQGVLIQQNSIMNTPVYPVPKPDGKWRMVLDYREVNKTIPLIAAQNQHSAGILSSIFRGKYKTTLDLSNGFWAHSITPESYWLTAFTWLGQQYCWTRLPQGFLNSPALFNADVVDLLKEVPNVQVYVDDIYISHDDPREHLEQLEKVFSLLLNAGYVVSLKKSEIAQHEVEFLGFNITKEGRGLTETFKQKLLNITPPRDLKQLQSILGKLNFARNFIPNFSELVKPLYNIIATAPGKYITWTTDNSQQLQNIISMLNSAENLEERNPEVRLIMKVNTSPSAGYIRFYNEFAKRPIMYLNYVYTKAEVKFTNTEKLLTTIHKGLIKALDLGMGQEILVYSPIVSMTKIQKTPLPERKALPIRWITWMSYLEDPRIQFHYDKTLPELQQVPTVTDDIIAKIKHPSEFSMVFYTDGSAIKHPNVNKSHNAGMGIAQVQFKPEFTVINTWSIPLGDHTAQLAEVAAVEFACKKALKIDGPVLIVTDSFYVAESVNKELPYWQSNGFFNNKKKPLKHVSKWKSIADCIQLKPDIIIIHEKGHQPTASTFHTEGNNLADKLATQGSYVVNAGKRTADGSEFEKRTADGSEFESPKKKAKVE

SEQ ID NO: 581 - protein, 2085 aa, synthetic construct
MPAAKRVKLDGGDKKYSIGLDIGTNSVGWAVITDEYKVPSKKFKVLGNTDRHSIKKNLIGALLFDSGETAEATRLKRTARRRYTRRKNRICYLQEIFSNEMAKVDDSFFHRLEESFLVEEDKKHERHPIFGNIVDEVAYHEKYPTIYHLRKKLVDSTDKADLRLIYLALAHMIKFRGHFLIEGDLNPDNSDVDKLFIQLVQTYNQLFEENPINASGVDAKAILSARLSKSRRLENLIAQLPGEKKNGLFGNLIALSLGLTPNFKSNFDLAEDAKLQLSKDTYDDDLDNLLAQIGDQYADLFLAAKNLSDAILLSDILRVNTEITKAPLSASMIKRYDEHHQDLTLLKALVRQQLPEKYKEIFFDQSKNGYAGYIDGGASQEEFYKFIKPILEKMDGTEELLVKLNREDLLRKQRTFDNGSIPHQIHLGELHAILRRQEDFYPFLKDNREKIEKILTFRIPYYVGPLARGNSRFAWMTRKSEETITPWNFEEVVDKGASAQSFIERMTNFDKNLPNEKVLPKHSLLYEYFTVYNELTKVKYVTEGMRKPAFLSGEQKKAIVDLLFKTNRKVTVKQLKEDYFKKIECFDSVEISGVEDRFNASLGTYHDLLKIIKDKDFLDNEENEDILEDIVLTLTLFEDREMIEERLKTYAHLFDDKVMKQLKRRRYTGWGRLSRKLINGIRDKQSGKTILDFLKSDGFANRNFMQLIHDDSLTFKEDIQKAQVSGQGDSLHEHIANLAGSPAIKKGILQTVKVVDELVKVMGRHKPENIVIEMARENQTTQKGQKNSRERMKRIEEGIKELGSQILKEHPVENTQLQNEKLYLYYLQNGRDMYVDQELDINRLSDYDVDHIVPQSFLKDDSIDNKVLTRSDKARGKSDNVPSEEVVKKMKNYWRQLLNAKLITQRKFDNLTKAERGGLSELDKAGFIKRQLVETRQITKHVAQILDSRMNTKYDENDKLIREVKVITLKSKLVSDFRKDFQFYKVREINNYHHAHDAYLNAVVGTALIKKYPKLESEFVYGDYKVYDVRKMIAKSEQEIGKATAKYFFYSNIMNFFKTEITLANGEIRKRPLIETNGETGEIVWDKGRDFATVRKVLSMPQVNIVKKTEVQTGGFSKESILPKRNSDKLIARKKDWDPKKYGGFDSPTVAYSVLVVAKVEKGKSKKLKSVKELLGITIMERSSFEKNPIDFLEAKGYKEVKKDLIIKLPKYSLFELENGRKRMLASAGELQKGNELALPSKYVNFLYLASHYEKLKGSPEDNEQKQLFVEQHKHYLDEIIEQISEFSKRVILADANLDKVLSAYNKHRDKPIREQAENIIHLFTLTNLGAPAAFKYFDTTIDRKRYTSTKEVLDATLIHQSITGLYETRIDLSQLGGDGGPAPGSSGGGGGIPWLMKKPLQLTTLVPLQEYEERLLKQTMLTGSYKEKLQSLFLKYDALWQHWENQVGHRRIKPHHIATGTVNPRPQKQYPINPKAKASIQTVINDLLKQGVLIQQNSIMNTPVYPVPKPDGKWRMVLDYREVNKTIPLIAAQNQHSAGILSSIFRGKYKTTLDLSNGFWAHSITPESYWLTAFTWLGQQYCWTRLPQGFLNSPALFNADVVDLLKEVPNVQVYVDDIYISHDDPREHLEQLEKVFSLLLNAGYVVSLKKSEIAQHEVEFLGFNITKEGRGLTETFKQKLLNITPPRDLKQLQSILGKLNFARNFIPNFSELVKPLYNIIATAPGKYITWTTDNSQQLQNIISMLNSAENLEERNPEVRLIMKVNTSPSAGYIRFYNEFAKRPIMYLNYVYTKAEVKFTNTEKLLTTIHKGLIKALDLGMGQEILVYSPIVSMTKIQKTPLPERKALPIRWITWMSYLEDPRIQFHYDKTLPELQQVPTVTDDIIAKIKHPSEFSMVFYTDGSAIKHPNVNKSHNAGMGIAQVQFKPEFTVINTWSIPLGDHTAQLAEVAAVEFACKKALKIDGPVLIVTDSFYVAESVNKELPYWQSNGFFNNKKKPLKHVSKWKSIADCIQLKPDIIIIHEKGHQPTASTFHTEGNNLADKLATQGSYVVNAGKRTADGSEFEKRTADGSEFESPKKKAKVE

SEQ ID NO: 582 - protein, 2087 aa, synthetic construct
MPAAKRVKLDGGDKKYSIGLDIGTNSVGWAVITDEYKVPSKKFKVLGNTDRHSIKKNLIGALLFDSGETAEATRLKRTARRRYTRRKNRICYLQEIFSNEMAKVDDSFFHRLEESFLVEEDKKHERHPIFGNIVDEVAYHEKYPTIYHLRKKLVDSTDKADLRLIYLALAHMIKFRGHFLIEGDLNPDNSDVDKLFIQLVQTYNQLFEENPINASGVDAKAILSARLSKSRRLENLIAQLPGEKKNGLFGNLIALSLGLTPNFKSNFDLAEDAKLQLSKDTYDDDLDNLLAQIGDQYADLFLAAKNLSDAILLSDILRVNTEITKAPLSASMIKRYDEHHQDLTLLKALVRQQLPEKYKEIFFDQSKNGYAGYIDGGASQEEFYKFIKPILEKMDGTEELLVKLNREDLLRKQRTFDNGSIPHQIHLGELHAILRRQEDFYPFLKDNREKIEKILTFRIPYYVGPLARGNSRFAWMTRKSEETITPWNFEEVVDKGASAQSFIERMTNFDKNLPNEKVLPKHSLLYEYFTVYNELTKVKYVTEGMRKPAFLSGEQKKAIVDLLFKTNRKVTVKQLKEDYFKKIECFDSVEISGVEDRFNASLGTYHDLLKIIKDKDFLDNEENEDILEDIVLTLTLFEDREMIEERLKTYAHLFDDKVMKQLKRRRYTGWGRLSRKLINGIRDKQSGKTILDFLKSDGFANRNFMQLIHDDSLTFKEDIQKAQVSGQGDSLHEHIANLAGSPAIKKGILQTVKVVDELVKVMGRHKPENIVIEMARENQTTQKGQKNSRERMKRIEEGIKELGSQILKEHPVENTQLQNEKLYLYYLQNGRDMYVDQELDINRLSDYDVDHIVPQSFLKDDSIDNKVLTRSDKARGKSDNVPSEEVVKKMKNYWRQLLNAKLITQRKFDNLTKAERGGLSELDKAGFIKRQLVETRQITKHVAQILDSRMNTKYDENDKLIREVKVITLKSKLVSDFRKDFQFYKVREINNYHHAHDAYLNAVVGTALIKKYPKLESEFVYGDYKVYDVRKMIAKSEQEIGKATAKYFFYSNIMNFFKTEITLANGEIRKRPLIETNGETGEIVWDKGRDFATVRKVLSMPQVNIVKKTEVQTGGFSKESILPKRNSDKLIARKKDWDPKKYGGFDSPTVAYSVLVVAKVEKGKSKKLKSVKELLGITIMERSSFEKNPIDFLEAKGYKEVKKDLIIKLPKYSLFELENGRKRMLASAGELQKGNELALPSKYVNFLYLASHYEKLKGSPEDNEQKQLFVEQHKHYLDEIIEQISEFSKRVILADANLDKVLSAYNKHRDKPIREQAENIIHLFTLTNLGAPAAFKYFDTTIDRKRYTSTKEVLDATLIHQSITGLYETRIDLSQLGGDGGGGGGSSEAAAKGGIPWLMKKPLQLTTLVPLQEYEERLLKQTMLTGSYKEKLQSLFLKYDALWQHWENQVGHRRIKPHHIATGTVNPRPQKQYPINPKAKASIQTVINDLLKQGVLIQQNSIMNTPVYPVPKPDGKWRMVLDYREVNKTIPLIAAQNQHSAGILSSIFRGKYKTTLDLSNGFWAHSITPESYWLTAFTWLGQQYCWTRLPQGFLNSPALFNADVVDLLKEVPNVQVYVDDIYISHDDPREHLEQLEKVFSLLLNAGYVVSLKKSEIAQHEVEFLGFNITKEGRGLTETFKQKLLNITPPRDLKQLQSILGKLNFARNFIPNFSELVKPLYNIIATAPGKYITWTTDNSQQLQNIISMLNSAENLEERNPEVRLIMKVNTSPSAGYIRFYNEFAKRPIMYLNYVYTKAEVKFTNTEKLLTTIHKGLIKALDLGMGQEILVYSPIVSMTKIQKTPLPERKALPIRWITWMSYLEDPRIQFHYDKTLPELQQVPTVTDDIIAKIKHPSEFSMVFYTDGSAIKHPNVNKSHNAGMGIAQVQFKPEFTVINTWSIPLGDHTAQLAEVAAVEFACKKALKIDGPVLIVTDSFYVAESVNKELPYWQSNGFFNNKKKPLKHVSKWKSIADCIQLKPDIIIIHEKGHQPTASTFHTEGNNLADKLATQGSYVVNAGKRTADGSEFEKRTADGSEFESPKKKAKVE

SEQ ID NO: 583 - protein, 2087 aa, synthetic construct
MPAAKRVKLDGGDKKYSIGLDIGTNSVGWAVITDEYKVPSKKFKVLGNTDRHSIKKNLIGALLFDSGETAEATRLKRTARRRYTRRKNRICYLQEIFSNEMAKVDDSFFHRLEESFLVEEDKKHERHPIFGNIVDEVAYHEKYPTIYHLRKKLVDSTDKADLRLIYLALAHMIKFRGHFLIEGDLNPDNSDVDKLFIQLVQTYNQLFEENPINASGVDAKAILSARLSKSRRLENLIAQLPGEKKNGLFGNLIALSLGLTPNFKSNFDLAEDAKLQLSKDTYDDDLDNLLAQIGDQYADLFLAAKNLSDAILLSDILRVNTEITKAPLSASMIKRYDEHHQDLTLLKALVRQQLPEKYKEIFFDQSKNGYAGYIDGGASQEEFYKFIKPILEKMDGTEELLVKLNREDLLRKQRTFDNGSIPHQIHLGELHAILRRQEDFYPFLKDNREKIEKILTFRIPYYVGPLARGNSRFAWMTRKSEETITPWNFEEVVDKGASAQSFIERMTNFDKNLPNEKVLPKHSLLYEYFTVYNELTKVKYVTEGMRKPAFLSGEQKKAIVDLLFKTNRKVTVKQLKEDYFKKIECFDSVEISGVEDRFNASLGTYHDLLKIIKDKDFLDNEENEDILEDIVLTLTLFEDREMIEERLKTYAHLFDDKVMKQLKRRRYTGWGRLSRKLINGIRDKQSGKTILDFLKSDGFANRNFMQLIHDDSLTFKEDIQKAQVSGQGDSLHEHIANLAGSPAIKKGILQTVKVVDELVKVMGRHKPENIVIEMARENQTTQKGQKNSRERMKRIEEGIKELGSQILKEHPVENTQLQNEKLYLYYLQNGRDMYVDQELDINRLSDYDVDHIVPQSFLKDDSIDNKVLTRSDKARGKSDNVPSEEVVKKMKNYWRQLLNAKLITQRKFDNLTKAERGGLSELDKAGFIKRQLVETRQITKHVAQILDSRMNTKYDENDKLIREVKVITLKSKLVSDFRKDFQFYKVREINNYHHAHDAYLNAVVGTALIKKYPKLESEFVYGDYKVYDVRKMIAKSEQEIGKATAKYFFYSNIMNFFKTEITLANGEIRKRPLIETNGETGEIVWDKGRDFATVRKVLSMPQVNIVKKTEVQTGGFSKESILPKRNSDKLIARKKDWDPKKYGGFDSPTVAYSVLVVAKVEKGKSKKLKSVKELLGITIMERSSFEKNPIDFLEAKGYKEVKKDLIIKLPKYSLFELENGRKRMLASAGELQKGNELALPSKYVNFLYLASHYEKLKGSPEDNEQKQLFVEQHKHYLDEIIEQISEFSKRVILADANLDKVLSAYNKHRDKPIREQAENIIHLFTLTNLGAPAAFKYFDTTIDRKRYTSTKEVLDATLIHQSITGLYETRIDLSQLGGDGGGGSGGGEAAAKGGIPWLMKKPLQLTTLVPLQEYEERLLKQTMLTGSYKEKLQSLFLKYDALWQHWENQVGHRRIKPHHIATGTVNPRPQKQYPINPKAKASIQTVINDLLKQGVLIQQNSIMNTPVYPVPKPDGKWRMVLDYREVNKTIPLIAAQNQHSAGILSSIFRGKYKTTLDLSNGFWAHSITPESYWLTAFTWLGQQYCWTRLPQGFLNSPALFNADVVDLLKEVPNVQVYVDDIYISHDDPREHLEQLEKVFSLLLNAGYVVSLKKSEIAQHEVEFLGFNITKEGRGLTETFKQKLLNITPPRDLKQLQSILGKLNFARNFIPNFSELVKPLYNIIATAPGKYITWTTDNSQQLQNIISMLNSAENLEERNPEVRLIMKVNTSPSAGYIRFYNEFAKRPIMYLNYVYTKAEVKFTNTEKLLTTIHKGLIKALDLGMGQEILVYSPIVSMTKIQKTPLPERKALPIRWITWMSYLEDPRIQFHYDKTLPELQQVPTVTDDIIAKIKHPSEFSMVFYTDGSAIKHPNVNKSHNAGMGIAQVQFKPEFTVINTWSIPLGDHTAQLAEVAAVEFACKKALKIDGPVLIVTDSFYVAESVNKELPYWQSNGFFNNKKKPLKHVSKWKSIADCIQLKPDIIIIHEKGHQPTASTFHTEGNNLADKLATQGSYVVNAGKRTADGSEFEKRTADGSEFESPKKKAKVE

SEQ ID NO: 584 - protein, 2085 aa, synthetic construct
MPAAKRVKLDGGDKKYSIGLDIGTNSVGWAVITDEYKVPSKKFKVLGNTDRHSIKKNLIGALLFDSGETAEATRLKRTARRRYTRRKNRICYLQEIFSNEMAKVDDSFFHRLEESFLVEEDKKHERHPIFGNIVDEVAYHEKYPTIYHLRKKLVDSTDKADLRLIYLALAHMIKFRGHFLIEGDLNPDNSDVDKLFIQLVQTYNQLFEENPINASGVDAKAILSARLSKSRRLENLIAQLPGEKKNGLFGNLIALSLGLTPNFKSNFDLAEDAKLQLSKDTYDDDLDNLLAQIGDQYADLFLAAKNLSDAILLSDILRVNTEITKAPLSASMIKRYDEHHQDLTLLKALVRQQLPEKYKEIFFDQSKNGYAGYIDGGASQEEFYKFIKPILEKMDGTEELLVKLNREDLLRKQRTFDNGSIPHQIHLGELHAILRRQEDFYPFLKDNREKIEKILTFRIPYYVGPLARGNSRFAWMTRKSEETITPWNFEEVVDKGASAQSFIERMTNFDKNLPNEKVLPKHSLLYEYFTVYNELTKVKYVTEGMRKPAFLSGEQKKAIVDLLFKTNRKVTVKQLKEDYFKKIECFDSVEISGVEDRFNASLGTYHDLLKIIKDKDFLDNEENEDILEDIVLTLTLFEDREMIEERLKTYAHLFDDKVMKQLKRRRYTGWGRLSRKLINGIRDKQSGKTILDFLKSDGFANRNFMQLIHDDSLTFKEDIQKAQVSGQGDSLHEHIANLAGSPAIKKGILQTVKVVDELVKVMGRHKPENIVIEMARENQTTQKGQKNSRERMKRIEEGIKELGSQILKEHPVENTQLQNEKLYLYYLQNGRDMYVDQELDINRLSDYDVDHIVPQSFLKDDSIDNKVLTRSDKARGKSDNVPSEEVVKKMKNYWRQLLNAKLITQRKFDNLTKAERGGLSELDKAGFIKRQLVETRQITKHVAQILDSRMNTKYDENDKLIREVKVITLKSKLVSDFRKDFQFYKVREINNYHHAHDAYLNAVVGTALIKKYPKLESEFVYGDYKVYDVRKMIAKSEQEIGKATAKYFFYSNIMNFFKTEITLANGEIRKRPLIETNGETGEIVWDKGRDFATVRKVLSMPQVNIVKKTEVQTGGFSKESILPKRNSDKLIARKKDWDPKKYGGFDSPTVAYSVLVVAKVEKGKSKKLKSVKELLGITIMERSSFEKNPIDFLEAKGYKEVKKDLIIKLPKYSLFELENGRKRMLASAGELQKGNELALPSKYVNFLYLASHYEKLKGSPEDNEQKQLFVEQHKHYLDEIIEQISEFSKRVILADANLDKVLSAYNKHRDKPIREQAENIIHLFTLTNLGAPAAFKYFDTTIDRKRYTSTKEVLDATLIHQSITGLYETRIDLSQLGGDGGGSSGGSPAPGGIPWLMKKPLQLTTLVPLQEYEERLLKQTMLTGSYKEKLQSLFLKYDALWQHWENQVGHRRIKPHHIATGTVNPRPQKQYPINPKAKASIQTVINDLLKQGVLIQQNSIMNTPVYPVPKPDGKWRMVLDYREVNKTIPLIAAQNQHSAGILSSIFRGKYKTTLDLSNGFWAHSITPESYWLTAFTWLGQQYCWTRLPQGFLNSPALFNADVVDLLKEVPNVQVYVDDIYISHDDPREHLEQLEKVFSLLLNAGYVVSLKKSEIAQHEVEFLGFNITKEGRGLTETFKQKLLNITPPRDLKQLQSILGKLNFARNFIPNFSELVKPLYNIIATAPGKYITWTTDNSQQLQNIISMLNSAENLEERNPEVRLIMKVNTSPSAGYIRFYNEFAKRPIMYLNYVYTKAEVKFTNTEKLLTTIHKGLIKALDLGMGQEILVYSPIVSMTKIQKTPLPERKALPIRWITWMSYLEDPRIQFHYDKTLPELQQVPTVTDDIIAKIKHPSEFSMVFYTDGSAIKHPNVNKSHNAGMGIAQVQFKPEFTVINTWSIPLGDHTAQLAEVAAVEFACKKALKIDGPVLIVTDSFYVAESVNKELPYWQSNGFFNNKKKPLKHVSKWKSIADCIQLKPDIIIIHEKGHQPTASTFHTEGNNLADKLATQGSYVVNAGKRTADGSEFEKRTADGSEFESPKKKAKVE

SEQ ID NO: 585 - protein, 2109 aa, synthetic construct
MPAAKRVKLDGGDKKYSIGLDIGTNSVGWAVITDEYKVPSKKFKVLGNTDRHSIKKNLIGALLFDSGETAEATRLKRTARRRYTRRKNRICYLQEIFSNEMAKVDDSFFHRLEESFLVEEDKKHERHPIFGNIVDEVAYHEKYPTIYHLRKKLVDSTDKADLRLIYLALAHMIKFRGHFLIEGDLNPDNSDVDKLFIQLVQTYNQLFEENPINASGVDAKAILSARLSKSRRLENLIAQLPGEKKNGLFGNLIALSLGLTPNFKSNFDLAEDAKLQLSKDTYDDDLDNLLAQIGDQYADLFLAAKNLSDAILLSDILRVNTEITKAPLSASMIKRYDEHHQDLTLLKALVRQQLPEKYKEIFFDQSKNGYAGYIDGGASQEEFYKFIKPILEKMDGTEELLVKLNREDLLRKQRTFDNGSIPHQIHLGELHAILRRQEDFYPFLKDNREKIEKILTFRIPYYVGPLARGNSRFAWMTRKSEETITPWNFEEVVDKGASAQSFIERMTNFDKNLPNEKVLPKHSLLYEYFTVYNELTKVKYVTEGMRKPAFLSGEQKKAIVDLLFKTNRKVTVKQLKEDYFKKIECFDSVEISGVEDRFNASLGTYHDLLKIIKDKDFLDNEENEDILEDIVLTLTLFEDREMIEERLKTYAHLFDDKVMKQLKRRRYTGWGRLSRKLINGIRDKQSGKTILDFLKSDGFANRNFMQLIHDDSLTFKEDIQKAQVSGQGDSLHEHIANLAGSPAIKKGILQTVKVVDELVKVMGRHKPENIVIEMARENQTTQKGQKNSRERMKRIEEGIKELGSQILKEHPVENTQLQNEKLYLYYLQNGRDMYVDQELDINRLSDYDVDHIVPQSFLKDDSIDNKVLTRSDKARGKSDNVPSEEVVKKMKNYWRQLLNAKLITQRKFDNLTKAERGGLSELDKAGFIKRQLVETRQITKHVAQILDSRMNTKYDENDKLIREVKVITLKSKLVSDFRKDFQFYKVREINNYHHAHDAYLNAVVGTALIKKYPKLESEFVYGDYKVYDVRKMIAKSEQEIGKATAKYFFYSNIMNFFKTEITLANGEIRKRPLIETNGETGEIVWDKGRDFATVRKVLSMPQVNIVKKTEVQTGGFSKESILPKRNSDKLIARKKDWDPKKYGGFDSPTVAYSVLVVAKVEKGKSKKLKSVKELLGITIMERSSFEKNPIDFLEAKGYKEVKKDLIIKLPKYSLFELENGRKRMLASAGELQKGNELALPSKYVNFLYLASHYEKLKGSPEDNEQKQLFVEQHKHYLDEIIEQISEFSKRVILADANLDKVLSAYNKHRDKPIREQAENIIHLFTLTNLGAPAAFKYFDTTIDRKRYTSTKEVLDATLIHQSITGLYETRIDLSQLGGDGGSGGSSGGSSGSETPGTSESATPESSGGSSGGSSGGIPWLMKKPLQLTTLVPLQEYEERLLKQTMLTGSYKEKLQSLFLKYDALWQHWENQVGHRRIKPHHIATGTVNPRPQKQYPINPKAKASIQTVINDLLKQGVLIQQNSIMNTPVYPVPKPDGKWRMVLDYREVNKTIPLIAAQNQHSAGILSSIFRGKYKTTLDLSNGFWAHSITPESYWLTAFTWLGQQYCWTRLPQGFLNSPALFNADVVDLLKEVPNVQVYVDDIYISHDDPREHLEQLEKVFSLLLNAGYVVSLKKSEIAQHEVEFLGFNITKEGRGLTETFKQKLLNITPPRDLKQLQSILGKLNFARNFIPNFSELVKPLYNIIATAPGKYITWTTDNSQQLQNIISMLNSAENLEERNPEVRLIMKVNTSPSAGYIRFYNEFAKRPIMYLNYVYTKAEVKFTNTEKLLTTIHKGLIKALDLGMGQEILVYSPIVSMTKIQKTPLPERKALPIRWITWMSYLEDPRIQFHYDKTLPELQQVPTVTDDIIAKIKHPSEFSMVFYTDGSAIKHPNVNKSHNAGMGIAQVQFKPEFTVINTWSIPLGDHTAQLAEVAAVEFACKKALKIDGPVLIVTDSFYVAESVNKELPYWQSNGFFNNKKKPLKHVSKWKSIADCIQLKPDIIIIHEKGHQPTASTFHTEGNNLADKLATQGSYVVNAGKRTADGSEFEKRTADGSEFESPKKKAKVE

SEQ ID NO: 586 - protein, 2088 aa, synthetic construct
MPAAKRVKLDGGDKKYSIGLDIGTNSVGWAVITDEYKVPSKKFKVLGNTDRHSIKKNLIGALLFDSGETAEATRLKRTARRRYTRRKNRICYLQEIFSNEMAKVDDSFFHRLEESFLVEEDKKHERHPIFGNIVDEVAYHEKYPTIYHLRKKLVDSTDKADLRLIYLALAHMIKFRGHFLIEGDLNPDNSDVDKLFIQLVQTYNQLFEENPINASGVDAKAILSARLSKSRRLENLIAQLPGEKKNGLFGNLIALSLGLTPNFKSNFDLAEDAKLQLSKDTYDDDLDNLLAQIGDQYADLFLAAKNLSDAILLSDILRVNTEITKAPLSASMIKRYDEHHQDLTLLKALVRQQLPEKYKEIFFDQSKNGYAGYIDGGASQEEFYKFIKPILEKMDGTEELLVKLNREDLLRKQRTFDNGSIPHQIHLGELHAILRRQEDFYPFLKDNREKIEKILTFRIPYYVGPLARGNSRFAWMTRKSEETITPWNFEEVVDKGASAQSFIERMTNFDKNLPNEKVLPKHSLLYEYFTVYNELTKVKYVTEGMRKPAFLSGEQKKAIVDLLFKTNRKVTVKQLKEDYFKKIECFDSVEISGVEDRFNASLGTYHDLLKIIKDKDFLDNEENEDILEDIVLTLTLFEDREMIEERLKTYAHLFDDKVMKQLKRRRYTGWGRLSRKLINGIRDKQSGKTILDFLKSDGFANRNFMQLIHDDSLTFKEDIQKAQVSGQGDSLHEHIANLAGSPAIKKGILQTVKVVDELVKVMGRHKPENIVIEMARENQTTQKGQKNSRERMKRIEEGIKELGSQILKEHPVENTQLQNEKLYLYYLQNGRDMYVDQELDINRLSDYDVDHIVPQSFLKDDSIDNKVLTRSDKARGKSDNVPSEEVVKKMKNYWRQLLNAKLITQRKFDNLTKAERGGLSELDKAGFIKRQLVETRQITKHVAQILDSRMNTKYDENDKLIREVKVITLKSKLVSDFRKDFQFYKVREINNYHHAHDAYLNAVVGTALIKKYPKLESEFVYGDYKVYDVRKMIAKSEQEIGKATAKYFFYSNIMNFFKTEITLANGEIRKRPLIETNGETGEIVWDKGRDFATVRKVLSMPQVNIVKKTEVQTGGFSKESILPKRNSDKLIARKKDWDPKKYGGFDSPTVAYSVLVVAKVEKGKSKKLKSVKELLGITIMERSSFEKNPIDFLEAKGYKEVKKDLIIKLPKYSLFELENGRKRMLASAGELQKGNELALPSKYVNFLYLASHYEKLKGSPEDNEQKQLFVEQHKHYLDEIIEQISEFSKRVILADANLDKVLSAYNKHRDKPIREQAENIIHLFTLTNLGAPAAFKYFDTTIDRKRYTSTKEVLDATLIHQSITGLYETRIDLSQLGGDGGGSSGSSGSSGSSGGIPWLMKKPLQLTTLVPLQEYEERLLKQTMLTGSYKEKLQSLFLKYDALWQHWENQVGHRRIKPHHIATGTVNPRPQKQYPINPKAKASIQTVINDLLKQGVLIQQNSIMNTPVYPVPKPDGKWRMVLDYREVNKTIPLIAAQNQHSAGILSSIFRGKYKTTLDLSNGFWAHSITPESYWLTAFTWLGQQYCWTRLPQGFLNSPALFNADVVDLLKEVPNVQVYVDDIYISHDDPREHLEQLEKVFSLLLNAGYVVSLKKSEIAQHEVEFLGFNITKEGRGLTETFKQKLLNITPPRDLKQLQSILGKLNFARNFIPNFSELVKPLYNIIATAPGKYITWTTDNSQQLQNIISMLNSAENLEERNPEVRLIMKVNTSPSAGYIRFYNEFAKRPIMYLNYVYTKAEVKFTNTEKLLTTIHKGLIKALDLGMGQEILVYSPIVSMTKIQKTPLPERKALPIRWITWMSYLEDPRIQFHYDKTLPELQQVPTVTDDIIAKIKHPSEFSMVFYTDGSAIKHPNVNKSHNAGMGIAQVQFKPEFTVINTWSIPLGDHTAQLAEVAAVEFACKKALKIDGPVLIVTDSFYVAESVNKELPYWQSNGFFNNKKKPLKHVSKWKSIADCIQLKPDIIIIHEKGHQPTASTFHTEGNNLADKLATQGSYVVNAGKRTADGSEFEKRTADGSEFESPKKKAKVE

SEQ ID NO: 587 - protein, 2085 aa, synthetic construct
MPAAKRVKLDGGDKKYSIGLDIGTNSVGWAVITDEYKVPSKKFKVLGNTDRHSIKKNLIGALLFDSGETAEATRLKRTARRRYTRRKNRICYLQEIFSNEMAKVDDSFFHRLEESFLVEEDKKHERHPIFGNIVDEVAYHEKYPTIYHLRKKLVDSTDKADLRLIYLALAHMIKFRGHFLIEGDLNPDNSDVDKLFIQLVQTYNQLFEENPINASGVDAKAILSARLSKSRRLENLIAQLPGEKKNGLFGNLIALSLGLTPNFKSNFDLAEDAKLQLSKDTYDDDLDNLLAQIGDQYADLFLAAKNLSDAILLSDILRVNTEITKAPLSASMIKRYDEHHQDLTLLKALVRQQLPEKYKEIFFDQSKNGYAGYIDGGASQEEFYKFIKPILEKMDGTEELLVKLNREDLLRKQRTFDNGSIPHQIHLGELHAILRRQEDFYPFLKDNREKIEKILTFRIPYYVGPLARGNSRFAWMTRKSEETITPWNFEEVVDKGASAQSFIERMTNFDKNLPNEKVLPKHSLLYEYFTVYNELTKVKYVTEGMRKPAFLSGEQKKAIVDLLFKTNRKVTVKQLKEDYFKKIECFDSVEISGVEDRFNASLGTYHDLLKIIKDKDFLDNEENEDILEDIVLTLTLFEDREMIEERLKTYAHLFDDKVMKQLKRRRYTGWGRLSRKLINGIRDKQSGKTILDFLKSDGFANRNFMQLIHDDSLTFKEDIQKAQVSGQGDSLHEHIANLAGSPAIKKGILQTVKVVDELVKVMGRHKPENIVIEMARENQTTQKGQKNSRERMKRIEEGIKELGSQILKEHPVENTQLQNEKLYLYYLQNGRDMYVDQELDINRLSDYDVDHIVPQSFLKDDSIDNKVLTRSDKARGKSDNVPSEEVVKKMKNYWRQLLNAKLITQRKFDNLTKAERGGLSELDKAGFIKRQLVETRQITKHVAQILDSRMNTKYDENDKLIREVKVITLKSKLVSDFRKDFQFYKVREINNYHHAHDAYLNAVVGTALIKKYPKLESEFVYGDYKVYDVRKMIAKSEQEIGKATAKYFFYSNIMNFFKTEITLANGEIRKRPLIETNGETGEIVWDKGRDFATVRKVLSMPQVNIVKKTEVQTGGFSKESILPKRNSDKLIARKKDWDPKKYGGFDSPTVAYSVLVVAKVEKGKSKKLKSVKELLGITIMERSSFEKNPIDFLEAKGYKEVKKDLIIKLPKYSLFELENGRKRMLASAGELQKGNELALPSKYVNFLYLASHYEKLKGSPEDNEQKQLFVEQHKHYLDEIIEQISEFSKRVILADANLDKVLSAYNKHRDKPIREQAENIIHLFTLTNLGAPAAFKYFDTTIDRKRYTSTKEVLDATLIHQSITGLYETRIDLSQLGGDGGGSSGGSGGGGGIPWLMKKPLQLTTLVPLQEYEERLLKQTMLTGSYKEKLQSLFLKYDALWQHWENQVGHRRIKPHHIATGTVNPRPQKQYPINPKAKASIQTVINDLLKQGVLIQQNSIMNTPVYPVPKPDGKWRMVLDYREVNKTIPLIAAQNQHSAGILSSIFRGKYKTTLDLSNGFWAHSITPESYWLTAFTWLGQQYCWTRLPQGFLNSPALFNADVVDLLKEVPNVQVYVDDIYISHDDPREHLEQLEKVFSLLLNAGYVVSLKKSEIAQHEVEFLGFNITKEGRGLTETFKQKLLNITPPRDLKQLQSILGKLNFARNFIPNFSELVKPLYNIIATAPGKYITWTTDNSQQLQNIISMLNSAENLEERNPEVRLIMKVNTSPSAGYIRFYNEFAKRPIMYLNYVYTKAEVKFTNTEKLLTTIHKGLIKALDLGMGQEILVYSPIVSMTKIQKTPLPERKALPIRWITWMSYLEDPRIQFHYDKTLPELQQVPTVTDDIIAKIKHPSEFSMVFYTDGSAIKHPNVNKSHNAGMGIAQVQFKPEFTVINTWSIPLGDHTAQLAEVAAVEFACKKALKIDGPVLIVTDSFYVAESVNKELPYWQSNGFFNNKKKPLKHVSKWKSIADCIQLKPDIIIIHEKGHQPTASTFHTEGNNLADKLATQGSYVVNAGKRTADGSEFEKRTADGSEFESPKKKAKVE

SEQ ID NO: 588 - protein, 2084 aa, synthetic construct
MPAAKRVKLDGGDKKYSIGLDIGTNSVGWAVITDEYKVPSKKFKVLGNTDRHSIKKNLIGALLFDSGETAEATRLKRTARRRYTRRKNRICYLQEIFSNEMAKVDDSFFHRLEESFLVEEDKKHERHPIFGNIVDEVAYHEKYPTIYHLRKKLVDSTDKADLRLIYLALAHMIKFRGHFLIEGDLNPDNSDVDKLFIQLVQTYNQLFEENPINASGVDAKAILSARLSKSRRLENLIAQLPGEKKNGLFGNLIALSLGLTPNFKSNFDLAEDAKLQLSKDTYDDDLDNLLAQIGDQYADLFLAAKNLSDAILLSDILRVNTEITKAPLSASMIKRYDEHHQDLTLLKALVRQQLPEKYKEIFFDQSKNGYAGYIDGGASQEEFYKFIKPILEKMDGTEELLVKLNREDLLRKQRTFDNGSIPHQIHLGELHAILRRQEDFYPFLKDNREKIEKILTFRIPYYVGPLARGNSRFAWMTRKSEETITPWNFEEVVDKGASAQSFIERMTNFDKNLPNEKVLPKHSLLYEYFTVYNELTKVKYVTEGMRKPAFLSGEQKKAIVDLLFKTNRKVTVKQLKEDYFKKIECFDSVEISGVEDRFNASLGTYHDLLKIIKDKDFLDNEENEDILEDIVLTLTLFEDREMIEERLKTYAHLFDDKVMKQLKRRRYTGWGRLSRKLINGIRDKQSGKTILDFLKSDGFANRNFMQLIHDDSLTFKEDIQKAQVSGQGDSLHEHIANLAGSPAIKKGILQTVKVVDELVKVMGRHKPENIVIEMARENQTTQKGQKNSRERMKRIEEGIKELGSQILKEHPVENTQLQNEKLYLYYLQNGRDMYVDQELDINRLSDYDVDHIVPQSFLKDDSIDNKVLTRSDKARGKSDNVPSEEVVKKMKNYWRQLLNAKLITQRKFDNLTKAERGGLSELDKAGFIKRQLVETRQITKHVAQILDSRMNTKYDENDKLIREVKVITLKSKLVSDFRKDFQFYKVREINNYHHAHDAYLNAVVGTALIKKYPKLESEFVYGDYKVYDVRKMIAKSEQEIGKATAKYFFYSNIMNFFKTEITLANGEIRKRPLIETNGETGEIVWDKGRDFATVRKVLSMPQVNIVKKTEVQTGGFSKESILPKRNSDKLIARKKDWDPKKYGGFDSPTVAYSVLVVAKVEKGKSKKLKSVKELLGITIMERSSFEKNPIDFLEAKGYKEVKKDLIIKLPKYSLFELENGRKRMLASAGELQKGNELALPSKYVNFLYLASHYEKLKGSPEDNEQKQLFVEQHKHYLDEIIEQISEFSKRVILADANLDKVLSAYNKHRDKPIREQAENIIHLFTLTNLGAPAAFKYFDTTIDRKRYTSTKEVLDATLIHQSITGLYETRIDLSQLGGDGGGGGEAAAKGGIPWLMKKPLQLTTLVPLQEYEERLLKQTMLTGSYKEKLQSLFLKYDALWQHWENQVGHRRIKPHHIATGTVNPRPQKQYPINPKAKASIQTVINDLLKQGVLIQQNSIMNTPVYPVPKPDGKWRMVLDYREVNKTIPLIAAQNQHSAGILSSIFRGKYKTTLDLSNGFWAHSITPESYWLTAFTWLGQQYCWTRLPQGFLNSPALFNADVVDLLKEVPNVQVYVDDIYISHDDPREHLEQLEKVFSLLLNAGYVVSLKKSEIAQHEVEFLGFNITKEGRGLTETFKQKLLNITPPRDLKQLQSILGKLNFARNFIPNFSELVKPLYNIIATAPGKYITWTTDNSQQLQNIISMLNSAENLEERNPEVRLIMKVNTSPSAGYIRFYNEFAKRPIMYLNYVYTKAEVKFTNTEKLLTTIHKGLIKALDLGMGQEILVYSPIVSMTKIQKTPLPERKALPIRWITWMSYLEDPRIQFHYDKTLPELQQVPTVTDDIIAKIKHPSEFSMVFYTDGSAIKHPNVNKSHNAGMGIAQVQFKPEFTVINTWSIPLGDHTAQLAEVAAVEFACKKALKIDGPVLIVTDSFYVAESVNKELPYWQSNGFFNNKKKPLKHVSKWKSIADCIQLKPDIIIIHEKGHQPTASTFHTEGNNLADKLATQGSYVVNAGKRTADGSEFEKRTADGSEFESPKKKAKVE

SEQ ID NO: 589 - protein, 2085 aa, synthetic construct
MPAAKRVKLDGGDKKYSIGLDIGTNSVGWAVITDEYKVPSKKFKVLGNTDRHSIKKNLIGALLFDSGETAEATRLKRTARRRYTRRKNRICYLQEIFSNEMAKVDDSFFHRLEESFLVEEDKKHERHPIFGNIVDEVAYHEKYPTIYHLRKKLVDSTDKADLRLIYLALAHMIKFRGHFLIEGDLNPDNSDVDKLFIQLVQTYNQLFEENPINASGVDAKAILSARLSKSRRLENLIAQLPGEKKNGLFGNLIALSLGLTPNFKSNFDLAEDAKLQLSKDTYDDDLDNLLAQIGDQYADLFLAAKNLSDAILLSDILRVNTEITKAPLSASMIKRYDEHHQDLTLLKALVRQQLPEKYKEIFFDQSKNGYAGYIDGGASQEEFYKFIKPILEKMDGTEELLVKLNREDLLRKQRTFDNGSIPHQIHLGELHAILRRQEDFYPFLKDNREKIEKILTFRIPYYVGPLARGNSRFAWMTRKSEETITPWNFEEVVDKGASAQSFIERMTNFDKNLPNEKVLPKHSLLYEYFTVYNELTKVKYVTEGMRKPAFLSGEQKKAIVDLLFKTNRKVTVKQLKEDYFKKIECFDSVEISGVEDRFNASLGTYHDLLKIIKDKDFLDNEENEDILEDIVLTLTLFEDREMIEERLKTYAHLFDDKVMKQLKRRRYTGWGRLSRKLINGIRDKQSGKTILDFLKSDGFANRNFMQLIHDDSLTFKEDIQKAQVSGQGDSLHEHIANLAGSPAIKKGILQTVKVVDELVKVMGRHKPENIVIEMARENQTTQKGQKNSRERMKRIEEGIKELGSQILKEHPVENTQLQNEKLYLYYLQNGRDMYVDQELDINRLSDYDVDHIVPQSFLKDDSIDNKVLTRSDKARGKSDNVPSEEVVKKMKNYWRQLLNAKLITQRKFDNLTKAERGGLSELDKAGFIKRQLVETRQITKHVAQILDSRMNTKYDENDKLIREVKVITLKSKLVSDFRKDFQFYKVREINNYHHAHDAYLNAVVGTALIKKYPKLESEFVYGDYKVYDVRKMIAKSEQEIGKATAKYFFYSNIMNFFKTEITLANGEIRKRPLIETNGETGEIVWDKGRDFATVRKVLSMPQVNIVKKTEVQTGGFSKESILPKRNSDKLIARKKDWDPKKYGGFDSPTVAYSVLVVAKVEKGKSKKLKSVKELLGITIMERSSFEKNPIDFLEAKGYKEVKKDLIIKLPKYSLFELENGRKRMLASAGELQKGNELALPSKYVNFLYLASHYEKLKGSPEDNEQKQLFVEQHKHYLDEIIEQISEFSKRVILADANLDKVLSAYNKHRDKPIREQAENIIHLFTLTNLGAPAAFKYFDTTIDRKRYTSTKEVLDATLIHQSITGLYETRIDLSQLGGDGGGGSGSSPAPGGIPWLMKKPLQLTTLVPLQEYEERLLKQTMLTGSYKEKLQSLFLKYDALWQHWENQVGHRRIKPHHIATGTVNPRPQKQYPINPKAKASIQTVINDLLKQGVLIQQNSIMNTPVYPVPKPDGKWRMVLDYREVNKTIPLIAAQNQHSAGILSSIFRGKYKTTLDLSNGFWAHSITPESYWLTAFTWLGQQYCWTRLPQGFLNSPALFNADVVDLLKEVPNVQVYVDDIYISHDDPREHLEQLEKVFSLLLNAGYVVSLKKSEIAQHEVEFLGFNITKEGRGLTETFKQKLLNITPPRDLKQLQSILGKLNFARNFIPNFSELVKPLYNIIATAPGKYITWTTDNSQQLQNIISMLNSAENLEERNPEVRLIMKVNTSPSAGYIRFYNEFAKRPIMYLNYVYTKAEVKFTNTEKLLTTIHKGLIKALDLGMGQEILVYSPIVSMTKIQKTPLPERKALPIRWITWMSYLEDPRIQFHYDKTLPELQQVPTVTDDIIAKIKHPSEFSMVFYTDGSAIKHPNVNKSHNAGMGIAQVQFKPEFTVINTWSIPLGDHTAQLAEVAAVEFACKKALKIDGPVLIVTDSFYVAESVNKELPYWQSNGFFNNKKKPLKHVSKWKSIADCIQLKPDIIIIHEKGHQPTASTFHTEGNNLADKLATQGSYVVNAGKRTADGSEFEKRTADGSEFESPKKKAKVE

SEQ ID NO: 590 - protein, 2195 aa, synthetic construct
MPAAKRVKLDGGDKKYSIGLDIGTNSVGWAVITDEYKVPSKKFKVLGNTDRHSIKKNLIGALLFDSGETAEATRLKRTARRRYTRRKNRICYLQEIFSNEMAKVDDSFFHRLEESFLVEEDKKHERHPIFGNIVDEVAYHEKYPTIYHLRKKLVDSTDKADLRLIYLALAHMIKFRGHFLIEGDLNPDNSDVDKLFIQLVQTYNQLFEENPINASGVDAKAILSARLSKSRRLENLIAQLPGEKKNGLFGNLIALSLGLTPNFKSNFDLAEDAKLQLSKDTYDDDLDNLLAQIGDQYADLFLAAKNLSDAILLSDILRVNTEITKAPLSASMIKRYDEHHQDLTLLKALVRQQLPEKYKEIFFDQSKNGYAGYIDGGASQEEFYKFIKPILEKMDGTEELLVKLNREDLLRKQRTFDNGSIPHQIHLGELHAILRRQEDFYPFLKDNREKIEKILTFRIPYYVGPLARGNSRFAWMTRKSEETITPWNFEEVVDKGASAQSFIERMTNFDKNLPNEKVLPKHSLLYEYFTVYNELTKVKYVTEGMRKPAFLSGEQKKAIVDLLFKTNRKVTVKQLKEDYFKKIECFDSVEISGVEDRFNASLGTYHDLLKIIKDKDFLDNEENEDILEDIVLTLTLFEDREMIEERLKTYAHLFDDKVMKQLKRRRYTGWGRLSRKLINGIRDKQSGKTILDFLKSDGFANRNFMQLIHDDSLTFKEDIQKAQVSGQGDSLHEHIANLAGSPAIKKGILQTVKVVDELVKVMGRHKPENIVIEMARENQTTQKGQKNSRERMKRIEEGIKELGSQILKEHPVENTQLQNEKLYLYYLQNGRDMYVDQELDINRLSDYDVDHIVPQSFLKDDSIDNKVLTRSDKARGKSDNVPSEEVVKKMKNYWRQLLNAKLITQRKFDNLTKAERGGLSELDKAGFIKRQLVETRQITKHVAQILDSRMNTKYDENDKLIREVKVITLKSKLVSDFRKDFQFYKVREINNYHHAHDAYLNAVVGTALIKKYPKLESEFVYGDYKVYDVRKMIAKSEQEIGKATAKYFFYSNIMNFFKTEITLANGEIRKRPLIETNGETGEIVWDKGRDFATVRKVLSMPQVNIVKKTEVQTGGFSKESILPKRNSDKLIARKKDWDPKKYGGFDSPTVAYSVLVVAKVEKGKSKKLKSVKELLGITIMERSSFEKNPIDFLEAKGYKEVKKDLIIKLPKYSLFELENGRKRMLASAGELQKGNELALPSKYVNFLYLASHYEKLKGSPEDNEQKQLFVEQHKHYLDEIIEQISEFSKRVILADANLDKVLSAYNKHRDKPIREQAENIIHLFTLTNLGAPAAFKYFDTTIDRKRYTSTKEVLDATLIHQSITGLYETRIDLSQLGGDGGEAAAKEAAAKEAAAKEAAAKEAAAKEAAAKGGMDPLQLLQPLEAEIKGTKLKAHWNSGATITCVPQAFLEEEVPIKNIWIKTIHGEKEQPVYYLTFKIQGRKVEAEVISSPYDYILVSPSDIPWLMKKPLQLTTLVPLQEYEERLLKQTMLTGSYKEKLQSLFLKYDALWQHWENQVGHRRIKPHHIATGTVNPRPQKQYPINPKAKASIQTVINDLLKQGVLIQQNSIMNTPVYPVPKPDGKWRMVLDYREVNKTIPLIAAQNQHSAGILSSIFRGKYKTTLDLSNGFWAHSITPESYWLTAFTWLGQQYCWTRLPQGFLNSPALFNADVVDLLKEVPNVQVYVDDIYISHDDPREHLEQLEKVFSLLLNAGYVVSLKKSEIAQHEVEFLGFNITKEGRGLTETFKQKLLNITPPRDLKQLQSILGLLNFARNFIPNFSELVKPLYNIIATAPGKYITWTTDNSQQLQNIISMLNSAENLEERNPEVRLIMKVNTSPSAGYIRFYNEFAKRPIMYLNYVYTKAEVKFTNTEKLLTTIHKGLIKALDLGMGQEILVYSPIVSMTKIQKTPLPERKALPIRWITWMSYLEDPRIQFHYDKTLPELQQVPTVTDDIIAKIKHPSEFSMVFYTDGSAIKHPNVNKSHNAGMGIAQVQFKPEFTVINTWSIPLGDHTAQLAEVAAVEFACKKALKIDGPVLIVTDSFYVAESVNKELPYWQSNGFFNNKKKPLKHVSKWKSIADCIQLKPDIIIIHEKGHQPTASTFHTEGNNLADKLATQGSYVVNAGKRTADGSEFEKRTADGSEFESPKKKAKVE

SEQ ID NO: 591 - protein, 2211 aa, synthetic construct
MPAAKRVKLDGGDKKYSIGLDIGTNSVGWAVITDEYKVPSKKFKVLGNTDRHSIKKNLIGALLFDSGETAEATRLKRTARRRYTRRKNRICYLQEIFSNEMAKVDDSFFHRLEESFLVEEDKKHERHPIFGNIVDEVAYHEKYPTIYHLRKKLVDSTDKADLRLIYLALAHMIKFRGHFLIEGDLNPDNSDVDKLFIQLVQTYNQLFEENPINASGVDAKAILSARLSKSRRLENLIAQLPGEKKNGLFGNLIALSLGLTPNFKSNFDLAEDAKLQLSKDTYDDDLDNLLAQIGDQYADLFLAAKNLSDAILLSDILRVNTEITKAPLSASMIKRYDEHHQDLTLLKALVRQQLPEKYKEIFFDQSKNGYAGYIDGGASQEEFYKFIKPILEKMDGTEELLVKLNREDLLRKQRTFDNGSIPHQIHLGELHAILRRQEDFYPFLKDNREKIEKILTFRIPYYVGPLARGNSRFAWMTRKSEETITPWNFEEVVDKGASAQSFIERMTNFDKNLPNEKVLPKHSLLYEYFTVYNELTKVKYVTEGMRKPAFLSGEQKKAIVDLLFKTNRKVTVKQLKEDYFKKIECFDSVEISGVEDRFNASLGTYHDLLKIIKDKDFLDNEENEDILEDIVLTLTLFEDREMIEERLKTYAHLFDDKVMKQLKRRRYTGWGRLSRKLINGIRDKQSGKTILDFLKSDGFANRNFMQLIHDDSLTFKEDIQKAQVSGQGDSLHEHIANLAGSPAIKKGILQTVKVVDELVKVMGRHKPENIVIEMARENQTTQKGQKNSRERMKRIEEGIKELGSQILKEHPVENTQLQNEKLYLYYLQNGRDMYVDQELDINRLSDYDVDHIVPQSFLKDDSIDNKVLTRSDKARGKSDNVPSEEVVKKMKNYWRQLLNAKLITQRKFDNLTKAERGGLSELDKAGFIKRQLVETRQITKHVAQILDSRMNTKYDENDKLIREVKVITLKSKLVSDFRKDFQFYKVREINNYHHAHDAYLNAVVGTALIKKYPKLESEFVYGDYKVYDVRKMIAKSEQEIGKATAKYFFYSNIMNFFKTEITLANGEIRKRPLIETNGETGEIVWDKGRDFATVRKVLSMPQVNIVKKTEVQTGGFSKESILPKRNSDKLIARKKDWDPKKYGGFDSPTVAYSVLVVAKVEKGKSKKLKSVKELLGITIMERSSFEKNPIDFLEAKGYKEVKKDLIIKLPKYSLFELENGRKRMLASAGELQKGNELALPSKYVNFLYLASHYEKLKGSPEDNEQKQLFVEQHKHYLDEIIEQISEFSKRVILADANLDKVLSAYNKHRDKPIREQAENIIHLFTLTNLGAPAAFKYFDTTIDRKRYTSTKEVLDATLIHQSITGLYETRIDLSQLGGDGGAEAAAKEAAAKEAAAKEAAAKALEAEAAAKEAAAKEAAAKEAAAKAGGMDPLQLLQPLEAEIKGTKLKAHWNSGATITCVPQAFLEEEVPIKNIWIKTIHGEKEQPVYYLTFKIQGRKVEAEVISSPYDYILVSPSDIPWLMKKPLQLTTLVPLQEYEERLLKQTMLTGSYKEKLQSLFLKYDALWQHWENQVGHRRIKPHHIATGTVNPRPQKQYPINPKAKASIQTVINDLLKQGVLIQQNSIMNTPVYPVPKPDGKWRMVLDYREVNKTIPLIAAQNQHSAGILSSIFRGKYKTTLDLSNGFWAHSITPESYWLTAFTWLGQQYCWTRLPQGFLNSPALFNADVVDLLKEVPNVQVYVDDIYISHDDPREHLEQLEKVFSLLLNAGYVVSLKKSEIAQHEVEFLGFNITKEGRGLTETFKQKLLNITPPRDLKQLQSILGLLNFARNFIPNFSELVKPLYNIIATAPGKYITWTTDNSQQLQNIISMLNSAENLEERNPEVRLIMKVNTSPSAGYIRFYNEFAKRPIMYLNYVYTKAEVKFTNTEKLLTTIHKGLIKALDLGMGQEILVYSPIVSMTKIQKTPLPERKALPIRWITWMSYLEDPRIQFHYDKTLPELQQVPTVTDDIIAKIKHPSEFSMVFYTDGSAIKHPNVNKSHNAGMGIAQVQFKPEFTVINTWSIPLGDHTAQLAEVAAVEFACKKALKIDGPVLIVTDSFYVAESVNKELPYWQSNGFFNNKKKPLKHVSKWKSIADCIQLKPDIIIIHEKGHQPTASTFHTEGNNLADKLATQGSYVVNAGKRTADGSEFEKRTADGSEFESPKKKAKVE

SEQ ID NO: 592 - protein, 2195 aa, synthetic construct
MPAAKRVKLDGGDKKYSIGLDIGTNSVGWAVITDEYKVPSKKFKVLGNTDRHSIKKNLIGALLFDSGETAEATRLKRTARRRYTRRKNRICYLQEIFSNEMAKVDDSFFHRLEESFLVEEDKKHERHPIFGNIVDEVAYHEKYPTIYHLRKKLVDSTDKADLRLIYLALAHMIKFRGHFLIEGDLNPDNSDVDKLFIQLVQTYNQLFEENPINASGVDAKAILSARLSKSRRLENLIAQLPGEKKNGLFGNLIALSLGLTPNFKSNFDLAEDAKLQLSKDTYDDDLDNLLAQIGDQYADLFLAAKNLSDAILLSDILRVNTEITKAPLSASMIKRYDEHHQDLTLLKALVRQQLPEKYKEIFFDQSKNGYAGYIDGGASQEEFYKFIKPILEKMDGTEELLVKLNREDLLRKQRTFDNGSIPHQIHLGELHAILRRQEDFYPFLKDNREKIEKILTFRIPYYVGPLARGNSRFAWMTRKSEETITPWNFEEVVDKGASAQSFIERMTNFDKNLPNEKVLPKHSLLYEYFTVYNELTKVKYVTEGMRKPAFLSGEQKKAIVDLLFKTNRKVTVKQLKEDYFKKIECFDSVEISGVEDRFNASLGTYHDLLKIIKDKDFLDNEENEDILEDIVLTLTLFEDREMIEERLKTYAHLFDDKVMKQLKRRRYTGWGRLSRKLINGIRDKQSGKTILDFLKSDGFANRNFMQLIHDDSLTFKEDIQKAQVSGQGDSLHEHIANLAGSPAIKKGILQTVKVVDELVKVMGRHKPENIVIEMARENQTTQKGQKNSRERMKRIEEGIKELGSQILKEHPVENTQLQNEKLYLYYLQNGRDMYVDQELDINRLSDYDVDHIVPQSFLKDDSIDNKVLTRSDKARGKSDNVPSEEVVKKMKNYWRQLLNAKLITQRKFDNLTKAERGGLSELDKAGFIKRQLVETRQITKHVAQILDSRMNTKYDENDKLIREVKVITLKSKLVSDFRKDFQFYKVREINNYHHAHDAYLNAVVGTALIKKYPKLESEFVYGDYKVYDVRKMIAKSEQEIGKATAKYFFYSNIMNFFKTEITLANGEIRKRPLIETNGETGEIVWDKGRDFATVRKVLSMPQVNIVKKTEVQTGGFSKESILPKRNSDKLIARKKDWDPKKYGGFDSPTVAYSVLVVAKVEKGKSKKLKSVKELLGITIMERSSFEKNPIDFLEAKGYKEVKKDLIIKLPKYSLFELENGRKRMLASAGELQKGNELALPSKYVNFLYLASHYEKLKGSPEDNEQKQLFVEQHKHYLDEIIEQISEFSKRVILADANLDKVLSAYNKHRDKPIREQAENIIHLFTLTNLGAPAAFKYFDTTIDRKRYTSTKEVLDATLIHQSITGLYETRIDLSQLGGDGGGGGGSGGGGSGGGGSGGGGSGGGGSGGGGSGGMDPLQLLQPLEAEIKGTKLKAHWNSGATITCVPQAFLEEEVPIKNIWIKTIHGEKEQPVYYLTFKIQGRKVEAEVISSPYDYILVSPSDIPWLMKKPLQLTTLVPLQEYEERLLKQTMLTGSYKEKLQSLFLKYDALWQHWENQVGHRRIKPHHIATGTVNPRPQKQYPINPKAKASIQTVINDLLKQGVLIQQNSIMNTPVYPVPKPDGKWRMVLDYREVNKTIPLIAAQNQHSAGILSSIFRGKYKTTLDLSNGFWAHSITPESYWLTAFTWLGQQYCWTRLPQGFLNSPALFNADVVDLLKEVPNVQVYVDDIYISHDDPREHLEQLEKVFSLLLNAGYVVSLKKSEIAQHEVEFLGFNITKEGRGLTETFKQKLLNITPPRDLKQLQSILGLLNFARNFIPNFSELVKPLYNIIATAPGKYITWTTDNSQQLQNIISMLNSAENLEERNPEVRLIMKVNTSPSAGYIRFYNEFAKRPIMYLNYVYTKAEVKFTNTEKLLTTIHKGLIKALDLGMGQEILVYSPIVSMTKIQKTPLPERKALPIRWITWMSYLEDPRIQFHYDKTLPELQQVPTVTDDIIAKIKHPSEFSMVFYTDGSAIKHPNVNKSHNAGMGIAQVQFKPEFTVINTWSIPLGDHTAQLAEVAAVEFACKKALKIDGPVLIVTDSFYVAESVNKELPYWQSNGFFNNKKKPLKHVSKWKSIADCIQLKPDIIIIHEKGHQPTASTFHTEGNNLADKLATQGSYVVNAGKRTADGSEFEKRTADGSEFESPKKKAKVE

SEQ ID NO: 593 - protein, 2190 aa, synthetic construct
MPAAKRVKLDGGDKKYSIGLDIGTNSVGWAVITDEYKVPSKKFKVLGNTDRHSIKKNLIGALLFDSGETAEATRLKRTARRRYTRRKNRICYLQEIFSNEMAKVDDSFFHRLEESFLVEEDKKHERHPIFGNIVDEVAYHEKYPTIYHLRKKLVDSTDKADLRLIYLALAHMIKFRGHFLIEGDLNPDNSDVDKLFIQLVQTYNQLFEENPINASGVDAKAILSARLSKSRRLENLIAQLPGEKKNGLFGNLIALSLGLTPNFKSNFDLAEDAKLQLSKDTYDDDLDNLLAQIGDQYADLFLAAKNLSDAILLSDILRVNTEITKAPLSASMIKRYDEHHQDLTLLKALVRQQLPEKYKEIFFDQSKNGYAGYIDGGASQEEFYKFIKPILEKMDGTEELLVKLNREDLLRKQRTFDNGSIPHQIHLGELHAILRRQEDFYPFLKDNREKIEKILTFRIPYYVGPLARGNSRFAWMTRKSEETITPWNFEEVVDKGASAQSFIERMTNFDKNLPNEKVLPKHSLLYEYFTVYNELTKVKYVTEGMRKPAFLSGEQKKAIVDLLFKTNRKVTVKQLKEDYFKKIECFDSVEISGVEDRFNASLGTYHDLLKIIKDKDFLDNEENEDILEDIVLTLTLFEDREMIEERLKTYAHLFDDKVMKQLKRRRYTGWGRLSRKLINGIRDKQSGKTILDFLKSDGFANRNFMQLIHDDSLTFKEDIQKAQVSGQGDSLHEHIANLAGSPAIKKGILQTVKVVDELVKVMGRHKPENIVIEMARENQTTQKGQKNSRERMKRIEEGIKELGSQILKEHPVENTQLQNEKLYLYYLQNGRDMYVDQELDINRLSDYDVDHIVPQSFLKDDSIDNKVLTRSDKARGKSDNVPSEEVVKKMKNYWRQLLNAKLITQRKFDNLTKAERGGLSELDKAGFIKRQLVETRQITKHVAQILDSRMNTKYDENDKLIREVKVITLKSKLVSDFRKDFQFYKVREINNYHHAHDAYLNAVVGTALIKKYPKLESEFVYGDYKVYDVRKMIAKSEQEIGKATAKYFFYSNIMNFFKTEITLANGEIRKRPLIETNGETGEIVWDKGRDFATVRKVLSMPQVNIVKKTEVQTGGFSKESILPKRNSDKLIARKKDWDPKKYGGFDSPTVAYSVLVVAKVEKGKSKKLKSVKELLGITIMERSSFEKNPIDFLEAKGYKEVKKDLIIKLPKYSLFELENGRKRMLASAGELQKGNELALPSKYVNFLYLASHYEKLKGSPEDNEQKQLFVEQHKHYLDEIIEQISEFSKRVILADANLDKVLSAYNKHRDKPIREQAENIIHLFTLTNLGAPAAFKYFDTTIDRKRYTSTKEVLDATLIHQSITGLYETRIDLSQLGGDGGEAAAKEAAAKEAAAKEAAAKEAAAKGGMDPLQLLQPLEAEIKGTKLKAHWNSGATITCVPQAFLEEEVPIKNIWIKTIHGEKEQPVYYLTFKIQGRKVEAEVISSPYDYILVSPSDIPWLMKKPLQLTTLVPLQEYEERLLKQTMLTGSYKEKLQSLFLKYDALWQHWENQVGHRRIKPHHIATGTVNPRPQKQYPINPKAKASIQTVINDLLKQGVLIQQNSIMNTPVYPVPKPDGKWRMVLDYREVNKTIPLIAAQNQHSAGILSSIFRGKYKTTLDLSNGFWAHSITPESYWLTAFTWLGQQYCWTRLPQGFLNSPALFNADVVDLLKEVPNVQVYVDDIYISHDDPREHLEQLEKVFSLLLNAGYVVSLKKSEIAQHEVEFLGFNITKEGRGLTETFKQKLLNITPPRDLKQLQSILGLLNFARNFIPNFSELVKPLYNIIATAPGKYITWTTDNSQQLQNIISMLNSAENLEERNPEVRLIMKVNTSPSAGYIRFYNEFAKRPIMYLNYVYTKAEVKFTNTEKLLTTIHKGLIKALDLGMGQEILVYSPIVSMTKIQKTPLPERKALPIRWITWMSYLEDPRIQFHYDKTLPELQQVPTVTDDIIAKIKHPSEFSMVFYTDGSAIKHPNVNKSHNAGMGIAQVQFKPEFTVINTWSIPLGDHTAQLAEVAAVEFACKKALKIDGPVLIVTDSFYVAESVNKELPYWQSNGFFNNKKKPLKHVSKWKSIADCIQLKPDIIIIHEKGHQPTASTFHTEGNNLADKLATQGSYVVNAGKRTADGSEFEKRTADGSEFESPKKKAKVE

SEQ ID NO: 594 - protein, 2174 aa, synthetic construct
MPAAKRVKLDGGDKKYSIGLDIGTNSVGWAVITDEYKVPSKKFKVLGNTDRHSIKKNLIGALLFDSGETAEATRLKRTARRRYTRRKNRICYLQEIFSNEMAKVDDSFFHRLEESFLVEEDKKHERHPIFGNIVDEVAYHEKYPTIYHLRKKLVDSTDKADLRLIYLALAHMIKFRGHFLIEGDLNPDNSDVDKLFIQLVQTYNQLFEENPINASGVDAKAILSARLSKSRRLENLIAQLPGEKKNGLFGNLIALSLGLTPNFKSNFDLAEDAKLQLSKDTYDDDLDNLLAQIGDQYADLFLAAKNLSDAILLSDILRVNTEITKAPLSASMIKRYDEHHQDLTLLKALVRQQLPEKYKEIFFDQSKNGYAGYIDGGASQEEFYKFIKPILEKMDGTEELLVKLNREDLLRKQRTFDNGSIPHQIHLGELHAILRRQEDFYPFLKDNREKIEKILTFRIPYYVGPLARGNSRFAWMTRKSEETITPWNFEEVVDKGASAQSFIERMTNFDKNLPNEKVLPKHSLLYEYFTVYNELTKVKYVTEGMRKPAFLSGEQKKAIVDLLFKTNRKVTVKQLKEDYFKKIECFDSVEISGVEDRFNASLGTYHDLLKIIKDKDFLDNEENEDILEDIVLTLTLFEDREMIEERLKTYAHLFDDKVMKQLKRRRYTGWGRLSRKLINGIRDKQSGKTILDFLKSDGFANRNFMQLIHDDSLTFKEDIQKAQVSGQGDSLHEHIANLAGSPAIKKGILQTVKVVDELVKVMGRHKPENIVIEMARENQTTQKGQKNSRERMKRIEEGIKELGSQILKEHPVENTQLQNEKLYLYYLQNGRDMYVDQELDINRLSDYDVDHIVPQSFLKDDSIDNKVLTRSDKARGKSDNVPSEEVVKKMKNYWRQLLNAKLITQRKFDNLTKAERGGLSELDKAGFIKRQLVETRQITKHVAQILDSRMNTKYDENDKLIREVKVITLKSKLVSDFRKDFQFYKVREINNYHHAHDAYLNAVVGTALIKKYPKLESEFVYGDYKVYDVRKMIAKSEQEIGKATAKYFFYSNIMNFFKTEITLANGEIRKRPLIETNGETGEIVWDKGRDFATVRKVLSMPQVNIVKKTEVQTGGFSKESILPKRNSDKLIARKKDWDPKKYGGFDSPTVAYSVLVVAKVEKGKSKKLKSVKELLGITIMERSSFEKNPIDFLEAKGYKEVKKDLIIKLPKYSLFELENGRKRMLASAGELQKGNELALPSKYVNFLYLASHYEKLKGSPEDNEQKQLFVEQHKHYLDEIIEQISEFSKRVILADANLDKVLSAYNKHRDKPIREQAENIIHLFTLTNLGAPAAFKYFDTTIDRKRYTSTKEVLDATLIHQSITGLYETRIDLSQLGGDGGGGGPAPGGSGGMDPLQLLQPLEAEIKGTKLKAHWNSGATITCVPQAFLEEEVPIKNIWIKTIHGEKEQPVYYLTFKIQGRKVEAEVISSPYDYILVSPSDIPWLMKKPLQLTTLVPLQEYEERLLKQTMLTGSYKEKLQSLFLKYDALWQHWENQVGHRRIKPHHIATGTVNPRPQKQYPINPKAKASIQTVINDLLKQGVLIQQNSIMNTPVYPVPKPDGKWRMVLDYREVNKTIPLIAAQNQHSAGILSSIFRGKYKTTLDLSNGFWAHSITPESYWLTAFTWLGQQYCWTRLPQGFLNSPALFNADVVDLLKEVPNVQVYVDDIYISHDDPREHLEQLEKVFSLLLNAGYVVSLKKSEIAQHEVEFLGFNITKEGRGLTETFKQKLLNITPPRDLKQLQSILGLLNFARNFIPNFSELVKPLYNIIATAPGKYITWTTDNSQQLQNIISMLNSAENLEERNPEVRLIMKVNTSPSAGYIRFYNEFAKRPIMYLNYVYTKAEVKFTNTEKLLTTIHKGLIKALDLGMGQEILVYSPIVSMTKIQKTPLPERKALPIRWITWMSYLEDPRIQFHYDKTLPELQQVPTVTDDIIAKIKHPSEFSMVFYTDGSAIKHPNVNKSHNAGMGIAQVQFKPEFTVINTWSIPLGDHTAQLAEVAAVEFACKKALKIDGPVLIVTDSFYVAESVNKELPYWQSNGFFNNKKKPLKHVSKWKSIADCIQLKPDIIIIHEKGHQPTASTFHTEGNNLADKLATQGSYVVNAGKRTADGSEFEKRTADGSEFESPKKKAKVE

SEQ ID NO: 595 - protein, 2176 aa, synthetic construct
MPAAKRVKLDGGDKKYSIGLDIGTNSVGWAVITDEYKVPSKKFKVLGNTDRHSIKKNLIGALLFDSGETAEATRLKRTARRRYTRRKNRICYLQEIFSNEMAKVDDSFFHRLEESFLVEEDKKHERHPIFGNIVDEVAYHEKYPTIYHLRKKLVDSTDKADLRLIYLALAHMIKFRGHFLIEGDLNPDNSDVDKLFIQLVQTYNQLFEENPINASGVDAKAILSARLSKSRRLENLIAQLPGEKKNGLFGNLIALSLGLTPNFKSNFDLAEDAKLQLSKDTYDDDLDNLLAQIGDQYADLFLAAKNLSDAILLSDILRVNTEITKAPLSASMIKRYDEHHQDLTLLKALVRQQLPEKYKEIFFDQSKNGYAGYIDGGASQEEFYKFIKPILEKMDGTEELLVKLNREDLLRKQRTFDNGSIPHQIHLGELHAILRRQEDFYPFLKDNREKIEKILTFRIPYYVGPLARGNSRFAWMTRKSEETITPWNFEEVVDKGASAQSFIERMTNFDKNLPNEKVLPKHSLLYEYFTVYNELTKVKYVTEGMRKPAFLSGEQKKAIVDLLFKTNRKVTVKQLKEDYFKKIECFDSVEISGVEDRFNASLGTYHDLLKIIKDKDFLDNEENEDILEDIVLTLTLFEDREMIEERLKTYAHLFDDKVMKQLKRRRYTGWGRLSRKLINGIRDKQSGKTILDFLKSDGFANRNFMQLIHDDSLTFKEDIQKAQVSGQGDSLHEHIANLAGSPAIKKGILQTVKVVDELVKVMGRHKPENIVIEMARENQTTQKGQKNSRERMKRIEEGIKELGSQILKEHPVENTQLQNEKLYLYYLQNGRDMYVDQELDINRLSDYDVDHIVPQSFLKDDSIDNKVLTRSDKARGKSDNVPSEEVVKKMKNYWRQLLNAKLITQRKFDNLTKAERGGLSELDKAGFIKRQLVETRQITKHVAQILDSRMNTKYDENDKLIREVKVITLKSKLVSDFRKDFQFYKVREINNYHHAHDAYLNAVVGTALIKKYPKLESEFVYGDYKVYDVRKMIAKSEQEIGKATAKYFFYSNIMNFFKTEITLANGEIRKRPLIETNGETGEIVWDKGRDFATVRKVLSMPQVNIVKKTEVQTGGFSKESILPKRNSDKLIARKKDWDPKKYGGFDSPTVAYSVLVVAKVEKGKSKKLKSVKELLGITIMERSSFEKNPIDFLEAKGYKEVKKDLIIKLPKYSLFELENGRKRMLASAGELQKGNELALPSKYVNFLYLASHYEKLKGSPEDNEQKQLFVEQHKHYLDEIIEQISEFSKRVILADANLDKVLSAYNKHRDKPIREQAENIIHLFTLTNLGAPAAFKYFDTTIDRKRYTSTKEVLDATLIHQSITGLYETRIDLSQLGGDGGGGSEAAAKPAPGGMDPLQLLQPLEAEIKGTKLKAHWNSGATITCVPQAFLEEEVPIKNIWIKTIHGEKEQPVYYLTFKIQGRKVEAEVISSPYDYILVSPSDIPWLMKKPLQLTTLVPLQEYEERLLKQTMLTGSYKEKLQSLFLKYDALWQHWENQVGHRRIKPHHIATGTVNPRPQKQYPINPKAKASIQTVINDLLKQGVLIQQNSIMNTPVYPVPKPDGKWRMVLDYREVNKTIPLIAAQNQHSAGILSSIFRGKYKTTLDLSNGFWAHSITPESYWLTAFTWLGQQYCWTRLPQGFLNSPALFNADVVDLLKEVPNVQVYVDDIYISHDDPREHLEQLEKVFSLLLNAGYVVSLKKSEIAQHEVEFLGFNITKEGRGLTETFKQKLLNITPPRDLKQLQSILGLLNFARNFIPNFSELVKPLYNIIATAPGKYITWTTDNSQQLQNIISMLNSAENLEERNPEVRLIMKVNTSPSAGYIRFYNEFAKRPIMYLNYVYTKAEVKFTNTEKLLTTIHKGLIKALDLGMGQEILVYSPIVSMTKIQKTPLPERKALPIRWITWMSYLEDPRIQFHYDKTLPELQQVPTVTDDIIAKIKHPSEFSMVFYTDGSAIKHPNVNKSHNAGMGIAQVQFKPEFTVINTWSIPLGDHTAQLAEVAAVEFACKKALKIDGPVLIVTDSFYVAESVNKELPYWQSNGFFNNKKKPLKHVSKWKSIADCIQLKPDIIIIHEKGHQPTASTFHTEGNNLADKLATQGSYVVNAGKRTADGSEFEKRTADGSEFESPKKKAKVE

SEQ ID NO: 596 - protein, 2180 aa, synthetic construct
MPAAKRVKLDGGDKKYSIGLDIGTNSVGWAVITDEYKVPSKKFKVLGNTDRHSIKKNLIGALLFDSGETAEATRLKRTARRRYTRRKNRICYLQEIFSNEMAKVDDSFFHRLEESFLVEEDKKHERHPIFGNIVDEVAYHEKYPTIYHLRKKLVDSTDKADLRLIYLALAHMIKFRGHFLIEGDLNPDNSDVDKLFIQLVQTYNQLFEENPINASGVDAKAILSARLSKSRRLENLIAQLPGEKKNGLFGNLIALSLGLTPNFKSNFDLAEDAKLQLSKDTYDDDLDNLLAQIGDQYADLFLAAKNLSDAILLSDILRVNTEITKAPLSASMIKRYDEHHQDLTLLKALVRQQLPEKYKEIFFDQSKNGYAGYIDGGASQEEFYKFIKPILEKMDGTEELLVKLNREDLLRKQRTFDNGSIPHQIHLGELHAILRRQEDFYPFLKDNREKIEKILTFRIPYYVGPLARGNSRFAWMTRKSEETITPWNFEEVVDKGASAQSFIERMTNFDKNLPNEKVLPKHSLLYEYFTVYNELTKVKYVTEGMRKPAFLSGEQKKAIVDLLFKTNRKVTVKQLKEDYFKKIECFDSVEISGVEDRFNASLGTYHDLLKIIKDKDFLDNEENEDILEDIVLTLTLFEDREMIEERLKTYAHLFDDKVMKQLKRRRYTGWGRLSRKLINGIRDKQSGKTILDFLKSDGFANRNFMQLIHDDSLTFKEDIQKAQVSGQGDSLHEHIANLAGSPAIKKGILQTVKVVDELVKVMGRHKPENIVIEMARENQTTQKGQKNSRERMKRIEEGIKELGSQILKEHPVENTQLQNEKLYLYYLQNGRDMYVDQELDINRLSDYDVDHIVPQSFLKDDSIDNKVLTRSDKARGKSDNVPSEEVVKKMKNYWRQLLNAKLITQRKFDNLTKAERGGLSELDKAGFIKRQLVETRQITKHVAQILDSRMNTKYDENDKLIREVKVITLKSKLVSDFRKDFQFYKVREINNYHHAHDAYLNAVVGTALIKKYPKLESEFVYGDYKVYDVRKMIAKSEQEIGKATAKYFFYSNIMNFFKTEITLANGEIRKRPLIETNGETGEIVWDKGRDFATVRKVLSMPQVNIVKKTEVQTGGFSKESILPKRNSDKLIARKKDWDPKKYGGFDSPTVAYSVLVVAKVEKGKSKKLKSVKELLGITIMERSSFEKNPIDFLEAKGYKEVKKDLIIKLPKYSLFELENGRKRMLASAGELQKGNELALPSKYVNFLYLASHYEKLKGSPEDNEQKQLFVEQHKHYLDEIIEQISEFSKRVILADANLDKVLSAYNKHRDKPIREQAENIIHLFTLTNLGAPAAFKYFDTTIDRKRYTSTKEVLDATLIHQSITGLYETRIDLSQLGGDGGEAAAKGGGGSEAAAKGGMDPLQLLQPLEAEIKGTKLKAHWNSGATITCVPQAFLEEEVPIKNIWIKTIHGEKEQPVYYLTFKIQGRKVEAEVISSPYDYILVSPSDIPWLMKKPLQLTTLVPLQEYEERLLKQTMLTGSYKEKLQSLFLKYDALWQHWENQVGHRRIKPHHIATGTVNPRPQKQYPINPKAKASIQTVINDLLKQGVLIQQNSIMNTPVYPVPKPDGKWRMVLDYREVNKTIPLIAAQNQHSAGILSSIFRGKYKTTLDLSNGFWAHSITPESYWLTAFTWLGQQYCWTRLPQGFLNSPALFNADVVDLLKEVPNVQVYVDDIYISHDDPREHLEQLEKVFSLLLNAGYVVSLKKSEIAQHEVEFLGFNITKEGRGLTETFKQKLLNITPPRDLKQLQSILGLLNFARNFIPNFSELVKPLYNIIATAPGKYITWTTDNSQQLQNIISMLNSAENLEERNPEVRLIMKVNTSPSAGYIRFYNEFAKRPIMYLNYVYTKAEVKFTNTEKLLTTIHKGLIKALDLGMGQEILVYSPIVSMTKIQKTPLPERKALPIRWITWMSYLEDPRIQFHYDKTLPELQQVPTVTDDIIAKIKHPSEFSMVFYTDGSAIKHPNVNKSHNAGMGIAQVQFKPEFTVINTWSIPLGDHTAQLAEVAAVEFACKKALKIDGPVLIVTDSFYVAESVNKELPYWQSNGFFNNKKKPLKHVSKWKSIADCIQLKPDIIIIHEKGHQPTASTFHTEGNNLADKLATQGSYVVNAGKRTADGSEFEKRTADGSEFESPKKKAKVE

SEQ ID NO: 597 - protein, 2175 aa, synthetic construct
MPAAKRVKLDGGDKKYSIGLDIGTNSVGWAVITDEYKVPSKKFKVLGNTDRHSIKKNLIGALLFDSGETAEATRLKRTARRRYTRRKNRICYLQEIFSNEMAKVDDSFFHRLEESFLVEEDKKHERHPIFGNIVDEVAYHEKYPTIYHLRKKLVDSTDKADLRLIYLALAHMIKFRGHFLIEGDLNPDNSDVDKLFIQLVQTYNQLFEENPINASGVDAKAILSARLSKSRRLENLIAQLPGEKKNGLFGNLIALSLGLTPNFKSNFDLAEDAKLQLSKDTYDDDLDNLLAQIGDQYADLFLAAKNLSDAILLSDILRVNTEITKAPLSASMIKRYDEHHQDLTLLKALVRQQLPEKYKEIFFDQSKNGYAGYIDGGASQEEFYKFIKPILEKMDGTEELLVKLNREDLLRKQRTFDNGSIPHQIHLGELHAILRRQEDFYPFLKDNREKIEKILTFRIPYYVGPLARGNSRFAWMTRKSEETITPWNFEEVVDKGASAQSFIERMTNFDKNLPNEKVLPKHSLLYEYFTVYNELTKVKYVTEGMRKPAFLSGEQKKAIVDLLFKTNRKVTVKQLKEDYFKKIECFDSVEISGVEDRFNASLGTYHDLLKIIKDKDFLDNEENEDILEDIVLTLTLFEDREMIEERLKTYAHLFDDKVMKQLKRRRYTGWGRLSRKLINGIRDKQSGKTILDFLKSDGFANRNFMQLIHDDSLTFKEDIQKAQVSGQGDSLHEHIANLAGSPAIKKGILQTVKVVDELVKVMGRHKPENIVIEMARENQTTQKGQKNSRERMKRIEEGIKELGSQILKEHPVENTQLQNEKLYLYYLQNGRDMYVDQELDINRLSDYDVDHIVPQSFLKDDSIDNKVLTRSDKARGKSDNVPSEEVVKKMKNYWRQLLNAKLITQRKFDNLTKAERGGLSELDKAGFIKRQLVETRQITKHVAQILDSRMNTKYDENDKLIREVKVITLKSKLVSDFRKDFQFYKVREINNYHHAHDAYLNAVVGTALIKKYPKLESEFVYGDYKVYDVRKMIAKSEQEIGKATAKYFFYSNIMNFFKTEITLANGEIRKRPLIETNGETGEIVWDKGRDFATVRKVLSMPQVNIVKKTEVQTGGFSKESILPKRNSDKLIARKKDWDPKKYGGFDSPTVAYSVLVVAKVEKGKSKKLKSVKELLGITIMERSSFEKNPIDFLEAKGYKEVKKDLIIKLPKYSLFELENGRKRMLASAGELQKGNELALPSKYVNFLYLASHYEKLKGSPEDNEQKQLFVEQHKHYLDEIIEQISEFSKRVILADANLDKVLSAYNKHRDKPIREQAENIIHLFTLTNLGAPAAFKYFDTTIDRKRYTSTKEVLDATLIHQSITGLYETRIDLSQLGGDGGGGGGSGGGGSGGMDPLQLLQPLEAEIKGTKLKAHWNSGATITCVPQAFLEEEVPIKNIWIKTIHGEKEQPVYYLTFKIQGRKVEAEVISSPYDYILVSPSDIPWLMKKPLQLTTLVPLQEYEERLLKQTMLTGSYKEKLQSLFLKYDALWQHWENQVGHRRIKPHHIATGTVNPRPQKQYPINPKAKASIQTVINDLLKQGVLIQQNSIMNTPVYPVPKPDGKWRMVLDYREVNKTIPLIAAQNQHSAGILSSIFRGKYKTTLDLSNGFWAHSITPESYWLTAFTWLGQQYCWTRLPQGFLNSPALFNADVVDLLKEVPNVQVYVDDIYISHDDPREHLEQLEKVFSLLLNAGYVVSLKKSEIAQHEVEFLGFNITKEGRGLTETFKQKLLNITPPRDLKQLQSILGLLNFARNFIPNFSELVKPLYNIIATAPGKYITWTTDNSQQLQNIISMLNSAENLEERNPEVRLIMKVNTSPSAGYIRFYNEFAKRPIMYLNYVYTKAEVKFTNTEKLLTTIHKGLIKALDLGMGQEILVYSPIVSMTKIQKTPLPERKALPIRWITWMSYLEDPRIQFHYDKTLPELQQVPTVTDDIIAKIKHPSEFSMVFYTDGSAIKHPNVNKSHNAGMGIAQVQFKPEFTVINTWSIPLGDHTAQLAEVAAVEFACKKALKIDGPVLIVTDSFYVAESVNKELPYWQSNGFFNNKKKPLKHVSKWKSIADCIQLKPDIIIIHEKGHQPTASTFHTEGNNLADKLATQGSYVVNAGKRTADGSEFEKRTADGSEFESPKKKAKVE

SEQ ID NO: 598 - protein, 2175 aa, synthetic construct
MPAAKRVKLDGGDKKYSIGLDIGTNSVGWAVITDEYKVPSKKFKVLGNTDRHSIKKNLIGALLFDSGETAEATRLKRTARRRYTRRKNRICYLQEIFSNEMAKVDDSFFHRLEESFLVEEDKKHERHPIFGNIVDEVAYHEKYPTIYHLRKKLVDSTDKADLRLIYLALAHMIKFRGHFLIEGDLNPDNSDVDKLFIQLVQTYNQLFEENPINASGVDAKAILSARLSKSRRLENLIAQLPGEKKNGLFGNLIALSLGLTPNFKSNFDLAEDAKLQLSKDTYDDDLDNLLAQIGDQYADLFLAAKNLSDAILLSDILRVNTEITKAPLSASMIKRYDEHHQDLTLLKALVRQQLPEKYKEIFFDQSKNGYAGYIDGGASQEEFYKFIKPILEKMDGTEELLVKLNREDLLRKQRTFDNGSIPHQIHLGELHAILRRQEDFYPFLKDNREKIEKILTFRIPYYVGPLARGNSRFAWMTRKSEETITPWNFEEVVDKGASAQSFIERMTNFDKNLPNEKVLPKHSLLYEYFTVYNELTKVKYVTEGMRKPAFLSGEQKKAIVDLLFKTNRKVTVKQLKEDYFKKIECFDSVEISGVEDRFNASLGTYHDLLKIIKDKDFLDNEENEDILEDIVLTLTLFEDREMIEERLKTYAHLFDDKVMKQLKRRRYTGWGRLSRKLINGIRDKQSGKTILDFLKSDGFANRNFMQLIHDDSLTFKEDIQKAQVSGQGDSLHEHIANLAGSPAIKKGILQTVKVVDELVKVMGRHKPENIVIEMARENQTTQKGQKNSRERMKRIEEGIKELGSQILKEHPVENTQLQNEKLYLYYLQNGRDMYVDQELDINRLSDYDVDHIVPQSFLKDDSIDNKVLTRSDKARGKSDNVPSEEVVKKMKNYWRQLLNAKLITQRKFDNLTKAERGGLSELDKAGFIKRQLVETRQITKHVAQILDSRMNTKYDENDKLIREVKVITLKSKLVSDFRKDFQFYKVREINNYHHAHDAYLNAVVGTALIKKYPKLESEFVYGDYKVYDVRKMIAKSEQEIGKATAKYFFYSNIMNFFKTEITLANGEIRKRPLIETNGETGEIVWDKGRDFATVRKVLSMPQVNIVKKTEVQTGGFSKESILPKRNSDKLIARKKDWDPKKYGGFDSPTVAYSVLVVAKVEKGKSKKLKSVKELLGITIMERSSFEKNPIDFLEAKGYKEVKKDLIIKLPKYSLFELENGRKRMLASAGELQKGNELALPSKYVNFLYLASHYEKLKGSPEDNEQKQLFVEQHKHYLDEIIEQISEFSKRVILADANLDKVLSAYNKHRDKPIREQAENIIHLFTLTNLGAPAAFKYFDTTIDRKRYTSTKEVLDATLIHQSITGLYETRIDLSQLGGDGGEAAAKEAAAKGGMDPLQLLQPLEAEIKGTKLKAHWNSGATITCVPQAFLEEEVPIKNIWIKTIHGEKEQPVYYLTFKIQGRKVEAEVISSPYDYILVSPSDIPWLMKKPLQLTTLVPLQEYEERLLKQTMLTGSYKEKLQSLFLKYDALWQHWENQVGHRRIKPHHIATGTVNPRPQKQYPINPKAKASIQTVINDLLKQGVLIQQNSIMNTPVYPVPKPDGKWRMVLDYREVNKTIPLIAAQNQHSAGILSSIFRGKYKTTLDLSNGFWAHSITPESYWLTAFTWLGQQYCWTRLPQGFLNSPALFNADVVDLLKEVPNVQVYVDDIYISHDDPREHLEQLEKVFSLLLNAGYVVSLKKSEIAQHEVEFLGFNITKEGRGLTETFKQKLLNITPPRDLKQLQSILGLLNFARNFIPNFSELVKPLYNIIATAPGKYITWTTDNSQQLQNIISMLNSAENLEERNPEVRLIMKVNTSPSAGYIRFYNEFAKRPIMYLNYVYTKAEVKFTNTEKLLTTIHKGLIKALDLGMGQEILVYSPIVSMTKIQKTPLPERKALPIRWITWMSYLEDPRIQFHYDKTLPELQQVPTVTDDIIAKIKHPSEFSMVFYTDGSAIKHPNVNKSHNAGMGIAQVQFKPEFTVINTWSIPLGDHTAQLAEVAAVEFACKKALKIDGPVLIVTDSFYVAESVNKELPYWQSNGFFNNKKKPLKHVSKWKSIADCIQLKPDIIIIHEKGHQPTASTFHTEGNNLADKLATQGSYVVNAGKRTADGSEFEKRTADGSEFESPKKKAKVE

SEQ ID NO: 599 - protein, 2176 aa, synthetic construct
MPAAKRVKLDGGDKKYSIGLDIGTNSVGWAVITDEYKVPSKKFKVLGNTDRHSIKKNLIGALLFDSGETAEATRLKRTARRRYTRRKNRICYLQEIFSNEMAKVDDSFFHRLEESFLVEEDKKHERHPIFGNIVDEVAYHEKYPTIYHLRKKLVDSTDKADLRLIYLALAHMIKFRGHFLIEGDLNPDNSDVDKLFIQLVQTYNQLFEENPINASGVDAKAILSARLSKSRRLENLIAQLPGEKKNGLFGNLIALSLGLTPNFKSNFDLAEDAKLQLSKDTYDDDLDNLLAQIGDQYADLFLAAKNLSDAILLSDILRVNTEITKAPLSASMIKRYDEHHQDLTLLKALVRQQLPEKYKEIFFDQSKNGYAGYIDGGASQEEFYKFIKPILEKMDGTEELLVKLNREDLLRKQRTFDNGSIPHQIHLGELHAILRRQEDFYPFLKDNREKIEKILTFRIPYYVGPLARGNSRFAWMTRKSEETITPWNFEEVVDKGASAQSFIERMTNFDKNLPNEKVLPKHSLLYEYFTVYNELTKVKYVTEGMRKPAFLSGEQKKAIVDLLFKTNRKVTVKQLKEDYFKKIECFDSVEISGVEDRFNASLGTYHDLLKIIKDKDFLDNEENEDILEDIVLTLTLFEDREMIEERLKTYAHLFDDKVMKQLKRRRYTGWGRLSRKLINGIRDKQSGKTILDFLKSDGFANRNFMQLIHDDSLTFKEDIQKAQVSGQGDSLHEHIANLAGSPAIKKGILQTVKVVDELVKVMGRHKPENIVIEMARENQTTQKGQKNSRERMKRIEEGIKELGSQILKEHPVENTQLQNEKLYLYYLQNGRDMYVDQELDINRLSDYDVDHIVPQSFLKDDSIDNKVLTRSDKARGKSDNVPSEEVVKKMKNYWRQLLNAKLITQRKFDNLTKAERGGLSELDKAGFIKRQLVETRQITKHVAQILDSRMNTKYDENDKLIREVKVITLKSKLVSDFRKDFQFYKVREINNYHHAHDAYLNAVVGTALIKKYPKLESEFVYGDYKVYDVRKMIAKSEQEIGKATAKYFFYSNIMNFFKTEITLANGEIRKRPLIETNGETGEIVWDKGRDFATVRKVLSMPQVNIVKKTEVQTGGFSKESILPKRNSDKLIARKKDWDPKKYGGFDSPTVAYSVLVVAKVEKGKSKKLKSVKELLGITIMERSSFEKNPIDFLEAKGYKEVKKDLIIKLPKYSLFELENGRKRMLASAGELQKGNELALPSKYVNFLYLASHYEKLKGSPEDNEQKQLFVEQHKHYLDEIIEQISEFSKRVILADANLDKVLSAYNKHRDKPIREQAENIIHLFTLTNLGAPAAFKYFDTTIDRKRYTSTKEVLDATLIHQSITGLYETRIDLSQLGGDGGGSSEAAAKGGGGGMDPLQLLQPLEAEIKGTKLKAHWNSGATITCVPQAFLEEEVPIKNIWIKTIHGEKEQPVYYLTFKIQGRKVEAEVISSPYDYILVSPSDIPWLMKKPLQLTTLVPLQEYEERLLKQTMLTGSYKEKLQSLFLKYDALWQHWENQVGHRRIKPHHIATGTVNPRPQKQYPINPKAKASIQTVINDLLKQGVLIQQNSIMNTPVYPVPKPDGKWRMVLDYREVNKTIPLIAAQNQHSAGILSSIFRGKYKTTLDLSNGFWAHSITPESYWLTAFTWLGQQYCWTRLPQGFLNSPALFNADVVDLLKEVPNVQVYVDDIYISHDDPREHLEQLEKVFSLLLNAGYVVSLKKSEIAQHEVEFLGFNITKEGRGLTETFKQKLLNITPPRDLKQLQSILGLLNFARNFIPNFSELVKPLYNIIATAPGKYITWTTDNSQQLQNIISMLNSAENLEERNPEVRLIMKVNTSPSAGYIRFYNEFAKRPIMYLNYVYTKAEVKFTNTEKLLTTIHKGLIKALDLGMGQEILVYSPIVSMTKIQKTPLPERKALPIRWITWMSYLEDPRIQFHYDKTLPELQQVPTVTDDIIAKIKHPSEFSMVFYTDGSAIKHPNVNKSHNAGMGIAQVQFKPEFTVINTWSIPLGDHTAQLAEVAAVEFACKKALKIDGPVLIVTDSFYVAESVNKELPYWQSNGFFNNKKKPLKHVSKWKSIADCIQLKPDIIIIHEKGHQPTASTFHTEGNNLADKLATQGSYVVNAGKRTADGSEFEKRTADGSEFESPKKKAKVE

SEQ ID NO: 600 - protein, 2174 aa, synthetic construct
MPAAKRVKLDGGDKKYSIGLDIGTNSVGWAVITDEYKVPSKKFKVLGNTDRHSIKKNLIGALLFDSGETAEATRLKRTARRRYTRRKNRICYLQEIFSNEMAKVDDSFFHRLEESFLVEEDKKHERHPIFGNIVDEVAYHEKYPTIYHLRKKLVDSTDKADLRLIYLALAHMIKFRGHFLIEGDLNPDNSDVDKLFIQLVQTYNQLFEENPINASGVDAKAILSARLSKSRRLENLIAQLPGEKKNGLFGNLIALSLGLTPNFKSNFDLAEDAKLQLSKDTYDDDLDNLLAQIGDQYADLFLAAKNLSDAILLSDILRVNTEITKAPLSASMIKRYDEHHQDLTLLKALVRQQLPEKYKEIFFDQSKNGYAGYIDGGASQEEFYKFIKPILEKMDGTEELLVKLNREDLLRKQRTFDNGSIPHQIHLGELHAILRRQEDFYPFLKDNREKIEKILTFRIPYYVGPLARGNSRFAWMTRKSEETITPWNFEEVVDKGASAQSFIERMTNFDKNLPNEKVLPKHSLLYEYFTVYNELTKVKYVTEGMRKPAFLSGEQKKAIVDLLFKTNRKVTVKQLKEDYFKKIECFDSVEISGVEDRFNASLGTYHDLLKIIKDKDFLDNEENEDILEDIVLTLTLFEDREMIEERLKTYAHLFDDKVMKQLKRRRYTGWGRLSRKLINGIRDKQSGKTILDFLKSDGFANRNFMQLIHDDSLTFKEDIQKAQVSGQGDSLHEHIANLAGSPAIKKGILQTVKVVDELVKVMGRHKPENIVIEMARENQTTQKGQKNSRERMKRIEEGIKELGSQILKEHPVENTQLQNEKLYLYYLQNGRDMYVDQELDINRLSDYDVDHIVPQSFLKDDSIDNKVLTRSDKARGKSDNVPSEEVVKKMKNYWRQLLNAKLITQRKFDNLTKAERGGLSELDKAGFIKRQLVETRQITKHVAQILDSRMNTKYDENDKLIREVKVITLKSKLVSDFRKDFQFYKVREINNYHHAHDAYLNAVVGTALIKKYPKLESEFVYGDYKVYDVRKMIAKSEQEIGKATAKYFFYSNIMNFFKTEITLANGEIRKRPLIETNGETGEIVWDKGRDFATVRKVLSMPQVNIVKKTEVQTGGFSKESILPKRNSDKLIARKKDWDPKKYGGFDSPTVAYSVLVVAKVEKGKSKKLKSVKELLGITIMERSSFEKNPIDFLEAKGYKEVKKDLIIKLPKYSLFELENGRKRMLASAGELQKGNELALPSKYVNFLYLASHYEKLKGSPEDNEQKQLFVEQHKHYLDEIIEQISEFSKRVILADANLDKVLSAYNKHRDKPIREQAENIIHLFTLTNLGAPAAFKYFDTTIDRKRYTSTKEVLDATLIHQSITGLYETRIDLSQLGGDGGPAPAPAPAPGGMDPLQLLQPLEAEIKGTKLKAHWNSGATITCVPQAFLEEEVPIKNIWIKTIHGEKEQPVYYLTFKIQGRKVEAEVISSPYDYILVSPSDIPWLMKKPLQLTTLVPLQEYEERLLKQTMLTGSYKEKLQSLFLKYDALWQHWENQVGHRRIKPHHIATGTVNPRPQKQYPINPKAKASIQTVINDLLKQGVLIQQNSIMNTPVYPVPKPDGKWRMVLDYREVNKTIPLIAAQNQHSAGILSSIFRGKYKTTLDLSNGFWAHSITPESYWLTAFTWLGQQYCWTRLPQGFLNSPALFNADVVDLLKEVPNVQVYVDDIYISHDDPREHLEQLEKVFSLLLNAGYVVSLKKSEIAQHEVEFLGFNITKEGRGLTETFKQKLLNITPPRDLKQLQSILGLLNFARNFIPNFSELVKPLYNIIATAPGKYITWTTDNSQQLQNIISMLNSAENLEERNPEVRLIMKVNTSPSAGYIRFYNEFAKRPIMYLNYVYTKAEVKFTNTEKLLTTIHKGLIKALDLGMGQEILVYSPIVSMTKIQKTPLPERKALPIRWITWMSYLEDPRIQFHYDKTLPELQQVPTVTDDIIAKIKHPSEFSMVFYTDGSAIKHPNVNKSHNAGMGIAQVQFKPEFTVINTWSIPLGDHTAQLAEVAAVEFACKKALKIDGPVLIVTDSFYVAESVNKELPYWQSNGFFNNKKKPLKHVSKWKSIADCIQLKPDIIIIHEKGHQPTASTFHTEGNNLADKLATQGSYVVNAGKRTADGSEFEKRTADGSEFESPKKKAKVE

SEQ ID NO: 601 - protein, 2180 aa, synthetic construct
MPAAKRVKLDGGDKKYSIGLDIGTNSVGWAVITDEYKVPSKKFKVLGNTDRHSIKKNLIGALLFDSGETAEATRLKRTARRRYTRRKNRICYLQEIFSNEMAKVDDSFFHRLEESFLVEEDKKHERHPIFGNIVDEVAYHEKYPTIYHLRKKLVDSTDKADLRLIYLALAHMIKFRGHFLIEGDLNPDNSDVDKLFIQLVQTYNQLFEENPINASGVDAKAILSARLSKSRRLENLIAQLPGEKKNGLFGNLIALSLGLTPNFKSNFDLAEDAKLQLSKDTYDDDLDNLLAQIGDQYADLFLAAKNLSDAILLSDILRVNTEITKAPLSASMIKRYDEHHQDLTLLKALVRQQLPEKYKEIFFDQSKNGYAGYIDGGASQEEFYKFIKPILEKMDGTEELLVKLNREDLLRKQRTFDNGSIPHQIHLGELHAILRRQEDFYPFLKDNREKIEKILTFRIPYYVGPLARGNSRFAWMTRKSEETITPWNFEEVVDKGASAQSFIERMTNFDKNLPNEKVLPKHSLLYEYFTVYNELTKVKYVTEGMRKPAFLSGEQKKAIVDLLFKTNRKVTVKQLKEDYFKKIECFDSVEISGVEDRFNASLGTYHDLLKIIKDKDFLDNEENEDILEDIVLTLTLFEDREMIEERLKTYAHLFDDKVMKQLKRRRYTGWGRLSRKLINGIRDKQSGKTILDFLKSDGFANRNFMQLIHDDSLTFKEDIQKAQVSGQGDSLHEHIANLAGSPAIKKGILQTVKVVDELVKVMGRHKPENIVIEMARENQTTQKGQKNSRERMKRIEEGIKELGSQILKEHPVENTQLQNEKLYLYYLQNGRDMYVDQELDINRLSDYDVDHIVPQSFLKDDSIDNKVLTRSDKARGKSDNVPSEEVVKKMKNYWRQLLNAKLITQRKFDNLTKAERGGLSELDKAGFIKRQLVETRQITKHVAQILDSRMNTKYDENDKLIREVKVITLKSKLVSDFRKDFQFYKVREINNYHHAHDAYLNAVVGTALIKKYPKLESEFVYGDYKVYDVRKMIAKSEQEIGKATAKYFFYSNIMNFFKTEITLANGEIRKRPLIETNGETGEIVWDKGRDFATVRKVLSMPQVNIVKKTEVQTGGFSKESILPKRNSDKLIARKKDWDPKKYGGFDSPTVAYSVLVVAKVEKGKSKKLKSVKELLGITIMERSSFEKNPIDFLEAKGYKEVKKDLIIKLPKYSLFELENGRKRMLASAGELQKGNELALPSKYVNFLYLASHYEKLKGSPEDNEQKQLFVEQHKHYLDEIIEQISEFSKRVILADANLDKVLSAYNKHRDKPIREQAENIIHLFTLTNLGAPAAFKYFDTTIDRKRYTSTKEVLDATLIHQSITGLYETRIDLSQLGGDGGGGGGSGGGGSGGGGSGGMDPLQLLQPLEAEIKGTKLKAHWNSGATITCVPQAFLEEEVPIKNIWIKTIHGEKEQPVYYLTFKIQGRKVEAEVISSPYDYILVSPSDIPWLMKKPLQLTTLVPLQEYEERLLKQTMLTGSYKEKLQSLFLKYDALWQHWENQVGHRRIKPHHIATGTVNPRPQKQYPINPKAKASIQTVINDLLKQGVLIQQNSIMNTPVYPVPKPDGKWRMVLDYREVNKTIPLIAAQNQHSAGILSSIFRGKYKTTLDLSNGFWAHSITPESYWLTAFTWLGQQYCWTRLPQGFLNSPALFNADVVDLLKEVPNVQVYVDDIYISHDDPREHLEQLEKVFSLLLNAGYVVSLKKSEIAQHEVEFLGFNITKEGRGLTETFKQKLLNITPPRDLKQLQSILGLLNFARNFIPNFSELVKPLYNIIATAPGKYITWTTDNSQQLQNIISMLNSAENLEERNPEVRLIMKVNTSPSAGYIRFYNEFAKRPIMYLNYVYTKAEVKFTNTEKLLTTIHKGLIKALDLGMGQEILVYSPIVSMTKIQKTPLPERKALPIRWITWMSYLEDPRIQFHYDKTLPELQQVPTVTDDIIAKIKHPSEFSMVFYTDGSAIKHPNVNKSHNAGMGIAQVQFKPEFTVINTWSIPLGDHTAQLAEVAAVEFACKKALKIDGPVLIVTDSFYVAESVNKELPYWQSNGFFNNKKKPLKHVSKWKSIADCIQLKPDIIIIHEKGHQPTASTFHTEGNNLADKLATQGSYVVNAGKRTADGSEFEKRTADGSEFESPKKKAKVE

SEQ ID NO: 602 - protein, 2176 aa, synthetic construct
MPAAKRVKLDGGDKKYSIGLDIGTNSVGWAVITDEYKVPSKKFKVLGNTDRHSIKKNLIGALLFDSGETAEATRLKRTARRRYTRRKNRICYLQEIFSNEMAKVDDSFFHRLEESFLVEEDKKHERHPIFGNIVDEVAYHEKYPTIYHLRKKLVDSTDKADLRLIYLALAHMIKFRGHFLIEGDLNPDNSDVDKLFIQLVQTYNQLFEENPINASGVDAKAILSARLSKSRRLENLIAQLPGEKKNGLFGNLIALSLGLTPNFKSNFDLAEDAKLQLSKDTYDDDLDNLLAQIGDQYADLFLAAKNLSDAILLSDILRVNTEITKAPLSASMIKRYDEHHQDLTLLKALVRQQLPEKYKEIFFDQSKNGYAGYIDGGASQEEFYKFIKPILEKMDGTEELLVKLNREDLLRKQRTFDNGSIPHQIHLGELHAILRRQEDFYPFLKDNREKIEKILTFRIPYYVGPLARGNSRFAWMTRKSEETITPWNFEEVVDKGASAQSFIERMTNFDKNLPNEKVLPKHSLLYEYFTVYNELTKVKYVTEGMRKPAFLSGEQKKAIVDLLFKTNRKVTVKQLKEDYFKKIECFDSVEISGVEDRFNASLGTYHDLLKIIKDKDFLDNEENEDILEDIVLTLTLFEDREMIEERLKTYAHLFDDKVMKQLKRRRYTGWGRLSRKLINGIRDKQSGKTILDFLKSDGFANRNFMQLIHDDSLTFKEDIQKAQVSGQGDSLHEHIANLAGSPAIKKGILQTVKVVDELVKVMGRHKPENIVIEMARENQTTQKGQKNSRERMKRIEEGIKELGSQILKEHPVENTQLQNEKLYLYYLQNGRDMYVDQELDINRLSDYDVDHIVPQSFLKDDSIDNKVLTRSDKARGKSDNVPSEEVVKKMKNYWRQLLNAKLITQRKFDNLTKAERGGLSELDKAGFIKRQLVETRQITKHVAQILDSRMNTKYDENDKLIREVKVITLKSKLVSDFRKDFQFYKVREINNYHHAHDAYLNAVVGTALIKKYPKLESEFVYGDYKVYDVRKMIAKSEQEIGKATAKYFFYSNIMNFFKTEITLANGEIRKRPLIETNGETGEIVWDKGRDFATVRKVLSMPQVNIVKKTEVQTGGFSKESILPKRNSDKLIARKKDWDPKKYGGFDSPTVAYSVLVVAKVEKGKSKKLKSVKELLGITIMERSSFEKNPIDFLEAKGYKEVKKDLIIKLPKYSLFELENGRKRMLASAGELQKGNELALPSKYVNFLYLASHYEKLKGSPEDNEQKQLFVEQHKHYLDEIIEQISEFSKRVILADANLDKVLSAYNKHRDKPIREQAENIIHLFTLTNLGAPAAFKYFDTTIDRKRYTSTKEVLDATLIHQSITGLYETRIDLSQLGGDGGPAPEAAAKGSSGGMDPLQLLQPLEAEIKGTKLKAHWNSGATITCVPQAFLEEEVPIKNIWIKTIHGEKEQPVYYLTFKIQGRKVEAEVISSPYDYILVSPSDIPWLMKKPLQLTTLVPLQEYEERLLKQTMLTGSYKEKLQSLFLKYDALWQHWENQVGHRRIKPHHIATGTVNPRPQKQYPINPKAKASIQTVINDLLKQGVLIQQNSIMNTPVYPVPKPDGKWRMVLDYREVNKTIPLIAAQNQHSAGILSSIFRGKYKTTLDLSNGFWAHSITPESYWLTAFTWLGQQYCWTRLPQGFLNSPALFNADVVDLLKEVPNVQVYVDDIYISHDDPREHLEQLEKVFSLLLNAGYVVSLKKSEIAQHEVEFLGFNITKEGRGLTETFKQKLLNITPPRDLKQLQSILGLLNFARNFIPNFSELVKPLYNIIATAPGKYITWTTDNSQQLQNIISMLNSAENLEERNPEVRLIMKVNTSPSAGYIRFYNEFAKRPIMYLNYVYTKAEVKFTNTEKLLTTIHKGLIKALDLGMGQEILVYSPIVSMTKIQKTPLPERKALPIRWITWMSYLEDPRIQFHYDKTLPELQQVPTVTDDIIAKIKHPSEFSMVFYTDGSAIKHPNVNKSHNAGMGIAQVQFKPEFTVINTWSIPLGDHTAQLAEVAAVEFACKKALKIDGPVLIVTDSFYVAESVNKELPYWQSNGFFNNKKKPLKHVSKWKSIADCIQLKPDIIIIHEKGHQPTASTFHTEGNNLADKLATQGSYVVNAGKRTADGSEFEKRTADGSEFESPKKKAKVE

SEQ ID NO: 603 - protein, 2173 aa, synthetic construct
MPAAKRVKLDGGDKKYSIGLDIGTNSVGWAVITDEYKVPSKKFKVLGNTDRHSIKKNLIGALLFDSGETAEATRLKRTARRRYTRRKNRICYLQEIFSNEMAKVDDSFFHRLEESFLVEEDKKHERHPIFGNIVDEVAYHEKYPTIYHLRKKLVDSTDKADLRLIYLALAHMIKFRGHFLIEGDLNPDNSDVDKLFIQLVQTYNQLFEENPINASGVDAKAILSARLSKSRRLENLIAQLPGEKKNGLFGNLIALSLGLTPNFKSNFDLAEDAKLQLSKDTYDDDLDNLLAQIGDQYADLFLAAKNLSDAILLSDILRVNTEITKAPLSASMIKRYDEHHQDLTLLKALVRQQLPEKYKEIFFDQSKNGYAGYIDGGASQEEFYKFIKPILEKMDGTEELLVKLNREDLLRKQRTFDNGSIPHQIHLGELHAILRRQEDFYPFLKDNREKIEKILTFRIPYYVGPLARGNSRFAWMTRKSEETITPWNFEEVVDKGASAQSFIERMTNFDKNLPNEKVLPKHSLLYEYFTVYNELTKVKYVTEGMRKPAFLSGEQKKAIVDLLFKTNRKVTVKQLKEDYFKKIECFDSVEISGVEDRFNASLGTYHDLLKIIKDKDFLDNEENEDILEDIVLTLTLFEDREMIEERLKTYAHLFDDKVMKQLKRRRYTGWGRLSRKLINGIRDKQSGKTILDFLKSDGFANRNFMQLIHDDSLTFKEDIQKAQVSGQGDSLHEHIANLAGSPAIKKGILQTVKVVDELVKVMGRHKPENIVIEMARENQTTQKGQKNSRERMKRIEEGIKELGSQILKEHPVENTQLQNEKLYLYYLQNGRDMYVDQELDINRLSDYDVDHIVPQSFLKDDSIDNKVLTRSDKARGKSDNVPSEEVVKKMKNYWRQLLNAKLITQRKFDNLTKAERGGLSELDKAGFIKRQLVETRQITKHVAQILDSRMNTKYDENDKLIREVKVITLKSKLVSDFRKDFQFYKVREINNYHHAHDAYLNAVVGTALIKKYPKLESEFVYGDYKVYDVRKMIAKSEQEIGKATAKYFFYSNIMNFFKTEITLANGEIRKRPLIETNGETGEIVWDKGRDFATVRKVLSMPQVNIVKKTEVQTGGFSKESILPKRNSDKLIARKKDWDPKKYGGFDSPTVAYSVLVVAKVEKGKSKKLKSVKELLGITIMERSSFEKNPIDFLEAKGYKEVKKDLIIKLPKYSLFELENGRKRMLASAGELQKGNELALPSKYVNFLYLASHYEKLKGSPEDNEQKQLFVEQHKHYLDEIIEQISEFSKRVILADANLDKVLSAYNKHRDKPIREQAENIIHLFTLTNLGAPAAFKYFDTTIDRKRYTSTKEVLDATLIHQSITGLYETRIDLSQLGGDGGGSSEAAAKGGMDPLQLLQPLEAEIKGTKLKAHWNSGATITCVPQAFLEEEVPIKNIWIKTIHGEKEQPVYYLTFKIQGRKVEAEVISSPYDYILVSPSDIPWLMKKPLQLTTLVPLQEYEERLLKQTMLTGSYKEKLQSLFLKYDALWQHWENQVGHRRIKPHHIATGTVNPRPQKQYPINPKAKASIQTVINDLLKQGVLIQQNSIMNTPVYPVPKPDGKWRMVLDYREVNKTIPLIAAQNQHSAGILSSIFRGKYKTTLDLSNGFWAHSITPESYWLTAFTWLGQQYCWTRLPQGFLNSPALFNADVVDLLKEVPNVQVYVDDIYISHDDPREHLEQLEKVFSLLLNAGYVVSLKKSEIAQHEVEFLGFNITKEGRGLTETFKQKLLNITPPRDLKQLQSILGLLNFARNFIPNFSELVKPLYNIIATAPGKYITWTTDNSQQLQNIISMLNSAENLEERNPEVRLIMKVNTSPSAGYIRFYNEFAKRPIMYLNYVYTKAEVKFTNTEKLLTTIHKGLIKALDLGMGQEILVYSPIVSMTKIQKTPLPERKALPIRWITWMSYLEDPRIQFHYDKTLPELQQVPTVTDDIIAKIKHPSEFSMVFYTDGSAIKHPNVNKSHNAGMGIAQVQFKPEFTVINTWSIPLGDHTAQLAEVAAVEFACKKALKIDGPVLIVTDSFYVAESVNKELPYWQSNGFFNNKKKPLKHVSKWKSIADCIQLKPDIIIIHEKGHQPTASTFHTEGNNLADKLATQGSYVVNAGKRTADGSEFEKRTADGSEFESPKKKAKVE

SEQ ID NO: 604 - protein, 2183 aa, synthetic construct
MPAAKRVKLDGGDKKYSIGLDIGTNSVGWAVITDEYKVPSKKFKVLGNTDRHSIKKNLIGALLFDSGETAEATRLKRTARRRYTRRKNRICYLQEIFSNEMAKVDDSFFHRLEESFLVEEDKKHERHPIFGNIVDEVAYHEKYPTIYHLRKKLVDSTDKADLRLIYLALAHMIKFRGHFLIEGDLNPDNSDVDKLFIQLVQTYNQLFEENPINASGVDAKAILSARLSKSRRLENLIAQLPGEKKNGLFGNLIALSLGLTPNFKSNFDLAEDAKLQLSKDTYDDDLDNLLAQIGDQYADLFLAAKNLSDAILLSDILRVNTEITKAPLSASMIKRYDEHHQDLTLLKALVRQQLPEKYKEIFFDQSKNGYAGYIDGGASQEEFYKFIKPILEKMDGTEELLVKLNREDLLRKQRTFDNGSIPHQIHLGELHAILRRQEDFYPFLKDNREKIEKILTFRIPYYVGPLARGNSRFAWMTRKSEETITPWNFEEVVDKGASAQSFIERMTNFDKNLPNEKVLPKHSLLYEYFTVYNELTKVKYVTEGMRKPAFLSGEQKKAIVDLLFKTNRKVTVKQLKEDYFKKIECFDSVEISGVEDRFNASLGTYHDLLKIIKDKDFLDNEENEDILEDIVLTLTLFEDREMIEERLKTYAHLFDDKVMKQLKRRRYTGWGRLSRKLINGIRDKQSGKTILDFLKSDGFANRNFMQLIHDDSLTFKEDIQKAQVSGQGDSLHEHIANLAGSPAIKKGILQTVKVVDELVKVMGRHKPENIVIEMARENQTTQKGQKNSRERMKRIEEGIKELGSQILKEHPVENTQLQNEKLYLYYLQNGRDMYVDQELDINRLSDYDVDHIVPQSFLKDDSIDNKVLTRSDKARGKSDNVPSEEVVKKMKNYWRQLLNAKLITQRKFDNLTKAERGGLSELDKAGFIKRQLVETRQITKHVAQILDSRMNTKYDENDKLIREVKVITLKSKLVSDFRKDFQFYKVREINNYHHAHDAYLNAVVGTALIKKYPKLESEFVYGDYKVYDVRKMIAKSEQEIGKATAKYFFYSNIMNFFKTEITLANGEIRKRPLIETNGETGEIVWDKGRDFATVRKVLSMPQVNIVKKTEVQTGGFSKESILPKRNSDKLIARKKDWDPKKYGGFDSPTVAYSVLVVAKVEKGKSKKLKSVKELLGITIMERSSFEKNPIDFLEAKGYKEVKKDLIIKLPKYSLFELENGRKRMLASAGELQKGNELALPSKYVNFLYLASHYEKLKGSPEDNEQKQLFVEQHKHYLDEIIEQISEFSKRVILADANLDKVLSAYNKHRDKPIREQAENIIHLFTLTNLGAPAAFKYFDTTIDRKRYTSTKEVLDATLIHQSITGLYETRIDLSQLGGDGGGGSGGSGGSGGSGGSGGSGGMDPLQLLQPLEAEIKGTKLKAHWNSGATITCVPQAFLEEEVPIKNIWIKTIHGEKEQPVYYLTFKIQGRKVEAEVISSPYDYILVSPSDIPWLMKKPLQLTTLVPLQEYEERLLKQTMLTGSYKEKLQSLFLKYDALWQHWENQVGHRRIKPHHIATGTVNPRPQKQYPINPKAKASIQTVINDLLKQGVLIQQNSIMNTPVYPVPKPDGKWRMVLDYREVNKTIPLIAAQNQHSAGILSSIFRGKYKTTLDLSNGFWAHSITPESYWLTAFTWLGQQYCWTRLPQGFLNSPALFNADVVDLLKEVPNVQVYVDDIYISHDDPREHLEQLEKVFSLLLNAGYVVSLKKSEIAQHEVEFLGFNITKEGRGLTETFKQKLLNITPPRDLKQLQSILGLLNFARNFIPNFSELVKPLYNIIATAPGKYITWTTDNSQQLQNIISMLNSAENLEERNPEVRLIMKVNTSPSAGYIRFYNEFAKRPIMYLNYVYTKAEVKFTNTEKLLTTIHKGLIKALDLGMGQEILVYSPIVSMTKIQKTPLPERKALPIRWITWMSYLEDPRIQFHYDKTLPELQQVPTVTDDIIAKIKHPSEFSMVFYTDGSAIKHPNVNKSHNAGMGIAQVQFKPEFTVINTWSIPLGDHTAQLAEVAAVEFACKKALKIDGPVLIVTDSFYVAESVNKELPYWQSNGFFNNKKKPLKHVSKWKSIADCIQLKPDIIIIHEKGHQPTASTFHTEGNNLADKLATQGSYVVNAGKRTADGSEFEKRTADGSEFESPKKKAKVE

SEQ ID NO: 605 - protein, 2171 aa, synthetic construct
MPAAKRVKLDGGDKKYSIGLDIGTNSVGWAVITDEYKVPSKKFKVLGNTDRHSIKKNLIGALLFDSGETAEATRLKRTARRRYTRRKNRICYLQEIFSNEMAKVDDSFFHRLEESFLVEEDKKHERHPIFGNIVDEVAYHEKYPTIYHLRKKLVDSTDKADLRLIYLALAHMIKFRGHFLIEGDLNPDNSDVDKLFIQLVQTYNQLFEENPINASGVDAKAILSARLSKSRRLENLIAQLPGEKKNGLFGNLIALSLGLTPNFKSNFDLAEDAKLQLSKDTYDDDLDNLLAQIGDQYADLFLAAKNLSDAILLSDILRVNTEITKAPLSASMIKRYDEHHQDLTLLKALVRQQLPEKYKEIFFDQSKNGYAGYIDGGASQEEFYKFIKPILEKMDGTEELLVKLNREDLLRKQRTFDNGSIPHQIHLGELHAILRRQEDFYPFLKDNREKIEKILTFRIPYYVGPLARGNSRFAWMTRKSEETITPWNFEEVVDKGASAQSFIERMTNFDKNLPNEKVLPKHSLLYEYFTVYNELTKVKYVTEGMRKPAFLSGEQKKAIVDLLFKTNRKVTVKQLKEDYFKKIECFDSVEISGVEDRFNASLGTYHDLLKIIKDKDFLDNEENEDILEDIVLTLTLFEDREMIEERLKTYAHLFDDKVMKQLKRRRYTGWGRLSRKLINGIRDKQSGKTILDFLKSDGFANRNFMQLIHDDSLTFKEDIQKAQVSGQGDSLHEHIANLAGSPAIKKGILQTVKVVDELVKVMGRHKPENIVIEMARENQTTQKGQKNSRERMKRIEEGIKELGSQILKEHPVENTQLQNEKLYLYYLQNGRDMYVDQELDINRLSDYDVDHIVPQSFLKDDSIDNKVLTRSDKARGKSDNVPSEEVVKKMKNYWRQLLNAKLITQRKFDNLTKAERGGLSELDKAGFIKRQLVETRQITKHVAQILDSRMNTKYDENDKLIREVKVITLKSKLVSDFRKDFQFYKVREINNYHHAHDAYLNAVVGTALIKKYPKLESEFVYGDYKVYDVRKMIAKSEQEIGKATAKYFFYSNIMNFFKTEITLANGEIRKRPLIETNGETGEIVWDKGRDFATVRKVLSMPQVNIVKKTEVQTGGFSKESILPKRNSDKLIARKKDWDPKKYGGFDSPTVAYSVLVVAKVEKGKSKKLKSVKELLGITIMERSSFEKNPIDFLEAKGYKEVKKDLIIKLPKYSLFELENGRKRMLASAGELQKGNELALPSKYVNFLYLASHYEKLKGSPEDNEQKQLFVEQHKHYLDEIIEQISEFSKRVILADANLDKVLSAYNKHRDKPIREQAENIIHLFTLTNLGAPAAFKYFDTTIDRKRYTSTKEVLDATLIHQSITGLYETRIDLSQLGGDGGGGGGSSGGMDPLQLLQPLEAEIKGTKLKAHWNSGATITCVPQAFLEEEVPIKNIWIKTIHGEKEQPVYYLTFKIQGRKVEAEVISSPYDYILVSPSDIPWLMKKPLQLTTLVPLQEYEERLLKQTMLTGSYKEKLQSLFLKYDALWQHWENQVGHRRIKPHHIATGTVNPRPQKQYPINPKAKASIQTVINDLLKQGVLIQQNSIMNTPVYPVPKPDGKWRMVLDYREVNKTIPLIAAQNQHSAGILSSIFRGKYKTTLDLSNGFWAHSITPESYWLTAFTWLGQQYCWTRLPQGFLNSPALFNADVVDLLKEVPNVQVYVDDIYISHDDPREHLEQLEKVFSLLLNAGYVVSLKKSEIAQHEVEFLGFNITKEGRGLTETFKQKLLNITPPRDLKQLQSILGLLNFARNFIPNFSELVKPLYNIIATAPGKYITWTTDNSQQLQNIISMLNSAENLEERNPEVRLIMKVNTSPSAGYIRFYNEFAKRPIMYLNYVYTKAEVKFTNTEKLLTTIHKGLIKALDLGMGQEILVYSPIVSMTKIQKTPLPERKALPIRWITWMSYLEDPRIQFHYDKTLPELQQVPTVTDDIIAKIKHPSEFSMVFYTDGSAIKHPNVNKSHNAGMGIAQVQFKPEFTVINTWSIPLGDHTAQLAEVAAVEFACKKALKIDGPVLIVTDSFYVAESVNKELPYWQSNGFFNNKKKPLKHVSKWKSIADCIQLKPDIIIIHEKGHQPTASTFHTEGNNLADKLATQGSYVVNAGKRTADGSEFEKRTADGSEFESPKKKAKVE

SEQ ID NO: 606 - protein, 2174 aa, synthetic construct
MPAAKRVKLDGGDKKYSIGLDIGTNSVGWAVITDEYKVPSKKFKVLGNTDRHSIKKNLIGALLFDSGETAEATRLKRTARRRYTRRKNRICYLQEIFSNEMAKVDDSFFHRLEESFLVEEDKKHERHPIFGNIVDEVAYHEKYPTIYHLRKKLVDSTDKADLRLIYLALAHMIKFRGHFLIEGDLNPDNSDVDKLFIQLVQTYNQLFEENPINASGVDAKAILSARLSKSRRLENLIAQLPGEKKNGLFGNLIALSLGLTPNFKSNFDLAEDAKLQLSKDTYDDDLDNLLAQIGDQYADLFLAAKNLSDAILLSDILRVNTEITKAPLSASMIKRYDEHHQDLTLLKALVRQQLPEKYKEIFFDQSKNGYAGYIDGGASQEEFYKFIKPILEKMDGTEELLVKLNREDLLRKQRTFDNGSIPHQIHLGELHAILRRQEDFYPFLKDNREKIEKILTFRIPYYVGPLARGNSRFAWMTRKSEETITPWNFEEVVDKGASAQSFIERMTNFDKNLPNEKVLPKHSLLYEYFTVYNELTKVKYVTEGMRKPAFLSGEQKKAIVDLLFKTNRKVTVKQLKEDYFKKIECFDSVEISGVEDRFNASLGTYHDLLKIIKDKDFLDNEENEDILEDIVLTLTLFEDREMIEERLKTYAHLFDDKVMKQLKRRRYTGWGRLSRKLINGIRDKQSGKTILDFLKSDGFANRNFMQLIHDDSLTFKEDIQKAQVSGQGDSLHEHIANLAGSPAIKKGILQTVKVVDELVKVMGRHKPENIVIEMARENQTTQKGQKNSRERMKRIEEGIKELGSQILKEHPVENTQLQNEKLYLYYLQNGRDMYVDQELDINRLSDYDVDHIVPQSFLKDDSIDNKVLTRSDKARGKSDNVPSEEVVKKMKNYWRQLLNAKLITQRKFDNLTKAERGGLSELDKAGFIKRQLVETRQITKHVAQILDSRMNTKYDENDKLIREVKVITLKSKLVSDFRKDFQFYKVREINNYHHAHDAYLNAVVGTALIKKYPKLESEFVYGDYKVYDVRKMIAKSEQEIGKATAKYFFYSNIMNFFKTEITLANGEIRKRPLIETNGETGEIVWDKGRDFATVRKVLSMPQVNIVKKTEVQTGGFSKESILPKRNSDKLIARKKDWDPKKYGGFDSPTVAYSVLVVAKVEKGKSKKLKSVKELLGITIMERSSFEKNPIDFLEAKGYKEVKKDLIIKLPKYSLFELENGRKRMLASAGELQKGNELALPSKYVNFLYLASHYEKLKGSPEDNEQKQLFVEQHKHYLDEIIEQISEFSKRVILADANLDKVLSAYNKHRDKPIREQAENIIHLFTLTNLGAPAAFKYFDTTIDRKRYTSTKEVLDATLIHQSITGLYETRIDLSQLGGDGGGGSGGSGGSGGMDPLQLLQPLEAEIKGTKLKAHWNSGATITCVPQAFLEEEVPIKNIWIKTIHGEKEQPVYYLTFKIQGRKVEAEVISSPYDYILVSPSDIPWLMKKPLQLTTLVPLQEYEERLLKQTMLTGSYKEKLQSLFLKYDALWQHWENQVGHRRIKPHHIATGTVNPRPQKQYPINPKAKASIQTVINDLLKQGVLIQQNSIMNTPVYPVPKPDGKWRMVLDYREVNKTIPLIAAQNQHSAGILSSIFRGKYKTTLDLSNGFWAHSITPESYWLTAFTWLGQQYCWTRLPQGFLNSPALFNADVVDLLKEVPNVQVYVDDIYISHDDPREHLEQLEKVFSLLLNAGYVVSLKKSEIAQHEVEFLGFNITKEGRGLTETFKQKLLNITPPRDLKQLQSILGLLNFARNFIPNFSELVKPLYNIIATAPGKYITWTTDNSQQLQNIISMLNSAENLEERNPEVRLIMKVNTSPSAGYIRFYNEFAKRPIMYLNYVYTKAEVKFTNTEKLLTTIHKGLIKALDLGMGQEILVYSPIVSMTKIQKTPLPERKALPIRWITWMSYLEDPRIQFHYDKTLPELQQVPTVTDDIIAKIKHPSEFSMVFYTDGSAIKHPNVNKSHNAGMGIAQVQFKPEFTVINTWSIPLGDHTAQLAEVAAVEFACKKALKIDGPVLIVTDSFYVAESVNKELPYWQSNGFFNNKKKPLKHVSKWKSIADCIQLKPDIIIIHEKGHQPTASTFHTEGNNLADKLATQGSYVVNAGKRTADGSEFEKRTADGSEFESPKKKAKVE

SEQ ID NO: 607 - protein, 2173 aa, synthetic construct
MPAAKRVKLDGGDKKYSIGLDIGTNSVGWAVITDEYKVPSKKFKVLGNTDRHSIKKNLIGALLFDSGETAEATRLKRTARRRYTRRKNRICYLQEIFSNEMAKVDDSFFHRLEESFLVEEDKKHERHPIFGNIVDEVAYHEKYPTIYHLRKKLVDSTDKADLRLIYLALAHMIKFRGHFLIEGDLNPDNSDVDKLFIQLVQTYNQLFEENPINASGVDAKAILSARLSKSRRLENLIAQLPGEKKNGLFGNLIALSLGLTPNFKSNFDLAEDAKLQLSKDTYDDDLDNLLAQIGDQYADLFLAAKNLSDAILLSDILRVNTEITKAPLSASMIKRYDEHHQDLTLLKALVRQQLPEKYKEIFFDQSKNGYAGYIDGGASQEEFYKFIKPILEKMDGTEELLVKLNREDLLRKQRTFDNGSIPHQIHLGELHAILRRQEDFYPFLKDNREKIEKILTFRIPYYVGPLARGNSRFAWMTRKSEETITPWNFEEVVDKGASAQSFIERMTNFDKNLPNEKVLPKHSLLYEYFTVYNELTKVKYVTEGMRKPAFLSGEQKKAIVDLLFKTNRKVTVKQLKEDYFKKIECFDSVEISGVEDRFNASLGTYHDLLKIIKDKDFLDNEENEDILEDIVLTLTLFEDREMIEERLKTYAHLFDDKVMKQLKRRRYTGWGRLSRKLINGIRDKQSGKTILDFLKSDGFANRNFMQLIHDDSLTFKEDIQKAQVSGQGDSLHEHIANLAGSPAIKKGILQTVKVVDELVKVMGRHKPENIVIEMARENQTTQKGQKNSRERMKRIEEGIKELGSQILKEHPVENTQLQNEKLYLYYLQNGRDMYVDQELDINRLSDYDVDHIVPQSFLKDDSIDNKVLTRSDKARGKSDNVPSEEVVKKMKNYWRQLLNAKLITQRKFDNLTKAERGGLSELDKAGFIKRQLVETRQITKHVAQILDSRMNTKYDENDKLIREVKVITLKSKLVSDFRKDFQFYKVREINNYHHAHDAYLNAVVGTALIKKYPKLESEFVYGDYKVYDVRKMIAKSEQEIGKATAKYFFYSNIMNFFKTEITLANGEIRKRPLIETNGETGEIVWDKGRDFATVRKVLSMPQVNIVKKTEVQTGGFSKESILPKRNSDKLIARKKDWDPKKYGGFDSPTVAYSVLVVAKVEKGKSKKLKSVKELLGITIMERSSFEKNPIDFLEAKGYKEVKKDLIIKLPKYSLFELENGRKRMLASAGELQKGNELALPSKYVNFLYLASHYEKLKGSPEDNEQKQLFVEQHKHYLDEIIEQISEFSKRVILADANLDKVLSAYNKHRDKPIREQAENIIHLFTLTNLGAPAAFKYFDTTIDRKRYTSTKEVLDATLIHQSITGLYETRIDLSQLGGDGGGGSEAAAKGGMDPLQLLQPLEAEIKGTKLKAHWNSGATITCVPQAFLEEEVPIKNIWIKTIHGEKEQPVYYLTFKIQGRKVEAEVISSPYDYILVSPSDIPWLMKKPLQLTTLVPLQEYEERLLKQTMLTGSYKEKLQSLFLKYDALWQHWENQVGHRRIKPHHIATGTVNPRPQKQYPINPKAKASIQTVINDLLKQGVLIQQNSIMNTPVYPVPKPDGKWRMVLDYREVNKTIPLIAAQNQHSAGILSSIFRGKYKTTLDLSNGFWAHSITPESYWLTAFTWLGQQYCWTRLPQGFLNSPALFNADVVDLLKEVPNVQVYVDDIYISHDDPREHLEQLEKVFSLLLNAGYVVSLKKSEIAQHEVEFLGFNITKEGRGLTETFKQKLLNITPPRDLKQLQSILGLLNFARNFIPNFSELVKPLYNIIATAPGKYITWTTDNSQQLQNIISMLNSAENLEERNPEVRLIMKVNTSPSAGYIRFYNEFAKRPIMYLNYVYTKAEVKFTNTEKLLTTIHKGLIKALDLGMGQEILVYSPIVSMTKIQKTPLPERKALPIRWITWMSYLEDPRIQFHYDKTLPELQQVPTVTDDIIAKIKHPSEFSMVFYTDGSAIKHPNVNKSHNAGMGIAQVQFKPEFTVINTWSIPLGDHTAQLAEVAAVEFACKKALKIDGPVLIVTDSFYVAESVNKELPYWQSNGFFNNKKKPLKHVSKWKSIADCIQLKPDIIIIHEKGHQPTASTFHTEGNNLADKLATQGSYVVNAGKRTADGSEFEKRTADGSEFESPKKKAKVE

SEQ ID NO: 608 - protein, 2170 aa, synthetic construct
MPAAKRVKLDGGDKKYSIGLDIGTNSVGWAVITDEYKVPSKKFKVLGNTDRHSIKKNLIGALLFDSGETAEATRLKRTARRRYTRRKNRICYLQEIFSNEMAKVDDSFFHRLEESFLVEEDKKHERHPIFGNIVDEVAYHEKYPTIYHLRKKLVDSTDKADLRLIYLALAHMIKFRGHFLIEGDLNPDNSDVDKLFIQLVQTYNQLFEENPINASGVDAKAILSARLSKSRRLENLIAQLPGEKKNGLFGNLIALSLGLTPNFKSNFDLAEDAKLQLSKDTYDDDLDNLLAQIGDQYADLFLAAKNLSDAILLSDILRVNTEITKAPLSASMIKRYDEHHQDLTLLKALVRQQLPEKYKEIFFDQSKNGYAGYIDGGASQEEFYKFIKPILEKMDGTEELLVKLNREDLLRKQRTFDNGSIPHQIHLGELHAILRRQEDFYPFLKDNREKIEKILTFRIPYYVGPLARGNSRFAWMTRKSEETITPWNFEEVVDKGASAQSFIERMTNFDKNLPNEKVLPKHSLLYEYFTVYNELTKVKYVTEGMRKPAFLSGEQKKAIVDLLFKTNRKVTVKQLKEDYFKKIECFDSVEISGVEDRFNASLGTYHDLLKIIKDKDFLDNEENEDILEDIVLTLTLFEDREMIEERLKTYAHLFDDKVMKQLKRRRYTGWGRLSRKLINGIRDKQSGKTILDFLKSDGFANRNFMQLIHDDSLTFKEDIQKAQVSGQGDSLHEHIANLAGSPAIKKGILQTVKVVDELVKVMGRHKPENIVIEMARENQTTQKGQKNSRERMKRIEEGIKELGSQILKEHPVENTQLQNEKLYLYYLQNGRDMYVDQELDINRLSDYDVDHIVPQSFLKDDSIDNKVLTRSDKARGKSDNVPSEEVVKKMKNYWRQLLNAKLITQRKFDNLTKAERGGLSELDKAGFIKRQLVETRQITKHVAQILDSRMNTKYDENDKLIREVKVITLKSKLVSDFRKDFQFYKVREINNYHHAHDAYLNAVVGTALIKKYPKLESEFVYGDYKVYDVRKMIAKSEQEIGKATAKYFFYSNIMNFFKTEITLANGEIRKRPLIETNGETGEIVWDKGRDFATVRKVLSMPQVNIVKKTEVQTGGFSKESILPKRNSDKLIARKKDWDPKKYGGFDSPTVAYSVLVVAKVEKGKSKKLKSVKELLGITIMERSSFEKNPIDFLEAKGYKEVKKDLIIKLPKYSLFELENGRKRMLASAGELQKGNELALPSKYVNFLYLASHYEKLKGSPEDNEQKQLFVEQHKHYLDEIIEQISEFSKRVILADANLDKVLSAYNKHRDKPIREQAENIIHLFTLTNLGAPAAFKYFDTTIDRKRYTSTKEVLDATLIHQSITGLYETRIDLSQLGGDGGEAAAKGGMDPLQLLQPLEAEIKGTKLKAHWNSGATITCVPQAFLEEEVPIKNIWIKTIHGEKEQPVYYLTFKIQGRKVEAEVISSPYDYILVSPSDIPWLMKKPLQLTTLVPLQEYEERLLKQTMLTGSYKEKLQSLFLKYDALWQHWENQVGHRRIKPHHIATGTVNPRPQKQYPINPKAKASIQTVINDLLKQGVLIQQNSIMNTPVYPVPKPDGKWRMVLDYREVNKTIPLIAAQNQHSAGILSSIFRGKYKTTLDLSNGFWAHSITPESYWLTAFTWLGQQYCWTRLPQGFLNSPALFNADVVDLLKEVPNVQVYVDDIYISHDDPREHLEQLEKVFSLLLNAGYVVSLKKSEIAQHEVEFLGFNITKEGRGLTETFKQKLLNITPPRDLKQLQSILGLLNFARNFIPNFSELVKPLYNIIATAPGKYITWTTDNSQQLQNIISMLNSAENLEERNPEVRLIMKVNTSPSAGYIRFYNEFAKRPIMYLNYVYTKAEVKFTNTEKLLTTIHKGLIKALDLGMGQEILVYSPIVSMTKIQKTPLPERKALPIRWITWMSYLEDPRIQFHYDKTLPELQQVPTVTDDIIAKIKHPSEFSMVFYTDGSAIKHPNVNKSHNAGMGIAQVQFKPEFTVINTWSIPLGDHTAQLAEVAAVEFACKKALKIDGPVLIVTDSFYVAESVNKELPYWQSNGFFNNKKKPLKHVSKWKSIADCIQLKPDIIIIHEKGHQPTASTFHTEGNNLADKLATQGSYVVNAGKRTADGSEFEKRTADGSEFESPKKKAKVE

SEQ ID NO: 609 - protein, 2174 aa, synthetic construct
MPAAKRVKLDGGDKKYSIGLDIGTNSVGWAVITDEYKVPSKKFKVLGNTDRHSIKKNLIGALLFDSGETAEATRLKRTARRRYTRRKNRICYLQEIFSNEMAKVDDSFFHRLEESFLVEEDKKHERHPIFGNIVDEVAYHEKYPTIYHLRKKLVDSTDKADLRLIYLALAHMIKFRGHFLIEGDLNPDNSDVDKLFIQLVQTYNQLFEENPINASGVDAKAILSARLSKSRRLENLIAQLPGEKKNGLFGNLIALSLGLTPNFKSNFDLAEDAKLQLSKDTYDDDLDNLLAQIGDQYADLFLAAKNLSDAILLSDILRVNTEITKAPLSASMIKRYDEHHQDLTLLKALVRQQLPEKYKEIFFDQSKNGYAGYIDGGASQEEFYKFIKPILEKMDGTEELLVKLNREDLLRKQRTFDNGSIPHQIHLGELHAILRRQEDFYPFLKDNREKIEKILTFRIPYYVGPLARGNSRFAWMTRKSEETITPWNFEEVVDKGASAQSFIERMTNFDKNLPNEKVLPKHSLLYEYFTVYNELTKVKYVTEGMRKPAFLSGEQKKAIVDLLFKTNRKVTVKQLKEDYFKKIECFDSVEISGVEDRFNASLGTYHDLLKIIKDKDFLDNEENEDILEDIVLTLTLFEDREMIEERLKTYAHLFDDKVMKQLKRRRYTGWGRLSRKLINGIRDKQSGKTILDFLKSDGFANRNFMQLIHDDSLTFKEDIQKAQVSGQGDSLHEHIANLAGSPAIKKGILQTVKVVDELVKVMGRHKPENIVIEMARENQTTQKGQKNSRERMKRIEEGIKELGSQILKEHPVENTQLQNEKLYLYYLQNGRDMYVDQELDINRLSDYDVDHIVPQSFLKDDSIDNKVLTRSDKARGKSDNVPSEEVVKKMKNYWRQLLNAKLITQRKFDNLTKAERGGLSELDKAGFIKRQLVETRQITKHVAQILDSRMNTKYDENDKLIREVKVITLKSKLVSDFRKDFQFYKVREINNYHHAHDAYLNAVVGTALIKKYPKLESEFVYGDYKVYDVRKMIAKSEQEIGKATAKYFFYSNIMNFFKTEITLANGEIRKRPLIETNGETGEIVWDKGRDFATVRKVLSMPQVNIVKKTEVQTGGFSKESILPKRNSDKLIARKKDWDPKKYGGFDSPTVAYSVLVVAKVEKGKSKKLKSVKELLGITIMERSSFEKNPIDFLEAKGYKEVKKDLIIKLPKYSLFELENGRKRMLASAGELQKGNELALPSKYVNFLYLASHYEKLKGSPEDNEQKQLFVEQHKHYLDEIIEQISEFSKRVILADANLDKVLSAYNKHRDKPIREQAENIIHLFTLTNLGAPAAFKYFDTTIDRKRYTSTKEVLDATLIHQSITGLYETRIDLSQLGGDGGGGSPAPGSSGGMDPLQLLQPLEAEIKGTKLKAHWNSGATITCVPQAFLEEEVPIKNIWIKTIHGEKEQPVYYLTFKIQGRKVEAEVISSPYDYILVSPSDIPWLMKKPLQLTTLVPLQEYEERLLKQTMLTGSYKEKLQSLFLKYDALWQHWENQVGHRRIKPHHIATGTVNPRPQKQYPINPKAKASIQTVINDLLKQGVLIQQNSIMNTPVYPVPKPDGKWRMVLDYREVNKTIPLIAAQNQHSAGILSSIFRGKYKTTLDLSNGFWAHSITPESYWLTAFTWLGQQYCWTRLPQGFLNSPALFNADVVDLLKEVPNVQVYVDDIYISHDDPREHLEQLEKVFSLLLNAGYVVSLKKSEIAQHEVEFLGFNITKEGRGLTETFKQKLLNITPPRDLKQLQSILGLLNFARNFIPNFSELVKPLYNIIATAPGKYITWTTDNSQQLQNIISMLNSAENLEERNPEVRLIMKVNTSPSAGYIRFYNEFAKRPIMYLNYVYTKAEVKFTNTEKLLTTIHKGLIKALDLGMGQEILVYSPIVSMTKIQKTPLPERKALPIRWITWMSYLEDPRIQFHYDKTLPELQQVPTVTDDIIAKIKHPSEFSMVFYTDGSAIKHPNVNKSHNAGMGIAQVQFKPEFTVINTWSIPLGDHTAQLAEVAAVEFACKKALKIDGPVLIVTDSFYVAESVNKELPYWQSNGFFNNKKKPLKHVSKWKSIADCIQLKPDIIIIHEKGHQPTASTFHTEGNNLADKLATQGSYVVNAGKRTADGSEFEKRTADGSEFESPKKKAKVE

SEQ ID NO: 610 - protein, 2174 aa, synthetic construct
MPAAKRVKLDGGDKKYSIGLDIGTNSVGWAVITDEYKVPSKKFKVLGNTDRHSIKKNLIGALLFDSGETAEATRLKRTARRRYTRRKNRICYLQEIFSNEMAKVDDSFFHRLEESFLVEEDKKHERHPIFGNIVDEVAYHEKYPTIYHLRKKLVDSTDKADLRLIYLALAHMIKFRGHFLIEGDLNPDNSDVDKLFIQLVQTYNQLFEENPINASGVDAKAILSARLSKSRRLENLIAQLPGEKKNGLFGNLIALSLGLTPNFKSNFDLAEDAKLQLSKDTYDDDLDNLLAQIGDQYADLFLAAKNLSDAILLSDILRVNTEITKAPLSASMIKRYDEHHQDLTLLKALVRQQLPEKYKEIFFDQSKNGYAGYIDGGASQEEFYKFIKPILEKMDGTEELLVKLNREDLLRKQRTFDNGSIPHQIHLGELHAILRRQEDFYPFLKDNREKIEKILTFRIPYYVGPLARGNSRFAWMTRKSEETITPWNFEEVVDKGASAQSFIERMTNFDKNLPNEKVLPKHSLLYEYFTVYNELTKVKYVTEGMRKPAFLSGEQKKAIVDLLFKTNRKVTVKQLKEDYFKKIECFDSVEISGVEDRFNASLGTYHDLLKIIKDKDFLDNEENEDILEDIVLTLTLFEDREMIEERLKTYAHLFDDKVMKQLKRRRYTGWGRLSRKLINGIRDKQSGKTILDFLKSDGFANRNFMQLIHDDSLTFKEDIQKAQVSGQGDSLHEHIANLAGSPAIKKGILQTVKVVDELVKVMGRHKPENIVIEMARENQTTQKGQKNSRERMKRIEEGIKELGSQILKEHPVENTQLQNEKLYLYYLQNGRDMYVDQELDINRLSDYDVDHIVPQSFLKDDSIDNKVLTRSDKARGKSDNVPSEEVVKKMKNYWRQLLNAKLITQRKFDNLTKAERGGLSELDKAGFIKRQLVETRQITKHVAQILDSRMNTKYDENDKLIREVKVITLKSKLVSDFRKDFQFYKVREINNYHHAHDAYLNAVVGTALIKKYPKLESEFVYGDYKVYDVRKMIAKSEQEIGKATAKYFFYSNIMNFFKTEITLANGEIRKRPLIETNGETGEIVWDKGRDFATVRKVLSMPQVNIVKKTEVQTGGFSKESILPKRNSDKLIARKKDWDPKKYGGFDSPTVAYSVLVVAKVEKGKSKKLKSVKELLGITIMERSSFEKNPIDFLEAKGYKEVKKDLIIKLPKYSLFELENGRKRMLASAGELQKGNELALPSKYVNFLYLASHYEKLKGSPEDNEQKQLFVEQHKHYLDEIIEQISEFSKRVILADANLDKVLSAYNKHRDKPIREQAENIIHLFTLTNLGAPAAFKYFDTTIDRKRYTSTKEVLDATLIHQSITGLYETRIDLSQLGGDGGGSSGGGGGSGGMDPLQLLQPLEAEIKGTKLKAHWNSGATITCVPQAFLEEEVPIKNIWIKTIHGEKEQPVYYLTFKIQGRKVEAEVISSPYDYILVSPSDIPWLMKKPLQLTTLVPLQEYEERLLKQTMLTGSYKEKLQSLFLKYDALWQHWENQVGHRRIKPHHIATGTVNPRPQKQYPINPKAKASIQTVINDLLKQGVLIQQNSIMNTPVYPVPKPDGKWRMVLDYREVNKTIPLIAAQNQHSAGILSSIFRGKYKTTLDLSNGFWAHSITPESYWLTAFTWLGQQYCWTRLPQGFLNSPALFNADVVDLLKEVPNVQVYVDDIYISHDDPREHLEQLEKVFSLLLNAGYVVSLKKSEIAQHEVEFLGFNITKEGRGLTETFKQKLLNITPPRDLKQLQSILGLLNFARNFIPNFSELVKPLYNIIATAPGKYITWTTDNSQQLQNIISMLNSAENLEERNPEVRLIMKVNTSPSAGYIRFYNEFAKRPIMYLNYVYTKAEVKFTNTEKLLTTIHKGLIKALDLGMGQEILVYSPIVSMTKIQKTPLPERKALPIRWITWMSYLEDPRIQFHYDKTLPELQQVPTVTDDIIAKIKHPSEFSMVFYTDGSAIKHPNVNKSHNAGMGIAQVQFKPEFTVINTWSIPLGDHTAQLAEVAAVEFACKKALKIDGPVLIVTDSFYVAESVNKELPYWQSNGFFNNKKKPLKHVSKWKSIADCIQLKPDIIIIHEKGHQPTASTFHTEGNNLADKLATQGSYVVNAGKRTADGSEFEKRTADGSEFESPKKKAKVE

SEQ ID NO: 611 - protein, 2180 aa, synthetic construct
MPAAKRVKLDGGDKKYSIGLDIGTNSVGWAVITDEYKVPSKKFKVLGNTDRHSIKKNLIGALLFDSGETAEATRLKRTARRRYTRRKNRICYLQEIFSNEMAKVDDSFFHRLEESFLVEEDKKHERHPIFGNIVDEVAYHEKYPTIYHLRKKLVDSTDKADLRLIYLALAHMIKFRGHFLIEGDLNPDNSDVDKLFIQLVQTYNQLFEENPINASGVDAKAILSARLSKSRRLENLIAQLPGEKKNGLFGNLIALSLGLTPNFKSNFDLAEDAKLQLSKDTYDDDLDNLLAQIGDQYADLFLAAKNLSDAILLSDILRVNTEITKAPLSASMIKRYDEHHQDLTLLKALVRQQLPEKYKEIFFDQSKNGYAGYIDGGASQEEFYKFIKPILEKMDGTEELLVKLNREDLLRKQRTFDNGSIPHQIHLGELHAILRRQEDFYPFLKDNREKIEKILTFRIPYYVGPLARGNSRFAWMTRKSEETITPWNFEEVVDKGASAQSFIERMTNFDKNLPNEKVLPKHSLLYEYFTVYNELTKVKYVTEGMRKPAFLSGEQKKAIVDLLFKTNRKVTVKQLKEDYFKKIECFDSVEISGVEDRFNASLGTYHDLLKIIKDKDFLDNEENEDILEDIVLTLTLFEDREMIEERLKTYAHLFDDKVMKQLKRRRYTGWGRLSRKLINGIRDKQSGKTILDFLKSDGFANRNFMQLIHDDSLTFKEDIQKAQVSGQGDSLHEHIANLAGSPAIKKGILQTVKVVDELVKVMGRHKPENIVIEMARENQTTQKGQKNSRERMKRIEEGIKELGSQILKEHPVENTQLQNEKLYLYYLQNGRDMYVDQELDINRLSDYDVDHIVPQSFLKDDSIDNKVLTRSDKARGKSDNVPSEEVVKKMKNYWRQLLNAKLITQRKFDNLTKAERGGLSELDKAGFIKRQLVETRQITKHVAQILDSRMNTKYDENDKLIREVKVITLKSKLVSDFRKDFQFYKVREINNYHHAHDAYLNAVVGTALIKKYPKLESEFVYGDYKVYDVRKMIAKSEQEIGKATAKYFFYSNIMNFFKTEITLANGEIRKRPLIETNGETGEIVWDKGRDFATVRKVLSMPQVNIVKKTEVQTGGFSKESILPKRNSDKLIARKKDWDPKKYGGFDSPTVAYSVLVVAKVEKGKSKKLKSVKELLGITIMERSSFEKNPIDFLEAKGYKEVKKDLIIKLPKYSLFELENGRKRMLASAGELQKGNELALPSKYVNFLYLASHYEKLKGSPEDNEQKQLFVEQHKHYLDEIIEQISEFSKRVILADANLDKVLSAYNKHRDKPIREQAENIIHLFTLTNLGAPAAFKYFDTTIDRKRYTSTKEVLDATLIHQSITGLYETRIDLSQLGGDGGGGGGSEAAAKGGGGSGGMDPLQLLQPLEAEIKGTKLKAHWNSGATITCVPQAFLEEEVPIKNIWIKTIHGEKEQPVYYLTFKIQGRKVEAEVISSPYDYILVSPSDIPWLMKKPLQLTTLVPLQEYEERLLKQTMLTGSYKEKLQSLFLKYDALWQHWENQVGHRRIKPHHIATGTVNPRPQKQYPINPKAKASIQTVINDLLKQGVLIQQNSIMNTPVYPVPKPDGKWRMVLDYREVNKTIPLIAAQNQHSAGILSSIFRGKYKTTLDLSNGFWAHSITPESYWLTAFTWLGQQYCWTRLPQGFLNSPALFNADVVDLLKEVPNVQVYVDDIYISHDDPREHLEQLEKVFSLLLNAGYVVSLKKSEIAQHEVEFLGFNITKEGRGLTETFKQKLLNITPPRDLKQLQSILGLLNFARNFIPNFSELVKPLYNIIATAPGKYITWTTDNSQQLQNIISMLNSAENLEERNPEVRLIMKVNTSPSAGYIRFYNEFAKRPIMYLNYVYTKAEVKFTNTEKLLTTIHKGLIKALDLGMGQEILVYSPIVSMTKIQKTPLPERKALPIRWITWMSYLEDPRIQFHYDKTLPELQQVPTVTDDIIAKIKHPSEFSMVFYTDGSAIKHPNVNKSHNAGMGIAQVQFKPEFTVINTWSIPLGDHTAQLAEVAAVEFACKKALKIDGPVLIVTDSFYVAESVNKELPYWQSNGFFNNKKKPLKHVSKWKSIADCIQLKPDIIIIHEKGHQPTASTFHTEGNNLADKLATQGSYVVNAGKRTADGSEFEKRTADGSEFESPKKKAKVE

SEQ ID NO: 612 - protein, 2174 aa, synthetic construct
MPAAKRVKLDGGDKKYSIGLDIGTNSVGWAVITDEYKVPSKKFKVLGNTDRHSIKKNLIGALLFDSGETAEATRLKRTARRRYTRRKNRICYLQEIFSNEMAKVDDSFFHRLEESFLVEEDKKHERHPIFGNIVDEVAYHEKYPTIYHLRKKLVDSTDKADLRLIYLALAHMIKFRGHFLIEGDLNPDNSDVDKLFIQLVQTYNQLFEENPINASGVDAKAILSARLSKSRRLENLIAQLPGEKKNGLFGNLIALSLGLTPNFKSNFDLAEDAKLQLSKDTYDDDLDNLLAQIGDQYADLFLAAKNLSDAILLSDILRVNTEITKAPLSASMIKRYDEHHQDLTLLKALVRQQLPEKYKEIFFDQSKNGYAGYIDGGASQEEFYKFIKPILEKMDGTEELLVKLNREDLLRKQRTFDNGSIPHQIHLGELHAILRRQEDFYPFLKDNREKIEKILTFRIPYYVGPLARGNSRFAWMTRKSEETITPWNFEEVVDKGASAQSFIERMTNFDKNLPNEKVLPKHSLLYEYFTVYNELTKVKYVTEGMRKPAFLSGEQKKAIVDLLFKTNRKVTVKQLKEDYFKKIECFDSVEISGVEDRFNASLGTYHDLLKIIKDKDFLDNEENEDILEDIVLTLTLFEDREMIEERLKTYAHLFDDKVMKQLKRRRYTGWGRLSRKLINGIRDKQSGKTILDFLKSDGFANRNFMQLIHDDSLTFKEDIQKAQVSGQGDSLHEHIANLAGSPAIKKGILQTVKVVDELVKVMGRHKPENIVIEMARENQTTQKGQKNSRERMKRIEEGIKELGSQILKEHPVENTQLQNEKLYLYYLQNGRDMYVDQELDINRLSDYDVDHIVPQSFLKDDSIDNKVLTRSDKARGKSDNVPSEEVVKKMKNYWRQLLNAKLITQRKFDNLTKAERGGLSELDKAGFIKRQLVETRQITKHVAQILDSRMNTKYDENDKLIREVKVITLKSKLVSDFRKDFQFYKVREINNYHHAHDAYLNAVVGTALIKKYPKLESEFVYGDYKVYDVRKMIAKSEQEIGKATAKYFFYSNIMNFFKTEITLANGEIRKRPLIETNGETGEIVWDKGRDFATVRKVLSMPQVNIVKKTEVQTGGFSKESILPKRNSDKLIARKKDWDPKKYGGFDSPTVAYSVLVVAKVEKGKSKKLKSVKELLGITIMERSSFEKNPIDFLEAKGYKEVKKDLIIKLPKYSLFELENGRKRMLASAGELQKGNELALPSKYVNFLYLASHYEKLKGSPEDNEQKQLFVEQHKHYLDEIIEQISEFSKRVILADANLDKVLSAYNKHRDKPIREQAENIIHLFTLTNLGAPAAFKYFDTTIDRKRYTSTKEVLDATLIHQSITGLYETRIDLSQLGGDGGGSSPAPGGGGGMDPLQLLQPLEAEIKGTKLKAHWNSGATITCVPQAFLEEEVPIKNIWIKTIHGEKEQPVYYLTFKIQGRKVEAEVISSPYDYILVSPSDIPWLMKKPLQLTTLVPLQEYEERLLKQTMLTGSYKEKLQSLFLKYDALWQHWENQVGHRRIKPHHIATGTVNPRPQKQYPINPKAKASIQTVINDLLKQGVLIQQNSIMNTPVYPVPKPDGKWRMVLDYREVNKTIPLIAAQNQHSAGILSSIFRGKYKTTLDLSNGFWAHSITPESYWLTAFTWLGQQYCWTRLPQGFLNSPALFNADVVDLLKEVPNVQVYVDDIYISHDDPREHLEQLEKVFSLLLNAGYVVSLKKSEIAQHEVEFLGFNITKEGRGLTETFKQKLLNITPPRDLKQLQSILGLLNFARNFIPNFSELVKPLYNIIATAPGKYITWTTDNSQQLQNIISMLNSAENLEERNPEVRLIMKVNTSPSAGYIRFYNEFAKRPIMYLNYVYTKAEVKFTNTEKLLTTIHKGLIKALDLGMGQEILVYSPIVSMTKIQKTPLPERKALPIRWITWMSYLEDPRIQFHYDKTLPELQQVPTVTDDIIAKIKHPSEFSMVFYTDGSAIKHPNVNKSHNAGMGIAQVQFKPEFTVINTWSIPLGDHTAQLAEVAAVEFACKKALKIDGPVLIVTDSFYVAESVNKELPYWQSNGFFNNKKKPLKHVSKWKSIADCIQLKPDIIIIHEKGHQPTASTFHTEGNNLADKLATQGSYVVNAGKRTADGSEFEKRTADGSEFESPKKKAKVE

SEQ ID NO: 613 - protein, 2176 aa, synthetic construct
MPAAKRVKLDGGDKKYSIGLDIGTNSVGWAVITDEYKVPSKKFKVLGNTDRHSIKKNLIGALLFDSGETAEATRLKRTARRRYTRRKNRICYLQEIFSNEMAKVDDSFFHRLEESFLVEEDKKHERHPIFGNIVDEVAYHEKYPTIYHLRKKLVDSTDKADLRLIYLALAHMIKFRGHFLIEGDLNPDNSDVDKLFIQLVQTYNQLFEENPINASGVDAKAILSARLSKSRRLENLIAQLPGEKKNGLFGNLIALSLGLTPNFKSNFDLAEDAKLQLSKDTYDDDLDNLLAQIGDQYADLFLAAKNLSDAILLSDILRVNTEITKAPLSASMIKRYDEHHQDLTLLKALVRQQLPEKYKEIFFDQSKNGYAGYIDGGASQEEFYKFIKPILEKMDGTEELLVKLNREDLLRKQRTFDNGSIPHQIHLGELHAILRRQEDFYPFLKDNREKIEKILTFRIPYYVGPLARGNSRFAWMTRKSEETITPWNFEEVVDKGASAQSFIERMTNFDKNLPNEKVLPKHSLLYEYFTVYNELTKVKYVTEGMRKPAFLSGEQKKAIVDLLFKTNRKVTVKQLKEDYFKKIECFDSVEISGVEDRFNASLGTYHDLLKIIKDKDFLDNEENEDILEDIVLTLTLFEDREMIEERLKTYAHLFDDKVMKQLKRRRYTGWGRLSRKLINGIRDKQSGKTILDFLKSDGFANRNFMQLIHDDSLTFKEDIQKAQVSGQGDSLHEHIANLAGSPAIKKGILQTVKVVDELVKVMGRHKPENIVIEMARENQTTQKGQKNSRERMKRIEEGIKELGSQILKEHPVENTQLQNEKLYLYYLQNGRDMYVDQELDINRLSDYDVDHIVPQSFLKDDSIDNKVLTRSDKARGKSDNVPSEEVVKKMKNYWRQLLNAKLITQRKFDNLTKAERGGLSELDKAGFIKRQLVETRQITKHVAQILDSRMNTKYDENDKLIREVKVITLKSKLVSDFRKDFQFYKVREINNYHHAHDAYLNAVVGTALIKKYPKLESEFVYGDYKVYDVRKMIAKSEQEIGKATAKYFFYSNIMNFFKTEITLANGEIRKRPLIETNGETGEIVWDKGRDFATVRKVLSMPQVNIVKKTEVQTGGFSKESILPKRNSDKLIARKKDWDPKKYGGFDSPTVAYSVLVVAKVEKGKSKKLKSVKELLGITIMERSSFEKNPIDFLEAKGYKEVKKDLIIKLPKYSLFELENGRKRMLASAGELQKGNELALPSKYVNFLYLASHYEKLKGSPEDNEQKQLFVEQHKHYLDEIIEQISEFSKRVILADANLDKVLSAYNKHRDKPIREQAENIIHLFTLTNLGAPAAFKYFDTTIDRKRYTSTKEVLDATLIHQSITGLYETRIDLSQLGGDGGGGGGSSEAAAKGGMDPLQLLQPLEAEIKGTKLKAHWNSGATITCVPQAFLEEEVPIKNIWIKTIHGEKEQPVYYLTFKIQGRKVEAEVISSPYDYILVSPSDIPWLMKKPLQLTTLVPLQEYEERLLKQTMLTGSYKEKLQSLFLKYDALWQHWENQVGHRRIKPHHIATGTVNPRPQKQYPINPKAKASIQTVINDLLKQGVLIQQNSIMNTPVYPVPKPDGKWRMVLDYREVNKTIPLIAAQNQHSAGILSSIFRGKYKTTLDLSNGFWAHSITPESYWLTAFTWLGQQYCWTRLPQGFLNSPALFNADVVDLLKEVPNVQVYVDDIYISHDDPREHLEQLEKVFSLLLNAGYVVSLKKSEIAQHEVEFLGFNITKEGRGLTETFKQKLLNITPPRDLKQLQSILGLLNFARNFIPNFSELVKPLYNIIATAPGKYITWTTDNSQQLQNIISMLNSAENLEERNPEVRLIMKVNTSPSAGYIRFYNEFAKRPIMYLNYVYTKAEVKFTNTEKLLTTIHKGLIKALDLGMGQEILVYSPIVSMTKIQKTPLPERKALPIRWITWMSYLEDPRIQFHYDKTLPELQQVPTVTDDIIAKIKHPSEFSMVFYTDGSAIKHPNVNKSHNAGMGIAQVQFKPEFTVINTWSIPLGDHTAQLAEVAAVEFACKKALKIDGPVLIVTDSFYVAESVNKELPYWQSNGFFNNKKKPLKHVSKWKSIADCIQLKPDIIIIHEKGHQPTASTFHTEGNNLADKLATQGSYVVNAGKRTADGSEFEKRTADGSEFESPKKKAKVE

SEQ ID NO: 614 - protein, 2176 aa, synthetic construct
MPAAKRVKLDGGDKKYSIGLDIGTNSVGWAVITDEYKVPSKKFKVLGNTDRHSIKKNLIGALLFDSGETAEATRLKRTARRRYTRRKNRICYLQEIFSNEMAKVDDSFFHRLEESFLVEEDKKHERHPIFGNIVDEVAYHEKYPTIYHLRKKLVDSTDKADLRLIYLALAHMIKFRGHFLIEGDLNPDNSDVDKLFIQLVQTYNQLFEENPINASGVDAKAILSARLSKSRRLENLIAQLPGEKKNGLFGNLIALSLGLTPNFKSNFDLAEDAKLQLSKDTYDDDLDNLLAQIGDQYADLFLAAKNLSDAILLSDILRVNTEITKAPLSASMIKRYDEHHQDLTLLKALVRQQLPEKYKEIFFDQSKNGYAGYIDGGASQEEFYKFIKPILEKMDGTEELLVKLNREDLLRKQRTFDNGSIPHQIHLGELHAILRRQEDFYPFLKDNREKIEKILTFRIPYYVGPLARGNSRFAWMTRKSEETITPWNFEEVVDKGASAQSFIERMTNFDKNLPNEKVLPKHSLLYEYFTVYNELTKVKYVTEGMRKPAFLSGEQKKAIVDLLFKTNRKVTVKQLKEDYFKKIECFDSVEISGVEDRFNASLGTYHDLLKIIKDKDFLDNEENEDILEDIVLTLTLFEDREMIEERLKTYAHLFDDKVMKQLKRRRYTGWGRLSRKLINGIRDKQSGKTILDFLKSDGFANRNFMQLIHDDSLTFKEDIQKAQVSGQGDSLHEHIANLAGSPAIKKGILQTVKVVDELVKVMGRHKPENIVIEMARENQTTQKGQKNSRERMKRIEEGIKELGSQILKEHPVENTQLQNEKLYLYYLQNGRDMYVDQELDINRLSDYDVDHIVPQSFLKDDSIDNKVLTRSDKARGKSDNVPSEEVVKKMKNYWRQLLNAKLITQRKFDNLTKAERGGLSELDKAGFIKRQLVETRQITKHVAQILDSRMNTKYDENDKLIREVKVITLKSKLVSDFRKDFQFYKVREINNYHHAHDAYLNAVVGTALIKKYPKLESEFVYGDYKVYDVRKMIAKSEQEIGKATAKYFFYSNIMNFFKTEITLANGEIRKRPLIETNGETGEIVWDKGRDFATVRKVLSMPQVNIVKKTEVQTGGFSKESILPKRNSDKLIARKKDWDPKKYGGFDSPTVAYSVLVVAKVEKGKSKKLKSVKELLGITIMERSSFEKNPIDFLEAKGYKEVKKDLIIKLPKYSLFELENGRKRMLASAGELQKGNELALPSKYVNFLYLASHYEKLKGSPEDNEQKQLFVEQHKHYLDEIIEQISEFSKRVILADANLDKVLSAYNKHRDKPIREQAENIIHLFTLTNLGAPAAFKYFDTTIDRKRYTSTKEVLDATLIHQSITGLYETRIDLSQLGGDGGGGSGSSEAAAKGGMDPLQLLQPLEAEIKGTKLKAHWNSGATITCVPQAFLEEEVPIKNIWIKTIHGEKEQPVYYLTFKIQGRKVEAEVISSPYDYILVSPSDIPWLMKKPLQLTTLVPLQEYEERLLKQTMLTGSYKEKLQSLFLKYDALWQHWENQVGHRRIKPHHIATGTVNPRPQKQYPINPKAKASIQTVINDLLKQGVLIQQNSIMNTPVYPVPKPDGKWRMVLDYREVNKTIPLIAAQNQHSAGILSSIFRGKYKTTLDLSNGFWAHSITPESYWLTAFTWLGQQYCWTRLPQGFLNSPALFNADVVDLLKEVPNVQVYVDDIYISHDDPREHLEQLEKVFSLLLNAGYVVSLKKSEIAQHEVEFLGFNITKEGRGLTETFKQKLLNITPPRDLKQLQSILGLLNFARNFIPNFSELVKPLYNIIATAPGKYITWTTDNSQQLQNIISMLNSAENLEERNPEVRLIMKVNTSPSAGYIRFYNEFAKRPIMYLNYVYTKAEVKFTNTEKLLTTIHKGLIKALDLGMGQEILVYSPIVSMTKIQKTPLPERKALPIRWITWMSYLEDPRIQFHYDKTLPELQQVPTVTDDIIAKIKHPSEFSMVFYTDGSAIKHPNVNKSHNAGMGIAQVQFKPEFTVINTWSIPLGDHTAQLAEVAAVEFACKKALKIDGPVLIVTDSFYVAESVNKELPYWQSNGFFNNKKKPLKHVSKWKSIADCIQLKPDIIIIHEKGHQPTASTFHTEGNNLADKLATQGSYVVNAGKRTADGSEFEKRTADGSEFESPKKKAKVE

SEQ ID NO: 615 - protein, 2185 aa, synthetic construct
MPAAKRVKLDGGDKKYSIGLDIGTNSVGWAVITDEYKVPSKKFKVLGNTDRHSIKKNLIGALLFDSGETAEATRLKRTARRRYTRRKNRICYLQEIFSNEMAKVDDSFFHRLEESFLVEEDKKHERHPIFGNIVDEVAYHEKYPTIYHLRKKLVDSTDKADLRLIYLALAHMIKFRGHFLIEGDLNPDNSDVDKLFIQLVQTYNQLFEENPINASGVDAKAILSARLSKSRRLENLIAQLPGEKKNGLFGNLIALSLGLTPNFKSNFDLAEDAKLQLSKDTYDDDLDNLLAQIGDQYADLFLAAKNLSDAILLSDILRVNTEITKAPLSASMIKRYDEHHQDLTLLKALVRQQLPEKYKEIFFDQSKNGYAGYIDGGASQEEFYKFIKPILEKMDGTEELLVKLNREDLLRKQRTFDNGSIPHQIHLGELHAILRRQEDFYPFLKDNREKIEKILTFRIPYYVGPLARGNSRFAWMTRKSEETITPWNFEEVVDKGASAQSFIERMTNFDKNLPNEKVLPKHSLLYEYFTVYNELTKVKYVTEGMRKPAFLSGEQKKAIVDLLFKTNRKVTVKQLKEDYFKKIECFDSVEISGVEDRFNASLGTYHDLLKIIKDKDFLDNEENEDILEDIVLTLTLFEDREMIEERLKTYAHLFDDKVMKQLKRRRYTGWGRLSRKLINGIRDKQSGKTILDFLKSDGFANRNFMQLIHDDSLTFKEDIQKAQVSGQGDSLHEHIANLAGSPAIKKGILQTVKVVDELVKVMGRHKPENIVIEMARENQTTQKGQKNSRERMKRIEEGIKELGSQILKEHPVENTQLQNEKLYLYYLQNGRDMYVDQELDINRLSDYDVDHIVPQSFLKDDSIDNKVLTRSDKARGKSDNVPSEEVVKKMKNYWRQLLNAKLITQRKFDNLTKAERGGLSELDKAGFIKRQLVETRQITKHVAQILDSRMNTKYDENDKLIREVKVITLKSKLVSDFRKDFQFYKVREINNYHHAHDAYLNAVVGTALIKKYPKLESEFVYGDYKVYDVRKMIAKSEQEIGKATAKYFFYSNIMNFFKTEITLANGEIRKRPLIETNGETGEIVWDKGRDFATVRKVLSMPQVNIVKKTEVQTGGFSKESILPKRNSDKLIARKKDWDPKKYGGFDSPTVAYSVLVVAKVEKGKSKKLKSVKELLGITIMERSSFEKNPIDFLEAKGYKEVKKDLIIKLPKYSLFELENGRKRMLASAGELQKGNELALPSKYVNFLYLASHYEKLKGSPEDNEQKQLFVEQHKHYLDEIIEQISEFSKRVILADANLDKVLSAYNKHRDKPIREQAENIIHLFTLTNLGAPAAFKYFDTTIDRKRYTSTKEVLDATLIHQSITGLYETRIDLSQLGGDGGGGGGSGGGGSGGGGSGGGGSGGMDPLQLLQPLEAEIKGTKLKAHWNSGATITCVPQAFLEEEVPIKNIWIKTIHGEKEQPVYYLTFKIQGRKVEAEVISSPYDYILVSPSDIPWLMKKPLQLTTLVPLQEYEERLLKQTMLTGSYKEKLQSLFLKYDALWQHWENQVGHRRIKPHHIATGTVNPRPQKQYPINPKAKASIQTVINDLLKQGVLIQQNSIMNTPVYPVPKPDGKWRMVLDYREVNKTIPLIAAQNQHSAGILSSIFRGKYKTTLDLSNGFWAHSITPESYWLTAFTWLGQQYCWTRLPQGFLNSPALFNADVVDLLKEVPNVQVYVDDIYISHDDPREHLEQLEKVFSLLLNAGYVVSLKKSEIAQHEVEFLGFNITKEGRGLTETFKQKLLNITPPRDLKQLQSILGLLNFARNFIPNFSELVKPLYNIIATAPGKYITWTTDNSQQLQNIISMLNSAENLEERNPEVRLIMKVNTSPSAGYIRFYNEFAKRPIMYLNYVYTKAEVKFTNTEKLLTTIHKGLIKALDLGMGQEILVYSPIVSMTKIQKTPLPERKALPIRWITWMSYLEDPRIQFHYDKTLPELQQVPTVTDDIIAKIKHPSEFSMVFYTDGSAIKHPNVNKSHNAGMGIAQVQFKPEFTVINTWSIPLGDHTAQLAEVAAVEFACKKALKIDGPVLIVTDSFYVAESVNKELPYWQSNGFFNNKKKPLKHVSKWKSIADCIQLKPDIIIIHEKGHQPTASTFHTEGNNLADKLATQGSYVVNAGKRTADGSEFEKRTADGSEFESPKKKAKVE

SEQ ID NO: 616 - protein, 2176 aa, synthetic construct
MPAAKRVKLDGGDKKYSIGLDIGTNSVGWAVITDEYKVPSKKFKVLGNTDRHSIKKNLIGALLFDSGETAEATRLKRTARRRYTRRKNRICYLQEIFSNEMAKVDDSFFHRLEESFLVEEDKKHERHPIFGNIVDEVAYHEKYPTIYHLRKKLVDSTDKADLRLIYLALAHMIKFRGHFLIEGDLNPDNSDVDKLFIQLVQTYNQLFEENPINASGVDAKAILSARLSKSRRLENLIAQLPGEKKNGLFGNLIALSLGLTPNFKSNFDLAEDAKLQLSKDTYDDDLDNLLAQIGDQYADLFLAAKNLSDAILLSDILRVNTEITKAPLSASMIKRYDEHHQDLTLLKALVRQQLPEKYKEIFFDQSKNGYAGYIDGGASQEEFYKFIKPILEKMDGTEELLVKLNREDLLRKQRTFDNGSIPHQIHLGELHAILRRQEDFYPFLKDNREKIEKILTFRIPYYVGPLARGNSRFAWMTRKSEETITPWNFEEVVDKGASAQSFIERMTNFDKNLPNEKVLPKHSLLYEYFTVYNELTKVKYVTEGMRKPAFLSGEQKKAIVDLLFKTNRKVTVKQLKEDYFKKIECFDSVEISGVEDRFNASLGTYHDLLKIIKDKDFLDNEENEDILEDIVLTLTLFEDREMIEERLKTYAHLFDDKVMKQLKRRRYTGWGRLSRKLINGIRDKQSGKTILDFLKSDGFANRNFMQLIHDDSLTFKEDIQKAQVSGQGDSLHEHIANLAGSPAIKKGILQTVKVVDELVKVMGRHKPENIVIEMARENQTTQKGQKNSRERMKRIEEGIKELGSQILKEHPVENTQLQNEKLYLYYLQNGRDMYVDQELDINRLSDYDVDHIVPQSFLKDDSIDNKVLTRSDKARGKSDNVPSEEVVKKMKNYWRQLLNAKLITQRKFDNLTKAERGGLSELDKAGFIKRQLVETRQITKHVAQILDSRMNTKYDENDKLIREVKVITLKSKLVSDFRKDFQFYKVREINNYHHAHDAYLNAVVGTALIKKYPKLESEFVYGDYKVYDVRKMIAKSEQEIGKATAKYFFYSNIMNFFKTEITLANGEIRKRPLIETNGETGEIVWDKGRDFATVRKVLSMPQVNIVKKTEVQTGGFSKESILPKRNSDKLIARKKDWDPKKYGGFDSPTVAYSVLVVAKVEKGKSKKLKSVKELLGITIMERSSFEKNPIDFLEAKGYKEVKKDLIIKLPKYSLFELENGRKRMLASAGELQKGNELALPSKYVNFLYLASHYEKLKGSPEDNEQKQLFVEQHKHYLDEIIEQISEFSKRVILADANLDKVLSAYNKHRDKPIREQAENIIHLFTLTNLGAPAAFKYFDTTIDRKRYTSTKEVLDATLIHQSITGLYETRIDLSQLGGDGGPAPEAAAKGGGGGMDPLQLLQPLEAEIKGTKLKAHWNSGATITCVPQAFLEEEVPIKNIWIKTIHGEKEQPVYYLTFKIQGRKVEAEVISSPYDYILVSPSDIPWLMKKPLQLTTLVPLQEYEERLLKQTMLTGSYKEKLQSLFLKYDALWQHWENQVGHRRIKPHHIATGTVNPRPQKQYPINPKAKASIQTVINDLLKQGVLIQQNSIMNTPVYPVPKPDGKWRMVLDYREVNKTIPLIAAQNQHSAGILSSIFRGKYKTTLDLSNGFWAHSITPESYWLTAFTWLGQQYCWTRLPQGFLNSPALFNADVVDLLKEVPNVQVYVDDIYISHDDPREHLEQLEKVFSLLLNAGYVVSLKKSEIAQHEVEFLGFNITKEGRGLTETFKQKLLNITPPRDLKQLQSILGLLNFARNFIPNFSELVKPLYNIIATAPGKYITWTTDNSQQLQNIISMLNSAENLEERNPEVRLIMKVNTSPSAGYIRFYNEFAKRPIMYLNYVYTKAEVKFTNTEKLLTTIHKGLIKALDLGMGQEILVYSPIVSMTKIQKTPLPERKALPIRWITWMSYLEDPRIQFHYDKTLPELQQVPTVTDDIIAKIKHPSEFSMVFYTDGSAIKHPNVNKSHNAGMGIAQVQFKPEFTVINTWSIPLGDHTAQLAEVAAVEFACKKALKIDGPVLIVTDSFYVAESVNKELPYWQSNGFFNNKKKPLKHVSKWKSIADCIQLKPDIIIIHEKGHQPTASTFHTEGNNLADKLATQGSYVVNAGKRTADGSEFEKRTADGSEFESPKKKAKVE

SEQ ID NO: 617 - protein, 2174 aa, synthetic construct
MPAAKRVKLDGGDKKYSIGLDIGTNSVGWAVITDEYKVPSKKFKVLGNTDRHSIKKNLIGALLFDSGETAEATRLKRTARRRYTRRKNRICYLQEIFSNEMAKVDDSFFHRLEESFLVEEDKKHERHPIFGNIVDEVAYHEKYPTIYHLRKKLVDSTDKADLRLIYLALAHMIKFRGHFLIEGDLNPDNSDVDKLFIQLVQTYNQLFEENPINASGVDAKAILSARLSKSRRLENLIAQLPGEKKNGLFGNLIALSLGLTPNFKSNFDLAEDAKLQLSKDTYDDDLDNLLAQIGDQYADLFLAAKNLSDAILLSDILRVNTEITKAPLSASMIKRYDEHHQDLTLLKALVRQQLPEKYKEIFFDQSKNGYAGYIDGGASQEEFYKFIKPILEKMDGTEELLVKLNREDLLRKQRTFDNGSIPHQIHLGELHAILRRQEDFYPFLKDNREKIEKILTFRIPYYVGPLARGNSRFAWMTRKSEETITPWNFEEVVDKGASAQSFIERMTNFDKNLPNEKVLPKHSLLYEYFTVYNELTKVKYVTEGMRKPAFLSGEQKKAIVDLLFKTNRKVTVKQLKEDYFKKIECFDSVEISGVEDRFNASLGTYHDLLKIIKDKDFLDNEENEDILEDIVLTLTLFEDREMIEERLKTYAHLFDDKVMKQLKRRRYTGWGRLSRKLINGIRDKQSGKTILDFLKSDGFANRNFMQLIHDDSLTFKEDIQKAQVSGQGDSLHEHIANLAGSPAIKKGILQTVKVVDELVKVMGRHKPENIVIEMARENQTTQKGQKNSRERMKRIEEGIKELGSQILKEHPVENTQLQNEKLYLYYLQNGRDMYVDQELDINRLSDYDVDHIVPQSFLKDDSIDNKVLTRSDKARGKSDNVPSEEVVKKMKNYWRQLLNAKLITQRKFDNLTKAERGGLSELDKAGFIKRQLVETRQITKHVAQILDSRMNTKYDENDKLIREVKVITLKSKLVSDFRKDFQFYKVREINNYHHAHDAYLNAVVGTALIKKYPKLESEFVYGDYKVYDVRKMIAKSEQEIGKATAKYFFYSNIMNFFKTEITLANGEIRKRPLIETNGETGEIVWDKGRDFATVRKVLSMPQVNIVKKTEVQTGGFSKESILPKRNSDKLIARKKDWDPKKYGGFDSPTVAYSVLVVAKVEKGKSKKLKSVKELLGITIMERSSFEKNPIDFLEAKGYKEVKKDLIIKLPKYSLFELENGRKRMLASAGELQKGNELALPSKYVNFLYLASHYEKLKGSPEDNEQKQLFVEQHKHYLDEIIEQISEFSKRVILADANLDKVLSAYNKHRDKPIREQAENIIHLFTLTNLGAPAAFKYFDTTIDRKRYTSTKEVLDATLIHQSITGLYETRIDLSQLGGDGGPAPGSSGGGGGMDPLQLLQPLEAEIKGTKLKAHWNSGATITCVPQAFLEEEVPIKNIWIKTIHGEKEQPVYYLTFKIQGRKVEAEVISSPYDYILVSPSDIPWLMKKPLQLTTLVPLQEYEERLLKQTMLTGSYKEKLQSLFLKYDALWQHWENQVGHRRIKPHHIATGTVNPRPQKQYPINPKAKASIQTVINDLLKQGVLIQQNSIMNTPVYPVPKPDGKWRMVLDYREVNKTIPLIAAQNQHSAGILSSIFRGKYKTTLDLSNGFWAHSITPESYWLTAFTWLGQQYCWTRLPQGFLNSPALFNADVVDLLKEVPNVQVYVDDIYISHDDPREHLEQLEKVFSLLLNAGYVVSLKKSEIAQHEVEFLGFNITKEGRGLTETFKQKLLNITPPRDLKQLQSILGLLNFARNFIPNFSELVKPLYNIIATAPGKYITWTTDNSQQLQNIISMLNSAENLEERNPEVRLIMKVNTSPSAGYIRFYNEFAKRPIMYLNYVYTKAEVKFTNTEKLLTTIHKGLIKALDLGMGQEILVYSPIVSMTKIQKTPLPERKALPIRWITWMSYLEDPRIQFHYDKTLPELQQVPTVTDDIIAKIKHPSEFSMVFYTDGSAIKHPNVNKSHNAGMGIAQVQFKPEFTVINTWSIPLGDHTAQLAEVAAVEFACKKALKIDGPVLIVTDSFYVAESVNKELPYWQSNGFFNNKKKPLKHVSKWKSIADCIQLKPDIIIIHEKGHQPTASTFHTEGNNLADKLATQGSYVVNAGKRTADGSEFEKRTADGSEFESPKKKAKVE

SEQ ID NO: 618 - protein, 2174 aa, synthetic construct
MPAAKRVKLDGGDKKYSIGLDIGTNSVGWAVITDEYKVPSKKFKVLGNTDRHSIKKNLIGALLFDSGETAEATRLKRTARRRYTRRKNRICYLQEIFSNEMAKVDDSFFHRLEESFLVEEDKKHERHPIFGNIVDEVAYHEKYPTIYHLRKKLVDSTDKADLRLIYLALAHMIKFRGHFLIEGDLNPDNSDVDKLFIQLVQTYNQLFEENPINASGVDAKAILSARLSKSRRLENLIAQLPGEKKNGLFGNLIALSLGLTPNFKSNFDLAEDAKLQLSKDTYDDDLDNLLAQIGDQYADLFLAAKNLSDAILLSDILRVNTEITKAPLSASMIKRYDEHHQDLTLLKALVRQQLPEKYKEIFFDQSKNGYAGYIDGGASQEEFYKFIKPILEKMDGTEELLVKLNREDLLRKQRTFDNGSIPHQIHLGELHAILRRQEDFYPFLKDNREKIEKILTFRIPYYVGPLARGNSRFAWMTRKSEETITPWNFEEVVDKGASAQSFIERMTNFDKNLPNEKVLPKHSLLYEYFTVYNELTKVKYVTEGMRKPAFLSGEQKKAIVDLLFKTNRKVTVKQLKEDYFKKIECFDSVEISGVEDRFNASLGTYHDLLKIIKDKDFLDNEENEDILEDIVLTLTLFEDREMIEERLKTYAHLFDDKVMKQLKRRRYTGWGRLSRKLINGIRDKQSGKTILDFLKSDGFANRNFMQLIHDDSLTFKEDIQKAQVSGQGDSLHEHIANLAGSPAIKKGILQTVKVVDELVKVMGRHKPENIVIEMARENQTTQKGQKNSRERMKRIEEGIKELGSQILKEHPVENTQLQNEKLYLYYLQNGRDMYVDQELDINRLSDYDVDHIVPQSFLKDDSIDNKVLTRSDKARGKSDNVPSEEVVKKMKNYWRQLLNAKLITQRKFDNLTKAERGGLSELDKAGFIKRQLVETRQITKHVAQILDSRMNTKYDENDKLIREVKVITLKSKLVSDFRKDFQFYKVREINNYHHAHDAYLNAVVGTALIKKYPKLESEFVYGDYKVYDVRKMIAKSEQEIGKATAKYFFYSNIMNFFKTEITLANGEIRKRPLIETNGETGEIVWDKGRDFATVRKVLSMPQVNIVKKTEVQTGGFSKESILPKRNSDKLIARKKDWDPKKYGGFDSPTVAYSVLVVAKVEKGKSKKLKSVKELLGITIMERSSFEKNPIDFLEAKGYKEVKKDLIIKLPKYSLFELENGRKRMLASAGELQKGNELALPSKYVNFLYLASHYEKLKGSPEDNEQKQLFVEQHKHYLDEIIEQISEFSKRVILADANLDKVLSAYNKHRDKPIREQAENIIHLFTLTNLGAPAAFKYFDTTIDRKRYTSTKEVLDATLIHQSITGLYETRIDLSQLGGDGGPAPGGSGGGGGMDPLQLLQPLEAEIKGTKLKAHWNSGATITCVPQAFLEEEVPIKNIWIKTIHGEKEQPVYYLTFKIQGRKVEAEVISSPYDYILVSPSDIPWLMKKPLQLTTLVPLQEYEERLLKQTMLTGSYKEKLQSLFLKYDALWQHWENQVGHRRIKPHHIATGTVNPRPQKQYPINPKAKASIQTVINDLLKQGVLIQQNSIMNTPVYPVPKPDGKWRMVLDYREVNKTIPLIAAQNQHSAGILSSIFRGKYKTTLDLSNGFWAHSITPESYWLTAFTWLGQQYCWTRLPQGFLNSPALFNADVVDLLKEVPNVQVYVDDIYISHDDPREHLEQLEKVFSLLLNAGYVVSLKKSEIAQHEVEFLGFNITKEGRGLTETFKQKLLNITPPRDLKQLQSILGLLNFARNFIPNFSELVKPLYNIIATAPGKYITWTTDNSQQLQNIISMLNSAENLEERNPEVRLIMKVNTSPSAGYIRFYNEFAKRPIMYLNYVYTKAEVKFTNTEKLLTTIHKGLIKALDLGMGQEILVYSPIVSMTKIQKTPLPERKALPIRWITWMSYLEDPRIQFHYDKTLPELQQVPTVTDDIIAKIKHPSEFSMVFYTDGSAIKHPNVNKSHNAGMGIAQVQFKPEFTVINTWSIPLGDHTAQLAEVAAVEFACKKALKIDGPVLIVTDSFYVAESVNKELPYWQSNGFFNNKKKPLKHVSKWKSIADCIQLKPDIIIIHEKGHQPTASTFHTEGNNLADKLATQGSYVVNAGKRTADGSEFEKRTADGSEFESPKKKAKVE

SEQ ID NO: 619 - protein, 2173 aa, synthetic construct
MPAAKRVKLDGGDKKYSIGLDIGTNSVGWAVITDEYKVPSKKFKVLGNTDRHSIKKNLIGALLFDSGETAEATRLKRTARRRYTRRKNRICYLQEIFSNEMAKVDDSFFHRLEESFLVEEDKKHERHPIFGNIVDEVAYHEKYPTIYHLRKKLVDSTDKADLRLIYLALAHMIKFRGHFLIEGDLNPDNSDVDKLFIQLVQTYNQLFEENPINASGVDAKAILSARLSKSRRLENLIAQLPGEKKNGLFGNLIALSLGLTPNFKSNFDLAEDAKLQLSKDTYDDDLDNLLAQIGDQYADLFLAAKNLSDAILLSDILRVNTEITKAPLSASMIKRYDEHHQDLTLLKALVRQQLPEKYKEIFFDQSKNGYAGYIDGGASQEEFYKFIKPILEKMDGTEELLVKLNREDLLRKQRTFDNGSIPHQIHLGELHAILRRQEDFYPFLKDNREKIEKILTFRIPYYVGPLARGNSRFAWMTRKSEETITPWNFEEVVDKGASAQSFIERMTNFDKNLPNEKVLPKHSLLYEYFTVYNELTKVKYVTEGMRKPAFLSGEQKKAIVDLLFKTNRKVTVKQLKEDYFKKIECFDSVEISGVEDRFNASLGTYHDLLKIIKDKDFLDNEENEDILEDIVLTLTLFEDREMIEERLKTYAHLFDDKVMKQLKRRRYTGWGRLSRKLINGIRDKQSGKTILDFLKSDGFANRNFMQLIHDDSLTFKEDIQKAQVSGQGDSLHEHIANLAGSPAIKKGILQTVKVVDELVKVMGRHKPENIVIEMARENQTTQKGQKNSRERMKRIEEGIKELGSQILKEHPVENTQLQNEKLYLYYLQNGRDMYVDQELDINRLSDYDVDHIVPQSFLKDDSIDNKVLTRSDKARGKSDNVPSEEVVKKMKNYWRQLLNAKLITQRKFDNLTKAERGGLSELDKAGFIKRQLVETRQITKHVAQILDSRMNTKYDENDKLIREVKVITLKSKLVSDFRKDFQFYKVREINNYHHAHDAYLNAVVGTALIKKYPKLESEFVYGDYKVYDVRKMIAKSEQEIGKATAKYFFYSNIMNFFKTEITLANGEIRKRPLIETNGETGEIVWDKGRDFATVRKVLSMPQVNIVKKTEVQTGGFSKESILPKRNSDKLIARKKDWDPKKYGGFDSPTVAYSVLVVAKVEKGKSKKLKSVKELLGITIMERSSFEKNPIDFLEAKGYKEVKKDLIIKLPKYSLFELENGRKRMLASAGELQKGNELALPSKYVNFLYLASHYEKLKGSPEDNEQKQLFVEQHKHYLDEIIEQISEFSKRVILADANLDKVLSAYNKHRDKPIREQAENIIHLFTLTNLGAPAAFKYFDTTIDRKRYTSTKEVLDATLIHQSITGLYETRIDLSQLGGDGGEAAAKPAPGGMDPLQLLQPLEAEIKGTKLKAHWNSGATITCVPQAFLEEEVPIKNIWIKTIHGEKEQPVYYLTFKIQGRKVEAEVISSPYDYILVSPSDIPWLMKKPLQLTTLVPLQEYEERLLKQTMLTGSYKEKLQSLFLKYDALWQHWENQVGHRRIKPHHIATGTVNPRPQKQYPINPKAKASIQTVINDLLKQGVLIQQNSIMNTPVYPVPKPDGKWRMVLDYREVNKTIPLIAAQNQHSAGILSSIFRGKYKTTLDLSNGFWAHSITPESYWLTAFTWLGQQYCWTRLPQGFLNSPALFNADVVDLLKEVPNVQVYVDDIYISHDDPREHLEQLEKVFSLLLNAGYVVSLKKSEIAQHEVEFLGFNITKEGRGLTETFKQKLLNITPPRDLKQLQSILGLLNFARNFIPNFSELVKPLYNIIATAPGKYITWTTDNSQQLQNIISMLNSAENLEERNPEVRLIMKVNTSPSAGYIRFYNEFAKRPIMYLNYVYTKAEVKFTNTEKLLTTIHKGLIKALDLGMGQEILVYSPIVSMTKIQKTPLPERKALPIRWITWMSYLEDPRIQFHYDKTLPELQQVPTVTDDIIAKIKHPSEFSMVFYTDGSAIKHPNVNKSHNAGMGIAQVQFKPEFTVINTWSIPLGDHTAQLAEVAAVEFACKKALKIDGPVLIVTDSFYVAESVNKELPYWQSNGFFNNKKKPLKHVSKWKSIADCIQLKPDIIIIHEKGHQPTASTFHTEGNNLADKLATQGSYVVNAGKRTADGSEFEKRTADGSEFESPKKKAKVE

SEQ ID NO: 620 - protein, 2176 aa, synthetic construct
MPAAKRVKLDGGDKKYSIGLDIGTNSVGWAVITDEYKVPSKKFKVLGNTDRHSIKKNLIGALLFDSGETAEATRLKRTARRRYTRRKNRICYLQEIFSNEMAKVDDSFFHRLEESFLVEEDKKHERHPIFGNIVDEVAYHEKYPTIYHLRKKLVDSTDKADLRLIYLALAHMIKFRGHFLIEGDLNPDNSDVDKLFIQLVQTYNQLFEENPINASGVDAKAILSARLSKSRRLENLIAQLPGEKKNGLFGNLIALSLGLTPNFKSNFDLAEDAKLQLSKDTYDDDLDNLLAQIGDQYADLFLAAKNLSDAILLSDILRVNTEITKAPLSASMIKRYDEHHQDLTLLKALVRQQLPEKYKEIFFDQSKNGYAGYIDGGASQEEFYKFIKPILEKMDGTEELLVKLNREDLLRKQRTFDNGSIPHQIHLGELHAILRRQEDFYPFLKDNREKIEKILTFRIPYYVGPLARGNSRFAWMTRKSEETITPWNFEEVVDKGASAQSFIERMTNFDKNLPNEKVLPKHSLLYEYFTVYNELTKVKYVTEGMRKPAFLSGEQKKAIVDLLFKTNRKVTVKQLKEDYFKKIECFDSVEISGVEDRFNASLGTYHDLLKIIKDKDFLDNEENEDILEDIVLTLTLFEDREMIEERLKTYAHLFDDKVMKQLKRRRYTGWGRLSRKLINGIRDKQSGKTILDFLKSDGFANRNFMQLIHDDSLTFKEDIQKAQVSGQGDSLHEHIANLAGSPAIKKGILQTVKVVDELVKVMGRHKPENIVIEMARENQTTQKGQKNSRERMKRIEEGIKELGSQILKEHPVENTQLQNEKLYLYYLQNGRDMYVDQELDINRLSDYDVDHIVPQSFLKDDSIDNKVLTRSDKARGKSDNVPSEEVVKKMKNYWRQLLNAKLITQRKFDNLTKAERGGLSELDKAGFIKRQLVETRQITKHVAQILDSRMNTKYDENDKLIREVKVITLKSKLVSDFRKDFQFYKVREINNYHHAHDAYLNAVVGTALIKKYPKLESEFVYGDYKVYDVRKMIAKSEQEIGKATAKYFFYSNIMNFFKTEITLANGEIRKRPLIETNGETGEIVWDKGRDFATVRKVLSMPQVNIVKKTEVQTGGFSKESILPKRNSDKLIARKKDWDPKKYGGFDSPTVAYSVLVVAKVEKGKSKKLKSVKELLGITIMERSSFEKNPIDFLEAKGYKEVKKDLIIKLPKYSLFELENGRKRMLASAGELQKGNELALPSKYVNFLYLASHYEKLKGSPEDNEQKQLFVEQHKHYLDEIIEQISEFSKRVILADANLDKVLSAYNKHRDKPIREQAENIIHLFTLTNLGAPAAFKYFDTTIDRKRYTSTKEVLDATLIHQSITGLYETRIDLSQLGGDGGGGGEAAAKGSSGGMDPLQLLQPLEAEIKGTKLKAHWNSGATITCVPQAFLEEEVPIKNIWIKTIHGEKEQPVYYLTFKIQGRKVEAEVISSPYDYILVSPSDIPWLMKKPLQLTTLVPLQEYEERLLKQTMLTGSYKEKLQSLFLKYDALWQHWENQVGHRRIKPHHIATGTVNPRPQKQYPINPKAKASIQTVINDLLKQGVLIQQNSIMNTPVYPVPKPDGKWRMVLDYREVNKTIPLIAAQNQHSAGILSSIFRGKYKTTLDLSNGFWAHSITPESYWLTAFTWLGQQYCWTRLPQGFLNSPALFNADVVDLLKEVPNVQVYVDDIYISHDDPREHLEQLEKVFSLLLNAGYVVSLKKSEIAQHEVEFLGFNITKEGRGLTETFKQKLLNITPPRDLKQLQSILGLLNFARNFIPNFSELVKPLYNIIATAPGKYITWTTDNSQQLQNIISMLNSAENLEERNPEVRLIMKVNTSPSAGYIRFYNEFAKRPIMYLNYVYTKAEVKFTNTEKLLTTIHKGLIKALDLGMGQEILVYSPIVSMTKIQKTPLPERKALPIRWITWMSYLEDPRIQFHYDKTLPELQQVPTVTDDIIAKIKHPSEFSMVFYTDGSAIKHPNVNKSHNAGMGIAQVQFKPEFTVINTWSIPLGDHTAQLAEVAAVEFACKKALKIDGPVLIVTDSFYVAESVNKELPYWQSNGFFNNKKKPLKHVSKWKSIADCIQLKPDIIIIHEKGHQPTASTFHTEGNNLADKLATQGSYVVNAGKRTADGSEFEKRTADGSEFESPKKKAKVE

SEQ ID NO: 621 - protein, 2176 aa, synthetic construct
MPAAKRVKLDGGDKKYSIGLDIGTNSVGWAVITDEYKVPSKKFKVLGNTDRHSIKKNLIGALLFDSGETAEATRLKRTARRRYTRRKNRICYLQEIFSNEMAKVDDSFFHRLEESFLVEEDKKHERHPIFGNIVDEVAYHEKYPTIYHLRKKLVDSTDKADLRLIYLALAHMIKFRGHFLIEGDLNPDNSDVDKLFIQLVQTYNQLFEENPINASGVDAKAILSARLSKSRRLENLIAQLPGEKKNGLFGNLIALSLGLTPNFKSNFDLAEDAKLQLSKDTYDDDLDNLLAQIGDQYADLFLAAKNLSDAILLSDILRVNTEITKAPLSASMIKRYDEHHQDLTLLKALVRQQLPEKYKEIFFDQSKNGYAGYIDGGASQEEFYKFIKPILEKMDGTEELLVKLNREDLLRKQRTFDNGSIPHQIHLGELHAILRRQEDFYPFLKDNREKIEKILTFRIPYYVGPLARGNSRFAWMTRKSEETITPWNFEEVVDKGASAQSFIERMTNFDKNLPNEKVLPKHSLLYEYFTVYNELTKVKYVTEGMRKPAFLSGEQKKAIVDLLFKTNRKVTVKQLKEDYFKKIECFDSVEISGVEDRFNASLGTYHDLLKIIKDKDFLDNEENEDILEDIVLTLTLFEDREMIEERLKTYAHLFDDKVMKQLKRRRYTGWGRLSRKLINGIRDKQSGKTILDFLKSDGFANRNFMQLIHDDSLTFKEDIQKAQVSGQGDSLHEHIANLAGSPAIKKGILQTVKVVDELVKVMGRHKPENIVIEMARENQTTQKGQKNSRERMKRIEEGIKELGSQILKEHPVENTQLQNEKLYLYYLQNGRDMYVDQELDINRLSDYDVDHIVPQSFLKDDSIDNKVLTRSDKARGKSDNVPSEEVVKKMKNYWRQLLNAKLITQRKFDNLTKAERGGLSELDKAGFIKRQLVETRQITKHVAQILDSRMNTKYDENDKLIREVKVITLKSKLVSDFRKDFQFYKVREINNYHHAHDAYLNAVVGTALIKKYPKLESEFVYGDYKVYDVRKMIAKSEQEIGKATAKYFFYSNIMNFFKTEITLANGEIRKRPLIETNGETGEIVWDKGRDFATVRKVLSMPQVNIVKKTEVQTGGFSKESILPKRNSDKLIARKKDWDPKKYGGFDSPTVAYSVLVVAKVEKGKSKKLKSVKELLGITIMERSSFEKNPIDFLEAKGYKEVKKDLIIKLPKYSLFELENGRKRMLASAGELQKGNELALPSKYVNFLYLASHYEKLKGSPEDNEQKQLFVEQHKHYLDEIIEQISEFSKRVILADANLDKVLSAYNKHRDKPIREQAENIIHLFTLTNLGAPAAFKYFDTTIDRKRYTSTKEVLDATLIHQSITGLYETRIDLSQLGGDGGGGGEAAAKPAPGGMDPLQLLQPLEAEIKGTKLKAHWNSGATITCVPQAFLEEEVPIKNIWIKTIHGEKEQPVYYLTFKIQGRKVEAEVISSPYDYILVSPSDIPWLMKKPLQLTTLVPLQEYEERLLKQTMLTGSYKEKLQSLFLKYDALWQHWENQVGHRRIKPHHIATGTVNPRPQKQYPINPKAKASIQTVINDLLKQGVLIQQNSIMNTPVYPVPKPDGKWRMVLDYREVNKTIPLIAAQNQHSAGILSSIFRGKYKTTLDLSNGFWAHSITPESYWLTAFTWLGQQYCWTRLPQGFLNSPALFNADVVDLLKEVPNVQVYVDDIYISHDDPREHLEQLEKVFSLLLNAGYVVSLKKSEIAQHEVEFLGFNITKEGRGLTETFKQKLLNITPPRDLKQLQSILGLLNFARNFIPNFSELVKPLYNIIATAPGKYITWTTDNSQQLQNIISMLNSAENLEERNPEVRLIMKVNTSPSAGYIRFYNEFAKRPIMYLNYVYTKAEVKFTNTEKLLTTIHKGLIKALDLGMGQEILVYSPIVSMTKIQKTPLPERKALPIRWITWMSYLEDPRIQFHYDKTLPELQQVPTVTDDIIAKIKHPSEFSMVFYTDGSAIKHPNVNKSHNAGMGIAQVQFKPEFTVINTWSIPLGDHTAQLAEVAAVEFACKKALKIDGPVLIVTDSFYVAESVNKELPYWQSNGFFNNKKKPLKHVSKWKSIADCIQLKPDIIIIHEKGHQPTASTFHTEGNNLADKLATQGSYVVNAGKRTADGSEFEKRTADGSEFESPKKKAKVE

SEQ ID NO: 622 - protein, 2176 aa, synthetic construct
MPAAKRVKLDGGDKKYSIGLDIGTNSVGWAVITDEYKVPSKKFKVLGNTDRHSIKKNLIGALLFDSGETAEATRLKRTARRRYTRRKNRICYLQEIFSNEMAKVDDSFFHRLEESFLVEEDKKHERHPIFGNIVDEVAYHEKYPTIYHLRKKLVDSTDKADLRLIYLALAHMIKFRGHFLIEGDLNPDNSDVDKLFIQLVQTYNQLFEENPINASGVDAKAILSARLSKSRRLENLIAQLPGEKKNGLFGNLIALSLGLTPNFKSNFDLAEDAKLQLSKDTYDDDLDNLLAQIGDQYADLFLAAKNLSDAILLSDILRVNTEITKAPLSASMIKRYDEHHQDLTLLKALVRQQLPEKYKEIFFDQSKNGYAGYIDGGASQEEFYKFIKPILEKMDGTEELLVKLNREDLLRKQRTFDNGSIPHQIHLGELHAILRRQEDFYPFLKDNREKIEKILTFRIPYYVGPLARGNSRFAWMTRKSEETITPWNFEEVVDKGASAQSFIERMTNFDKNLPNEKVLPKHSLLYEYFTVYNELTKVKYVTEGMRKPAFLSGEQKKAIVDLLFKTNRKVTVKQLKEDYFKKIECFDSVEISGVEDRFNASLGTYHDLLKIIKDKDFLDNEENEDILEDIVLTLTLFEDREMIEERLKTYAHLFDDKVMKQLKRRRYTGWGRLSRKLINGIRDKQSGKTILDFLKSDGFANRNFMQLIHDDSLTFKEDIQKAQVSGQGDSLHEHIANLAGSPAIKKGILQTVKVVDELVKVMGRHKPENIVIEMARENQTTQKGQKNSRERMKRIEEGIKELGSQILKEHPVENTQLQNEKLYLYYLQNGRDMYVDQELDINRLSDYDVDHIVPQSFLKDDSIDNKVLTRSDKARGKSDNVPSEEVVKKMKNYWRQLLNAKLITQRKFDNLTKAERGGLSELDKAGFIKRQLVETRQITKHVAQILDSRMNTKYDENDKLIREVKVITLKSKLVSDFRKDFQFYKVREINNYHHAHDAYLNAVVGTALIKKYPKLESEFVYGDYKVYDVRKMIAKSEQEIGKATAKYFFYSNIMNFFKTEITLANGEIRKRPLIETNGETGEIVWDKGRDFATVRKVLSMPQVNIVKKTEVQTGGFSKESILPKRNSDKLIARKKDWDPKKYGGFDSPTVAYSVLVVAKVEKGKSKKLKSVKELLGITIMERSSFEKNPIDFLEAKGYKEVKKDLIIKLPKYSLFELENGRKRMLASAGELQKGNELALPSKYVNFLYLASHYEKLKGSPEDNEQKQLFVEQHKHYLDEIIEQISEFSKRVILADANLDKVLSAYNKHRDKPIREQAENIIHLFTLTNLGAPAAFKYFDTTIDRKRYTSTKEVLDATLIHQSITGLYETRIDLSQLGGDGGPAPGGGEAAAKGGMDPLQLLQPLEAEIKGTKLKAHWNSGATITCVPQAFLEEEVPIKNIWIKTIHGEKEQPVYYLTFKIQGRKVEAEVISSPYDYILVSPSDIPWLMKKPLQLTTLVPLQEYEERLLKQTMLTGSYKEKLQSLFLKYDALWQHWENQVGHRRIKPHHIATGTVNPRPQKQYPINPKAKASIQTVINDLLKQGVLIQQNSIMNTPVYPVPKPDGKWRMVLDYREVNKTIPLIAAQNQHSAGILSSIFRGKYKTTLDLSNGFWAHSITPESYWLTAFTWLGQQYCWTRLPQGFLNSPALFNADVVDLLKEVPNVQVYVDDIYISHDDPREHLEQLEKVFSLLLNAGYVVSLKKSEIAQHEVEFLGFNITKEGRGLTETFKQKLLNITPPRDLKQLQSILGLLNFARNFIPNFSELVKPLYNIIATAPGKYITWTTDNSQQLQNIISMLNSAENLEERNPEVRLIMKVNTSPSAGYIRFYNEFAKRPIMYLNYVYTKAEVKFTNTEKLLTTIHKGLIKALDLGMGQEILVYSPIVSMTKIQKTPLPERKALPIRWITWMSYLEDPRIQFHYDKTLPELQQVPTVTDDIIAKIKHPSEFSMVFYTDGSAIKHPNVNKSHNAGMGIAQVQFKPEFTVINTWSIPLGDHTAQLAEVAAVEFACKKALKIDGPVLIVTDSFYVAESVNKELPYWQSNGFFNNKKKPLKHVSKWKSIADCIQLKPDIIIIHEKGHQPTASTFHTEGNNLADKLATQGSYVVNAGKRTADGSEFEKRTADGSEFESPKKKAKVE

SEQ ID NO: 623 - protein, 2168 aa, synthetic construct
MPAAKRVKLDGGDKKYSIGLDIGTNSVGWAVITDEYKVPSKKFKVLGNTDRHSIKKNLIGALLFDSGETAEATRLKRTARRRYTRRKNRICYLQEIFSNEMAKVDDSFFHRLEESFLVEEDKKHERHPIFGNIVDEVAYHEKYPTIYHLRKKLVDSTDKADLRLIYLALAHMIKFRGHFLIEGDLNPDNSDVDKLFIQLVQTYNQLFEENPINASGVDAKAILSARLSKSRRLENLIAQLPGEKKNGLFGNLIALSLGLTPNFKSNFDLAEDAKLQLSKDTYDDDLDNLLAQIGDQYADLFLAAKNLSDAILLSDILRVNTEITKAPLSASMIKRYDEHHQDLTLLKALVRQQLPEKYKEIFFDQSKNGYAGYIDGGASQEEFYKFIKPILEKMDGTEELLVKLNREDLLRKQRTFDNGSIPHQIHLGELHAILRRQEDFYPFLKDNREKIEKILTFRIPYYVGPLARGNSRFAWMTRKSEETITPWNFEEVVDKGASAQSFIERMTNFDKNLPNEKVLPKHSLLYEYFTVYNELTKVKYVTEGMRKPAFLSGEQKKAIVDLLFKTNRKVTVKQLKEDYFKKIECFDSVEISGVEDRFNASLGTYHDLLKIIKDKDFLDNEENEDILEDIVLTLTLFEDREMIEERLKTYAHLFDDKVMKQLKRRRYTGWGRLSRKLINGIRDKQSGKTILDFLKSDGFANRNFMQLIHDDSLTFKEDIQKAQVSGQGDSLHEHIANLAGSPAIKKGILQTVKVVDELVKVMGRHKPENIVIEMARENQTTQKGQKNSRERMKRIEEGIKELGSQILKEHPVENTQLQNEKLYLYYLQNGRDMYVDQELDINRLSDYDVDHIVPQSFLKDDSIDNKVLTRSDKARGKSDNVPSEEVVKKMKNYWRQLLNAKLITQRKFDNLTKAERGGLSELDKAGFIKRQLVETRQITKHVAQILDSRMNTKYDENDKLIREVKVITLKSKLVSDFRKDFQFYKVREINNYHHAHDAYLNAVVGTALIKKYPKLESEFVYGDYKVYDVRKMIAKSEQEIGKATAKYFFYSNIMNFFKTEITLANGEIRKRPLIETNGETGEIVWDKGRDFATVRKVLSMPQVNIVKKTEVQTGGFSKESILPKRNSDKLIARKKDWDPKKYGGFDSPTVAYSVLVVAKVEKGKSKKLKSVKELLGITIMERSSFEKNPIDFLEAKGYKEVKKDLIIKLPKYSLFELENGRKRMLASAGELQKGNELALPSKYVNFLYLASHYEKLKGSPEDNEQKQLFVEQHKHYLDEIIEQISEFSKRVILADANLDKVLSAYNKHRDKPIREQAENIIHLFTLTNLGAPAAFKYFDTTIDRKRYTSTKEVLDATLIHQSITGLYETRIDLSQLGGDGGGGGGGMDPLQLLQPLEAEIKGTKLKAHWNSGATITCVPQAFLEEEVPIKNIWIKTIHGEKEQPVYYLTFKIQGRKVEAEVISSPYDYILVSPSDIPWLMKKPLQLTTLVPLQEYEERLLKQTMLTGSYKEKLQSLFLKYDALWQHWENQVGHRRIKPHHIATGTVNPRPQKQYPINPKAKASIQTVINDLLKQGVLIQQNSIMNTPVYPVPKPDGKWRMVLDYREVNKTIPLIAAQNQHSAGILSSIFRGKYKTTLDLSNGFWAHSITPESYWLTAFTWLGQQYCWTRLPQGFLNSPALFNADVVDLLKEVPNVQVYVDDIYISHDDPREHLEQLEKVFSLLLNAGYVVSLKKSEIAQHEVEFLGFNITKEGRGLTETFKQKLLNITPPRDLKQLQSILGLLNFARNFIPNFSELVKPLYNIIATAPGKYITWTTDNSQQLQNIISMLNSAENLEERNPEVRLIMKVNTSPSAGYIRFYNEFAKRPIMYLNYVYTKAEVKFTNTEKLLTTIHKGLIKALDLGMGQEILVYSPIVSMTKIQKTPLPERKALPIRWITWMSYLEDPRIQFHYDKTLPELQQVPTVTDDIIAKIKHPSEFSMVFYTDGSAIKHPNVNKSHNAGMGIAQVQFKPEFTVINTWSIPLGDHTAQLAEVAAVEFACKKALKIDGPVLIVTDSFYVAESVNKELPYWQSNGFFNNKKKPLKHVSKWKSIADCIQLKPDIIIIHEKGHQPTASTFHTEGNNLADKLATQGSYVVNAGKRTADGSEFEKRTADGSEFESPKKKAKVE

SEQ ID NO: 624 - protein, 2180 aa, synthetic construct
MPAAKRVKLDGGDKKYSIGLDIGTNSVGWAVITDEYKVPSKKFKVLGNTDRHSIKKNLIGALLFDSGETAEATRLKRTARRRYTRRKNRICYLQEIFSNEMAKVDDSFFHRLEESFLVEEDKKHERHPIFGNIVDEVAYHEKYPTIYHLRKKLVDSTDKADLRLIYLALAHMIKFRGHFLIEGDLNPDNSDVDKLFIQLVQTYNQLFEENPINASGVDAKAILSARLSKSRRLENLIAQLPGEKKNGLFGNLIALSLGLTPNFKSNFDLAEDAKLQLSKDTYDDDLDNLLAQIGDQYADLFLAAKNLSDAILLSDILRVNTEITKAPLSASMIKRYDEHHQDLTLLKALVRQQLPEKYKEIFFDQSKNGYAGYIDGGASQEEFYKFIKPILEKMDGTEELLVKLNREDLLRKQRTFDNGSIPHQIHLGELHAILRRQEDFYPFLKDNREKIEKILTFRIPYYVGPLARGNSRFAWMTRKSEETITPWNFEEVVDKGASAQSFIERMTNFDKNLPNEKVLPKHSLLYEYFTVYNELTKVKYVTEGMRKPAFLSGEQKKAIVDLLFKTNRKVTVKQLKEDYFKKIECFDSVEISGVEDRFNASLGTYHDLLKIIKDKDFLDNEENEDILEDIVLTLTLFEDREMIEERLKTYAHLFDDKVMKQLKRRRYTGWGRLSRKLINGIRDKQSGKTILDFLKSDGFANRNFMQLIHDDSLTFKEDIQKAQVSGQGDSLHEHIANLAGSPAIKKGILQTVKVVDELVKVMGRHKPENIVIEMARENQTTQKGQKNSRERMKRIEEGIKELGSQILKEHPVENTQLQNEKLYLYYLQNGRDMYVDQELDINRLSDYDVDHIVPQSFLKDDSIDNKVLTRSDKARGKSDNVPSEEVVKKMKNYWRQLLNAKLITQRKFDNLTKAERGGLSELDKAGFIKRQLVETRQITKHVAQILDSRMNTKYDENDKLIREVKVITLKSKLVSDFRKDFQFYKVREINNYHHAHDAYLNAVVGTALIKKYPKLESEFVYGDYKVYDVRKMIAKSEQEIGKATAKYFFYSNIMNFFKTEITLANGEIRKRPLIETNGETGEIVWDKGRDFATVRKVLSMPQVNIVKKTEVQTGGFSKESILPKRNSDKLIARKKDWDPKKYGGFDSPTVAYSVLVVAKVEKGKSKKLKSVKELLGITIMERSSFEKNPIDFLEAKGYKEVKKDLIIKLPKYSLFELENGRKRMLASAGELQKGNELALPSKYVNFLYLASHYEKLKGSPEDNEQKQLFVEQHKHYLDEIIEQISEFSKRVILADANLDKVLSAYNKHRDKPIREQAENIIHLFTLTNLGAPAAFKYFDTTIDRKRYTSTKEVLDATLIHQSITGLYETRIDLSQLGGDGGEAAAKEAAAKEAAAKGGMDPLQLLQPLEAEIKGTKLKAHWNSGATITCVPQAFLEEEVPIKNIWIKTIHGEKEQPVYYLTFKIQGRKVEAEVISSPYDYILVSPSDIPWLMKKPLQLTTLVPLQEYEERLLKQTMLTGSYKEKLQSLFLKYDALWQHWENQVGHRRIKPHHIATGTVNPRPQKQYPINPKAKASIQTVINDLLKQGVLIQQNSIMNTPVYPVPKPDGKWRMVLDYREVNKTIPLIAAQNQHSAGILSSIFRGKYKTTLDLSNGFWAHSITPESYWLTAFTWLGQQYCWTRLPQGFLNSPALFNADVVDLLKEVPNVQVYVDDIYISHDDPREHLEQLEKVFSLLLNAGYVVSLKKSEIAQHEVEFLGFNITKEGRGLTETFKQKLLNITPPRDLKQLQSILGLLNFARNFIPNFSELVKPLYNIIATAPGKYITWTTDNSQQLQNIISMLNSAENLEERNPEVRLIMKVNTSPSAGYIRFYNEFAKRPIMYLNYVYTKAEVKFTNTEKLLTTIHKGLIKALDLGMGQEILVYSPIVSMTKIQKTPLPERKALPIRWITWMSYLEDPRIQFHYDKTLPELQQVPTVTDDIIAKIKHPSEFSMVFYTDGSAIKHPNVNKSHNAGMGIAQVQFKPEFTVINTWSIPLGDHTAQLAEVAAVEFACKKALKIDGPVLIVTDSFYVAESVNKELPYWQSNGFFNNKKKPLKHVSKWKSIADCIQLKPDIIIIHEKGHQPTASTFHTEGNNLADKLATQGSYVVNAGKRTADGSEFEKRTADGSEFESPKKKAKVE

SEQ ID NO: 625 - protein, 2173 aa, synthetic construct
MPAAKRVKLDGGDKKYSIGLDIGTNSVGWAVITDEYKVPSKKFKVLGNTDRHSIKKNLIGALLFDSGETAEATRLKRTARRRYTRRKNRICYLQEIFSNEMAKVDDSFFHRLEESFLVEEDKKHERHPIFGNIVDEVAYHEKYPTIYHLRKKLVDSTDKADLRLIYLALAHMIKFRGHFLIEGDLNPDNSDVDKLFIQLVQTYNQLFEENPINASGVDAKAILSARLSKSRRLENLIAQLPGEKKNGLFGNLIALSLGLTPNFKSNFDLAEDAKLQLSKDTYDDDLDNLLAQIGDQYADLFLAAKNLSDAILLSDILRVNTEITKAPLSASMIKRYDEHHQDLTLLKALVRQQLPEKYKEIFFDQSKNGYAGYIDGGASQEEFYKFIKPILEKMDGTEELLVKLNREDLLRKQRTFDNGSIPHQIHLGELHAILRRQEDFYPFLKDNREKIEKILTFRIPYYVGPLARGNSRFAWMTRKSEETITPWNFEEVVDKGASAQSFIERMTNFDKNLPNEKVLPKHSLLYEYFTVYNELTKVKYVTEGMRKPAFLSGEQKKAIVDLLFKTNRKVTVKQLKEDYFKKIECFDSVEISGVEDRFNASLGTYHDLLKIIKDKDFLDNEENEDILEDIVLTLTLFEDREMIEERLKTYAHLFDDKVMKQLKRRRYTGWGRLSRKLINGIRDKQSGKTILDFLKSDGFANRNFMQLIHDDSLTFKEDIQKAQVSGQGDSLHEHIANLAGSPAIKKGILQTVKVVDELVKVMGRHKPENIVIEMARENQTTQKGQKNSRERMKRIEEGIKELGSQILKEHPVENTQLQNEKLYLYYLQNGRDMYVDQELDINRLSDYDVDHIVPQSFLKDDSIDNKVLTRSDKARGKSDNVPSEEVVKKMKNYWRQLLNAKLITQRKFDNLTKAERGGLSELDKAGFIKRQLVETRQITKHVAQILDSRMNTKYDENDKLIREVKVITLKSKLVSDFRKDFQFYKVREINNYHHAHDAYLNAVVGTALIKKYPKLESEFVYGDYKVYDVRKMIAKSEQEIGKATAKYFFYSNIMNFFKTEITLANGEIRKRPLIETNGETGEIVWDKGRDFATVRKVLSMPQVNIVKKTEVQTGGFSKESILPKRNSDKLIARKKDWDPKKYGGFDSPTVAYSVLVVAKVEKGKSKKLKSVKELLGITIMERSSFEKNPIDFLEAKGYKEVKKDLIIKLPKYSLFELENGRKRMLASAGELQKGNELALPSKYVNFLYLASHYEKLKGSPEDNEQKQLFVEQHKHYLDEIIEQISEFSKRVILADANLDKVLSAYNKHRDKPIREQAENIIHLFTLTNLGAPAAFKYFDTTIDRKRYTSTKEVLDATLIHQSITGLYETRIDLSQLGGDGGEAAAKGGGGGMDPLQLLQPLEAEIKGTKLKAHWNSGATITCVPQAFLEEEVPIKNIWIKTIHGEKEQPVYYLTFKIQGRKVEAEVISSPYDYILVSPSDIPWLMKKPLQLTTLVPLQEYEERLLKQTMLTGSYKEKLQSLFLKYDALWQHWENQVGHRRIKPHHIATGTVNPRPQKQYPINPKAKASIQTVINDLLKQGVLIQQNSIMNTPVYPVPKPDGKWRMVLDYREVNKTIPLIAAQNQHSAGILSSIFRGKYKTTLDLSNGFWAHSITPESYWLTAFTWLGQQYCWTRLPQGFLNSPALFNADVVDLLKEVPNVQVYVDDIYISHDDPREHLEQLEKVFSLLLNAGYVVSLKKSEIAQHEVEFLGFNITKEGRGLTETFKQKLLNITPPRDLKQLQSILGLLNFARNFIPNFSELVKPLYNIIATAPGKYITWTTDNSQQLQNIISMLNSAENLEERNPEVRLIMKVNTSPSAGYIRFYNEFAKRPIMYLNYVYTKAEVKFTNTEKLLTTIHKGLIKALDLGMGQEILVYSPIVSMTKIQKTPLPERKALPIRWITWMSYLEDPRIQFHYDKTLPELQQVPTVTDDIIAKIKHPSEFSMVFYTDGSAIKHPNVNKSHNAGMGIAQVQFKPEFTVINTWSIPLGDHTAQLAEVAAVEFACKKALKIDGPVLIVTDSFYVAESVNKELPYWQSNGFFNNKKKPLKHVSKWKSIADCIQLKPDIIIIHEKGHQPTASTFHTEGNNLADKLATQGSYVVNAGKRTADGSEFEKRTADGSEFESPKKKAKVE

SEQ ID NO: 626 - protein, 2176 aa, synthetic construct
MPAAKRVKLDGGDKKYSIGLDIGTNSVGWAVITDEYKVPSKKFKVLGNTDRHSIKKNLIGALLFDSGETAEATRLKRTARRRYTRRKNRICYLQEIFSNEMAKVDDSFFHRLEESFLVEEDKKHERHPIFGNIVDEVAYHEKYPTIYHLRKKLVDSTDKADLRLIYLALAHMIKFRGHFLIEGDLNPDNSDVDKLFIQLVQTYNQLFEENPINASGVDAKAILSARLSKSRRLENLIAQLPGEKKNGLFGNLIALSLGLTPNFKSNFDLAEDAKLQLSKDTYDDDLDNLLAQIGDQYADLFLAAKNLSDAILLSDILRVNTEITKAPLSASMIKRYDEHHQDLTLLKALVRQQLPEKYKEIFFDQSKNGYAGYIDGGASQEEFYKFIKPILEKMDGTEELLVKLNREDLLRKQRTFDNGSIPHQIHLGELHAILRRQEDFYPFLKDNREKIEKILTFRIPYYVGPLARGNSRFAWMTRKSEETITPWNFEEVVDKGASAQSFIERMTNFDKNLPNEKVLPKHSLLYEYFTVYNELTKVKYVTEGMRKPAFLSGEQKKAIVDLLFKTNRKVTVKQLKEDYFKKIECFDSVEISGVEDRFNASLGTYHDLLKIIKDKDFLDNEENEDILEDIVLTLTLFEDREMIEERLKTYAHLFDDKVMKQLKRRRYTGWGRLSRKLINGIRDKQSGKTILDFLKSDGFANRNFMQLIHDDSLTFKEDIQKAQVSGQGDSLHEHIANLAGSPAIKKGILQTVKVVDELVKVMGRHKPENIVIEMARENQTTQKGQKNSRERMKRIEEGIKELGSQILKEHPVENTQLQNEKLYLYYLQNGRDMYVDQELDINRLSDYDVDHIVPQSFLKDDSIDNKVLTRSDKARGKSDNVPSEEVVKKMKNYWRQLLNAKLITQRKFDNLTKAERGGLSELDKAGFIKRQLVETRQITKHVAQILDSRMNTKYDENDKLIREVKVITLKSKLVSDFRKDFQFYKVREINNYHHAHDAYLNAVVGTALIKKYPKLESEFVYGDYKVYDVRKMIAKSEQEIGKATAKYFFYSNIMNFFKTEITLANGEIRKRPLIETNGETGEIVWDKGRDFATVRKVLSMPQVNIVKKTEVQTGGFSKESILPKRNSDKLIARKKDWDPKKYGGFDSPTVAYSVLVVAKVEKGKSKKLKSVKELLGITIMERSSFEKNPIDFLEAKGYKEVKKDLIIKLPKYSLFELENGRKRMLASAGELQKGNELALPSKYVNFLYLASHYEKLKGSPEDNEQKQLFVEQHKHYLDEIIEQISEFSKRVILADANLDKVLSAYNKHRDKPIREQAENIIHLFTLTNLGAPAAFKYFDTTIDRKRYTSTKEVLDATLIHQSITGLYETRIDLSQLGGDGGEAAAKGGGGGSGGMDPLQLLQPLEAEIKGTKLKAHWNSGATITCVPQAFLEEEVPIKNIWIKTIHGEKEQPVYYLTFKIQGRKVEAEVISSPYDYILVSPSDIPWLMKKPLQLTTLVPLQEYEERLLKQTMLTGSYKEKLQSLFLKYDALWQHWENQVGHRRIKPHHIATGTVNPRPQKQYPINPKAKASIQTVINDLLKQGVLIQQNSIMNTPVYPVPKPDGKWRMVLDYREVNKTIPLIAAQNQHSAGILSSIFRGKYKTTLDLSNGFWAHSITPESYWLTAFTWLGQQYCWTRLPQGFLNSPALFNADVVDLLKEVPNVQVYVDDIYISHDDPREHLEQLEKVFSLLLNAGYVVSLKKSEIAQHEVEFLGFNITKEGRGLTETFKQKLLNITPPRDLKQLQSILGLLNFARNFIPNFSELVKPLYNIIATAPGKYITWTTDNSQQLQNIISMLNSAENLEERNPEVRLIMKVNTSPSAGYIRFYNEFAKRPIMYLNYVYTKAEVKFTNTEKLLTTIHKGLIKALDLGMGQEILVYSPIVSMTKIQKTPLPERKALPIRWITWMSYLEDPRIQFHYDKTLPELQQVPTVTDDIIAKIKHPSEFSMVFYTDGSAIKHPNVNKSHNAGMGIAQVQFKPEFTVINTWSIPLGDHTAQLAEVAAVEFACKKALKIDGPVLIVTDSFYVAESVNKELPYWQSNGFFNNKKKPLKHVSKWKSIADCIQLKPDIIIIHEKGHQPTASTFHTEGNNLADKLATQGSYVVNAGKRTADGSEFEKRTADGSEFESPKKKAKVE

SEQ ID NO: 627 - protein, 2177 aa, synthetic construct
MPAAKRVKLDGGDKKYSIGLDIGTNSVGWAVITDEYKVPSKKFKVLGNTDRHSIKKNLIGALLFDSGETAEATRLKRTARRRYTRRKNRICYLQEIFSNEMAKVDDSFFHRLEESFLVEEDKKHERHPIFGNIVDEVAYHEKYPTIYHLRKKLVDSTDKADLRLIYLALAHMIKFRGHFLIEGDLNPDNSDVDKLFIQLVQTYNQLFEENPINASGVDAKAILSARLSKSRRLENLIAQLPGEKKNGLFGNLIALSLGLTPNFKSNFDLAEDAKLQLSKDTYDDDLDNLLAQIGDQYADLFLAAKNLSDAILLSDILRVNTEITKAPLSASMIKRYDEHHQDLTLLKALVRQQLPEKYKEIFFDQSKNGYAGYIDGGASQEEFYKFIKPILEKMDGTEELLVKLNREDLLRKQRTFDNGSIPHQIHLGELHAILRRQEDFYPFLKDNREKIEKILTFRIPYYVGPLARGNSRFAWMTRKSEETITPWNFEEVVDKGASAQSFIERMTNFDKNLPNEKVLPKHSLLYEYFTVYNELTKVKYVTEGMRKPAFLSGEQKKAIVDLLFKTNRKVTVKQLKEDYFKKIECFDSVEISGVEDRFNASLGTYHDLLKIIKDKDFLDNEENEDILEDIVLTLTLFEDREMIEERLKTYAHLFDDKVMKQLKRRRYTGWGRLSRKLINGIRDKQSGKTILDFLKSDGFANRNFMQLIHDDSLTFKEDIQKAQVSGQGDSLHEHIANLAGSPAIKKGILQTVKVVDELVKVMGRHKPENIVIEMARENQTTQKGQKNSRERMKRIEEGIKELGSQILKEHPVENTQLQNEKLYLYYLQNGRDMYVDQELDINRLSDYDVDHIVPQSFLKDDSIDNKVLTRSDKARGKSDNVPSEEVVKKMKNYWRQLLNAKLITQRKFDNLTKAERGGLSELDKAGFIKRQLVETRQITKHVAQILDSRMNTKYDENDKLIREVKVITLKSKLVSDFRKDFQFYKVREINNYHHAHDAYLNAVVGTALIKKYPKLESEFVYGDYKVYDVRKMIAKSEQEIGKATAKYFFYSNIMNFFKTEITLANGEIRKRPLIETNGETGEIVWDKGRDFATVRKVLSMPQVNIVKKTEVQTGGFSKESILPKRNSDKLIARKKDWDPKKYGGFDSPTVAYSVLVVAKVEKGKSKKLKSVKELLGITIMERSSFEKNPIDFLEAKGYKEVKKDLIIKLPKYSLFELENGRKRMLASAGELQKGNELALPSKYVNFLYLASHYEKLKGSPEDNEQKQLFVEQHKHYLDEIIEQISEFSKRVILADANLDKVLSAYNKHRDKPIREQAENIIHLFTLTNLGAPAAFKYFDTTIDRKRYTSTKEVLDATLIHQSITGLYETRIDLSQLGGDGGGSSGSSGSSGSSGGMDPLQLLQPLEAEIKGTKLKAHWNSGATITCVPQAFLEEEVPIKNIWIKTIHGEKEQPVYYLTFKIQGRKVEAEVISSPYDYILVSPSDIPWLMKKPLQLTTLVPLQEYEERLLKQTMLTGSYKEKLQSLFLKYDALWQHWENQVGHRRIKPHHIATGTVNPRPQKQYPINPKAKASIQTVINDLLKQGVLIQQNSIMNTPVYPVPKPDGKWRMVLDYREVNKTIPLIAAQNQHSAGILSSIFRGKYKTTLDLSNGFWAHSITPESYWLTAFTWLGQQYCWTRLPQGFLNSPALFNADVVDLLKEVPNVQVYVDDIYISHDDPREHLEQLEKVFSLLLNAGYVVSLKKSEIAQHEVEFLGFNITKEGRGLTETFKQKLLNITPPRDLKQLQSILGLLNFARNFIPNFSELVKPLYNIIATAPGKYITWTTDNSQQLQNIISMLNSAENLEERNPEVRLIMKVNTSPSAGYIRFYNEFAKRPIMYLNYVYTKAEVKFTNTEKLLTTIHKGLIKALDLGMGQEILVYSPIVSMTKIQKTPLPERKALPIRWITWMSYLEDPRIQFHYDKTLPELQQVPTVTDDIIAKIKHPSEFSMVFYTDGSAIKHPNVNKSHNAGMGIAQVQFKPEFTVINTWSIPLGDHTAQLAEVAAVEFACKKALKIDGPVLIVTDSFYVAESVNKELPYWQSNGFFNNKKKPLKHVSKWKSIADCIQLKPDIIIIHEKGHQPTASTFHTEGNNLADKLATQGSYVVNAGKRTADGSEFEKRTADGSEFESPKKKAKVE

SEQ ID NO: 628 - protein, 2176 aa, synthetic construct
MPAAKRVKLDGGDKKYSIGLDIGTNSVGWAVITDEYKVPSKKFKVLGNTDRHSIKKNLIGALLFDSGETAEATRLKRTARRRYTRRKNRICYLQEIFSNEMAKVDDSFFHRLEESFLVEEDKKHERHPIFGNIVDEVAYHEKYPTIYHLRKKLVDSTDKADLRLIYLALAHMIKFRGHFLIEGDLNPDNSDVDKLFIQLVQTYNQLFEENPINASGVDAKAILSARLSKSRRLENLIAQLPGEKKNGLFGNLIALSLGLTPNFKSNFDLAEDAKLQLSKDTYDDDLDNLLAQIGDQYADLFLAAKNLSDAILLSDILRVNTEITKAPLSASMIKRYDEHHQDLTLLKALVRQQLPEKYKEIFFDQSKNGYAGYIDGGASQEEFYKFIKPILEKMDGTEELLVKLNREDLLRKQRTFDNGSIPHQIHLGELHAILRRQEDFYPFLKDNREKIEKILTFRIPYYVGPLARGNSRFAWMTRKSEETITPWNFEEVVDKGASAQSFIERMTNFDKNLPNEKVLPKHSLLYEYFTVYNELTKVKYVTEGMRKPAFLSGEQKKAIVDLLFKTNRKVTVKQLKEDYFKKIECFDSVEISGVEDRFNASLGTYHDLLKIIKDKDFLDNEENEDILEDIVLTLTLFEDREMIEERLKTYAHLFDDKVMKQLKRRRYTGWGRLSRKLINGIRDKQSGKTILDFLKSDGFANRNFMQLIHDDSLTFKEDIQKAQVSGQGDSLHEHIANLAGSPAIKKGILQTVKVVDELVKVMGRHKPENIVIEMARENQTTQKGQKNSRERMKRIEEGIKELGSQILKEHPVENTQLQNEKLYLYYLQNGRDMYVDQELDINRLSDYDVDHIVPQSFLKDDSIDNKVLTRSDKARGKSDNVPSEEVVKKMKNYWRQLLNAKLITQRKFDNLTKAERGGLSELDKAGFIKRQLVETRQITKHVAQILDSRMNTKYDENDKLIREVKVITLKSKLVSDFRKDFQFYKVREINNYHHAHDAYLNAVVGTALIKKYPKLESEFVYGDYKVYDVRKMIAKSEQEIGKATAKYFFYSNIMNFFKTEITLANGEIRKRPLIETNGETGEIVWDKGRDFATVRKVLSMPQVNIVKKTEVQTGGFSKESILPKRNSDKLIARKKDWDPKKYGGFDSPTVAYSVLVVAKVEKGKSKKLKSVKELLGITIMERSSFEKNPIDFLEAKGYKEVKKDLIIKLPKYSLFELENGRKRMLASAGELQKGNELALPSKYVNFLYLASHYEKLKGSPEDNEQKQLFVEQHKHYLDEIIEQISEFSKRVILADANLDKVLSAYNKHRDKPIREQAENIIHLFTLTNLGAPAAFKYFDTTIDRKRYTSTKEVLDATLIHQSITGLYETRIDLSQLGGDGGGSSEAAAKGGSGGMDPLQLLQPLEAEIKGTKLKAHWNSGATITCVPQAFLEEEVPIKNIWIKTIHGEKEQPVYYLTFKIQGRKVEAEVISSPYDYILVSPSDIPWLMKKPLQLTTLVPLQEYEERLLKQTMLTGSYKEKLQSLFLKYDALWQHWENQVGHRRIKPHHIATGTVNPRPQKQYPINPKAKASIQTVINDLLKQGVLIQQNSIMNTPVYPVPKPDGKWRMVLDYREVNKTIPLIAAQNQHSAGILSSIFRGKYKTTLDLSNGFWAHSITPESYWLTAFTWLGQQYCWTRLPQGFLNSPALFNADVVDLLKEVPNVQVYVDDIYISHDDPREHLEQLEKVFSLLLNAGYVVSLKKSEIAQHEVEFLGFNITKEGRGLTETFKQKLLNITPPRDLKQLQSILGLLNFARNFIPNFSELVKPLYNIIATAPGKYITWTTDNSQQLQNIISMLNSAENLEERNPEVRLIMKVNTSPSAGYIRFYNEFAKRPIMYLNYVYTKAEVKFTNTEKLLTTIHKGLIKALDLGMGQEILVYSPIVSMTKIQKTPLPERKALPIRWITWMSYLEDPRIQFHYDKTLPELQQVPTVTDDIIAKIKHPSEFSMVFYTDGSAIKHPNVNKSHNAGMGIAQVQFKPEFTVINTWSIPLGDHTAQLAEVAAVEFACKKALKIDGPVLIVTDSFYVAESVNKELPYWQSNGFFNNKKKPLKHVSKWKSIADCIQLKPDIIIIHEKGHQPTASTFHTEGNNLADKLATQGSYVVNAGKRTADGSEFEKRTADGSEFESPKKKAKVE

SEQ ID NO: 629 - protein, 2176 aa, synthetic construct
MPAAKRVKLDGGDKKYSIGLDIGTNSVGWAVITDEYKVPSKKFKVLGNTDRHSIKKNLIGALLFDSGETAEATRLKRTARRRYTRRKNRICYLQEIFSNEMAKVDDSFFHRLEESFLVEEDKKHERHPIFGNIVDEVAYHEKYPTIYHLRKKLVDSTDKADLRLIYLALAHMIKFRGHFLIEGDLNPDNSDVDKLFIQLVQTYNQLFEENPINASGVDAKAILSARLSKSRRLENLIAQLPGEKKNGLFGNLIALSLGLTPNFKSNFDLAEDAKLQLSKDTYDDDLDNLLAQIGDQYADLFLAAKNLSDAILLSDILRVNTEITKAPLSASMIKRYDEHHQDLTLLKALVRQQLPEKYKEIFFDQSKNGYAGYIDGGASQEEFYKFIKPILEKMDGTEELLVKLNREDLLRKQRTFDNGSIPHQIHLGELHAILRRQEDFYPFLKDNREKIEKILTFRIPYYVGPLARGNSRFAWMTRKSEETITPWNFEEVVDKGASAQSFIERMTNFDKNLPNEKVLPKHSLLYEYFTVYNELTKVKYVTEGMRKPAFLSGEQKKAIVDLLFKTNRKVTVKQLKEDYFKKIECFDSVEISGVEDRFNASLGTYHDLLKIIKDKDFLDNEENEDILEDIVLTLTLFEDREMIEERLKTYAHLFDDKVMKQLKRRRYTGWGRLSRKLINGIRDKQSGKTILDFLKSDGFANRNFMQLIHDDSLTFKEDIQKAQVSGQGDSLHEHIANLAGSPAIKKGILQTVKVVDELVKVMGRHKPENIVIEMARENQTTQKGQKNSRERMKRIEEGIKELGSQILKEHPVENTQLQNEKLYLYYLQNGRDMYVDQELDINRLSDYDVDHIVPQSFLKDDSIDNKVLTRSDKARGKSDNVPSEEVVKKMKNYWRQLLNAKLITQRKFDNLTKAERGGLSELDKAGFIKRQLVETRQITKHVAQILDSRMNTKYDENDKLIREVKVITLKSKLVSDFRKDFQFYKVREINNYHHAHDAYLNAVVGTALIKKYPKLESEFVYGDYKVYDVRKMIAKSEQEIGKATAKYFFYSNIMNFFKTEITLANGEIRKRPLIETNGETGEIVWDKGRDFATVRKVLSMPQVNIVKKTEVQTGGFSKESILPKRNSDKLIARKKDWDPKKYGGFDSPTVAYSVLVVAKVEKGKSKKLKSVKELLGITIMERSSFEKNPIDFLEAKGYKEVKKDLIIKLPKYSLFELENGRKRMLASAGELQKGNELALPSKYVNFLYLASHYEKLKGSPEDNEQKQLFVEQHKHYLDEIIEQISEFSKRVILADANLDKVLSAYNKHRDKPIREQAENIIHLFTLTNLGAPAAFKYFDTTIDRKRYTSTKEVLDATLIHQSITGLYETRIDLSQLGGDGGEAAAKGGSPAPGGMDPLQLLQPLEAEIKGTKLKAHWNSGATITCVPQAFLEEEVPIKNIWIKTIHGEKEQPVYYLTFKIQGRKVEAEVISSPYDYILVSPSDIPWLMKKPLQLTTLVPLQEYEERLLKQTMLTGSYKEKLQSLFLKYDALWQHWENQVGHRRIKPHHIATGTVNPRPQKQYPINPKAKASIQTVINDLLKQGVLIQQNSIMNTPVYPVPKPDGKWRMVLDYREVNKTIPLIAAQNQHSAGILSSIFRGKYKTTLDLSNGFWAHSITPESYWLTAFTWLGQQYCWTRLPQGFLNSPALFNADVVDLLKEVPNVQVYVDDIYISHDDPREHLEQLEKVFSLLLNAGYVVSLKKSEIAQHEVEFLGFNITKEGRGLTETFKQKLLNITPPRDLKQLQSILGLLNFARNFIPNFSELVKPLYNIIATAPGKYITWTTDNSQQLQNIISMLNSAENLEERNPEVRLIMKVNTSPSAGYIRFYNEFAKRPIMYLNYVYTKAEVKFTNTEKLLTTIHKGLIKALDLGMGQEILVYSPIVSMTKIQKTPLPERKALPIRWITWMSYLEDPRIQFHYDKTLPELQQVPTVTDDIIAKIKHPSEFSMVFYTDGSAIKHPNVNKSHNAGMGIAQVQFKPEFTVINTWSIPLGDHTAQLAEVAAVEFACKKALKIDGPVLIVTDSFYVAESVNKELPYWQSNGFFNNKKKPLKHVSKWKSIADCIQLKPDIIIIHEKGHQPTASTFHTEGNNLADKLATQGSYVVNAGKRTADGSEFEKRTADGSEFESPKKKAKVE

SEQ ID NO: 630 - protein, 2176 aa, synthetic construct
MPAAKRVKLDGGDKKYSIGLDIGTNSVGWAVITDEYKVPSKKFKVLGNTDRHSIKKNLIGALLFDSGETAEATRLKRTARRRYTRRKNRICYLQEIFSNEMAKVDDSFFHRLEESFLVEEDKKHERHPIFGNIVDEVAYHEKYPTIYHLRKKLVDSTDKADLRLIYLALAHMIKFRGHFLIEGDLNPDNSDVDKLFIQLVQTYNQLFEENPINASGVDAKAILSARLSKSRRLENLIAQLPGEKKNGLFGNLIALSLGLTPNFKSNFDLAEDAKLQLSKDTYDDDLDNLLAQIGDQYADLFLAAKNLSDAILLSDILRVNTEITKAPLSASMIKRYDEHHQDLTLLKALVRQQLPEKYKEIFFDQSKNGYAGYIDGGASQEEFYKFIKPILEKMDGTEELLVKLNREDLLRKQRTFDNGSIPHQIHLGELHAILRRQEDFYPFLKDNREKIEKILTFRIPYYVGPLARGNSRFAWMTRKSEETITPWNFEEVVDKGASAQSFIERMTNFDKNLPNEKVLPKHSLLYEYFTVYNELTKVKYVTEGMRKPAFLSGEQKKAIVDLLFKTNRKVTVKQLKEDYFKKIECFDSVEISGVEDRFNASLGTYHDLLKIIKDKDFLDNEENEDILEDIVLTLTLFEDREMIEERLKTYAHLFDDKVMKQLKRRRYTGWGRLSRKLINGIRDKQSGKTILDFLKSDGFANRNFMQLIHDDSLTFKEDIQKAQVSGQGDSLHEHIANLAGSPAIKKGILQTVKVVDELVKVMGRHKPENIVIEMARENQTTQKGQKNSRERMKRIEEGIKELGSQILKEHPVENTQLQNEKLYLYYLQNGRDMYVDQELDINRLSDYDVDHIVPQSFLKDDSIDNKVLTRSDKARGKSDNVPSEEVVKKMKNYWRQLLNAKLITQRKFDNLTKAERGGLSELDKAGFIKRQLVETRQITKHVAQILDSRMNTKYDENDKLIREVKVITLKSKLVSDFRKDFQFYKVREINNYHHAHDAYLNAVVGTALIKKYPKLESEFVYGDYKVYDVRKMIAKSEQEIGKATAKYFFYSNIMNFFKTEITLANGEIRKRPLIETNGETGEIVWDKGRDFATVRKVLSMPQVNIVKKTEVQTGGFSKESILPKRNSDKLIARKKDWDPKKYGGFDSPTVAYSVLVVAKVEKGKSKKLKSVKELLGITIMERSSFEKNPIDFLEAKGYKEVKKDLIIKLPKYSLFELENGRKRMLASAGELQKGNELALPSKYVNFLYLASHYEKLKGSPEDNEQKQLFVEQHKHYLDEIIEQISEFSKRVILADANLDKVLSAYNKHRDKPIREQAENIIHLFTLTNLGAPAAFKYFDTTIDRKRYTSTKEVLDATLIHQSITGLYETRIDLSQLGGDGGGGGGGSEAAAKGGMDPLQLLQPLEAEIKGTKLKAHWNSGATITCVPQAFLEEEVPIKNIWIKTIHGEKEQPVYYLTFKIQGRKVEAEVISSPYDYILVSPSDIPWLMKKPLQLTTLVPLQEYEERLLKQTMLTGSYKEKLQSLFLKYDALWQHWENQVGHRRIKPHHIATGTVNPRPQKQYPINPKAKASIQTVINDLLKQGVLIQQNSIMNTPVYPVPKPDGKWRMVLDYREVNKTIPLIAAQNQHSAGILSSIFRGKYKTTLDLSNGFWAHSITPESYWLTAFTWLGQQYCWTRLPQGFLNSPALFNADVVDLLKEVPNVQVYVDDIYISHDDPREHLEQLEKVFSLLLNAGYVVSLKKSEIAQHEVEFLGFNITKEGRGLTETFKQKLLNITPPRDLKQLQSILGLLNFARNFIPNFSELVKPLYNIIATAPGKYITWTTDNSQQLQNIISMLNSAENLEERNPEVRLIMKVNTSPSAGYIRFYNEFAKRPIMYLNYVYTKAEVKFTNTEKLLTTIHKGLIKALDLGMGQEILVYSPIVSMTKIQKTPLPERKALPIRWITWMSYLEDPRIQFHYDKTLPELQQVPTVTDDIIAKIKHPSEFSMVFYTDGSAIKHPNVNKSHNAGMGIAQVQFKPEFTVINTWSIPLGDHTAQLAEVAAVEFACKKALKIDGPVLIVTDSFYVAESVNKELPYWQSNGFFNNKKKPLKHVSKWKSIADCIQLKPDIIIIHEKGHQPTASTFHTEGNNLADKLATQGSYVVNAGKRTADGSEFEKRTADGSEFESPKKKAKVE

SEQ ID NO: 631 - protein, 2174 aa, synthetic construct
MPAAKRVKLDGGDKKYSIGLDIGTNSVGWAVITDEYKVPSKKFKVLGNTDRHSIKKNLIGALLFDSGETAEATRLKRTARRRYTRRKNRICYLQEIFSNEMAKVDDSFFHRLEESFLVEEDKKHERHPIFGNIVDEVAYHEKYPTIYHLRKKLVDSTDKADLRLIYLALAHMIKFRGHFLIEGDLNPDNSDVDKLFIQLVQTYNQLFEENPINASGVDAKAILSARLSKSRRLENLIAQLPGEKKNGLFGNLIALSLGLTPNFKSNFDLAEDAKLQLSKDTYDDDLDNLLAQIGDQYADLFLAAKNLSDAILLSDILRVNTEITKAPLSASMIKRYDEHHQDLTLLKALVRQQLPEKYKEIFFDQSKNGYAGYIDGGASQEEFYKFIKPILEKMDGTEELLVKLNREDLLRKQRTFDNGSIPHQIHLGELHAILRRQEDFYPFLKDNREKIEKILTFRIPYYVGPLARGNSRFAWMTRKSEETITPWNFEEVVDKGASAQSFIERMTNFDKNLPNEKVLPKHSLLYEYFTVYNELTKVKYVTEGMRKPAFLSGEQKKAIVDLLFKTNRKVTVKQLKEDYFKKIECFDSVEISGVEDRFNASLGTYHDLLKIIKDKDFLDNEENEDILEDIVLTLTLFEDREMIEERLKTYAHLFDDKVMKQLKRRRYTGWGRLSRKLINGIRDKQSGKTILDFLKSDGFANRNFMQLIHDDSLTFKEDIQKAQVSGQGDSLHEHIANLAGSPAIKKGILQTVKVVDELVKVMGRHKPENIVIEMARENQTTQKGQKNSRERMKRIEEGIKELGSQILKEHPVENTQLQNEKLYLYYLQNGRDMYVDQELDINRLSDYDVDHIVPQSFLKDDSIDNKVLTRSDKARGKSDNVPSEEVVKKMKNYWRQLLNAKLITQRKFDNLTKAERGGLSELDKAGFIKRQLVETRQITKHVAQILDSRMNTKYDENDKLIREVKVITLKSKLVSDFRKDFQFYKVREINNYHHAHDAYLNAVVGTALIKKYPKLESEFVYGDYKVYDVRKMIAKSEQEIGKATAKYFFYSNIMNFFKTEITLANGEIRKRPLIETNGETGEIVWDKGRDFATVRKVLSMPQVNIVKKTEVQTGGFSKESILPKRNSDKLIARKKDWDPKKYGGFDSPTVAYSVLVVAKVEKGKSKKLKSVKELLGITIMERSSFEKNPIDFLEAKGYKEVKKDLIIKLPKYSLFELENGRKRMLASAGELQKGNELALPSKYVNFLYLASHYEKLKGSPEDNEQKQLFVEQHKHYLDEIIEQISEFSKRVILADANLDKVLSAYNKHRDKPIREQAENIIHLFTLTNLGAPAAFKYFDTTIDRKRYTSTKEVLDATLIHQSITGLYETRIDLSQLGGDGGGGGGSSPAPGGMDPLQLLQPLEAEIKGTKLKAHWNSGATITCVPQAFLEEEVPIKNIWIKTIHGEKEQPVYYLTFKIQGRKVEAEVISSPYDYILVSPSDIPWLMKKPLQLTTLVPLQEYEERLLKQTMLTGSYKEKLQSLFLKYDALWQHWENQVGHRRIKPHHIATGTVNPRPQKQYPINPKAKASIQTVINDLLKQGVLIQQNSIMNTPVYPVPKPDGKWRMVLDYREVNKTIPLIAAQNQHSAGILSSIFRGKYKTTLDLSNGFWAHSITPESYWLTAFTWLGQQYCWTRLPQGFLNSPALFNADVVDLLKEVPNVQVYVDDIYISHDDPREHLEQLEKVFSLLLNAGYVVSLKKSEIAQHEVEFLGFNITKEGRGLTETFKQKLLNITPPRDLKQLQSILGLLNFARNFIPNFSELVKPLYNIIATAPGKYITWTTDNSQQLQNIISMLNSAENLEERNPEVRLIMKVNTSPSAGYIRFYNEFAKRPIMYLNYVYTKAEVKFTNTEKLLTTIHKGLIKALDLGMGQEILVYSPIVSMTKIQKTPLPERKALPIRWITWMSYLEDPRIQFHYDKTLPELQQVPTVTDDIIAKIKHPSEFSMVFYTDGSAIKHPNVNKSHNAGMGIAQVQFKPEFTVINTWSIPLGDHTAQLAEVAAVEFACKKALKIDGPVLIVTDSFYVAESVNKELPYWQSNGFFNNKKKPLKHVSKWKSIADCIQLKPDIIIIHEKGHQPTASTFHTEGNNLADKLATQGSYVVNAGKRTADGSEFEKRTADGSEFESPKKKAKVE

SEQ ID NO: 632 - protein, 2176 aa, synthetic construct
MPAAKRVKLDGGDKKYSIGLDIGTNSVGWAVITDEYKVPSKKFKVLGNTDRHSIKKNLIGALLFDSGETAEATRLKRTARRRYTRRKNRICYLQEIFSNEMAKVDDSFFHRLEESFLVEEDKKHERHPIFGNIVDEVAYHEKYPTIYHLRKKLVDSTDKADLRLIYLALAHMIKFRGHFLIEGDLNPDNSDVDKLFIQLVQTYNQLFEENPINASGVDAKAILSARLSKSRRLENLIAQLPGEKKNGLFGNLIALSLGLTPNFKSNFDLAEDAKLQLSKDTYDDDLDNLLAQIGDQYADLFLAAKNLSDAILLSDILRVNTEITKAPLSASMIKRYDEHHQDLTLLKALVRQQLPEKYKEIFFDQSKNGYAGYIDGGASQEEFYKFIKPILEKMDGTEELLVKLNREDLLRKQRTFDNGSIPHQIHLGELHAILRRQEDFYPFLKDNREKIEKILTFRIPYYVGPLARGNSRFAWMTRKSEETITPWNFEEVVDKGASAQSFIERMTNFDKNLPNEKVLPKHSLLYEYFTVYNELTKVKYVTEGMRKPAFLSGEQKKAIVDLLFKTNRKVTVKQLKEDYFKKIECFDSVEISGVEDRFNASLGTYHDLLKIIKDKDFLDNEENEDILEDIVLTLTLFEDREMIEERLKTYAHLFDDKVMKQLKRRRYTGWGRLSRKLINGIRDKQSGKTILDFLKSDGFANRNFMQLIHDDSLTFKEDIQKAQVSGQGDSLHEHIANLAGSPAIKKGILQTVKVVDELVKVMGRHKPENIVIEMARENQTTQKGQKNSRERMKRIEEGIKELGSQILKEHPVENTQLQNEKLYLYYLQNGRDMYVDQELDINRLSDYDVDHIVPQSFLKDDSIDNKVLTRSDKARGKSDNVPSEEVVKKMKNYWRQLLNAKLITQRKFDNLTKAERGGLSELDKAGFIKRQLVETRQITKHVAQILDSRMNTKYDENDKLIREVKVITLKSKLVSDFRKDFQFYKVREINNYHHAHDAYLNAVVGTALIKKYPKLESEFVYGDYKVYDVRKMIAKSEQEIGKATAKYFFYSNIMNFFKTEITLANGEIRKRPLIETNGETGEIVWDKGRDFATVRKVLSMPQVNIVKKTEVQTGGFSKESILPKRNSDKLIARKKDWDPKKYGGFDSPTVAYSVLVVAKVEKGKSKKLKSVKELLGITIMERSSFEKNPIDFLEAKGYKEVKKDLIIKLPKYSLFELENGRKRMLASAGELQKGNELALPSKYVNFLYLASHYEKLKGSPEDNEQKQLFVEQHKHYLDEIIEQISEFSKRVILADANLDKVLSAYNKHRDKPIREQAENIIHLFTLTNLGAPAAFKYFDTTIDRKRYTSTKEVLDATLIHQSITGLYETRIDLSQLGGDGGEAAAKPAPGSSGGMDPLQLLQPLEAEIKGTKLKAHWNSGATITCVPQAFLEEEVPIKNIWIKTIHGEKEQPVYYLTFKIQGRKVEAEVISSPYDYILVSPSDIPWLMKKPLQLTTLVPLQEYEERLLKQTMLTGSYKEKLQSLFLKYDALWQHWENQVGHRRIKPHHIATGTVNPRPQKQYPINPKAKASIQTVINDLLKQGVLIQQNSIMNTPVYPVPKPDGKWRMVLDYREVNKTIPLIAAQNQHSAGILSSIFRGKYKTTLDLSNGFWAHSITPESYWLTAFTWLGQQYCWTRLPQGFLNSPALFNADVVDLLKEVPNVQVYVDDIYISHDDPREHLEQLEKVFSLLLNAGYVVSLKKSEIAQHEVEFLGFNITKEGRGLTETFKQKLLNITPPRDLKQLQSILGLLNFARNFIPNFSELVKPLYNIIATAPGKYITWTTDNSQQLQNIISMLNSAENLEERNPEVRLIMKVNTSPSAGYIRFYNEFAKRPIMYLNYVYTKAEVKFTNTEKLLTTIHKGLIKALDLGMGQEILVYSPIVSMTKIQKTPLPERKALPIRWITWMSYLEDPRIQFHYDKTLPELQQVPTVTDDIIAKIKHPSEFSMVFYTDGSAIKHPNVNKSHNAGMGIAQVQFKPEFTVINTWSIPLGDHTAQLAEVAAVEFACKKALKIDGPVLIVTDSFYVAESVNKELPYWQSNGFFNNKKKPLKHVSKWKSIADCIQLKPDIIIIHEKGHQPTASTFHTEGNNLADKLATQGSYVVNAGKRTADGSEFEKRTADGSEFESPKKKAKVE

SEQ ID NO: 633 - protein, 2176 aa, synthetic construct
MPAAKRVKLDGGDKKYSIGLDIGTNSVGWAVITDEYKVPSKKFKVLGNTDRHSIKKNLIGALLFDSGETAEATRLKRTARRRYTRRKNRICYLQEIFSNEMAKVDDSFFHRLEESFLVEEDKKHERHPIFGNIVDEVAYHEKYPTIYHLRKKLVDSTDKADLRLIYLALAHMIKFRGHFLIEGDLNPDNSDVDKLFIQLVQTYNQLFEENPINASGVDAKAILSARLSKSRRLENLIAQLPGEKKNGLFGNLIALSLGLTPNFKSNFDLAEDAKLQLSKDTYDDDLDNLLAQIGDQYADLFLAAKNLSDAILLSDILRVNTEITKAPLSASMIKRYDEHHQDLTLLKALVRQQLPEKYKEIFFDQSKNGYAGYIDGGASQEEFYKFIKPILEKMDGTEELLVKLNREDLLRKQRTFDNGSIPHQIHLGELHAILRRQEDFYPFLKDNREKIEKILTFRIPYYVGPLARGNSRFAWMTRKSEETITPWNFEEVVDKGASAQSFIERMTNFDKNLPNEKVLPKHSLLYEYFTVYNELTKVKYVTEGMRKPAFLSGEQKKAIVDLLFKTNRKVTVKQLKEDYFKKIECFDSVEISGVEDRFNASLGTYHDLLKIIKDKDFLDNEENEDILEDIVLTLTLFEDREMIEERLKTYAHLFDDKVMKQLKRRRYTGWGRLSRKLINGIRDKQSGKTILDFLKSDGFANRNFMQLIHDDSLTFKEDIQKAQVSGQGDSLHEHIANLAGSPAIKKGILQTVKVVDELVKVMGRHKPENIVIEMARENQTTQKGQKNSRERMKRIEEGIKELGSQILKEHPVENTQLQNEKLYLYYLQNGRDMYVDQELDINRLSDYDVDHIVPQSFLKDDSIDNKVLTRSDKARGKSDNVPSEEVVKKMKNYWRQLLNAKLITQRKFDNLTKAERGGLSELDKAGFIKRQLVETRQITKHVAQILDSRMNTKYDENDKLIREVKVITLKSKLVSDFRKDFQFYKVREINNYHHAHDAYLNAVVGTALIKKYPKLESEFVYGDYKVYDVRKMIAKSEQEIGKATAKYFFYSNIMNFFKTEITLANGEIRKRPLIETNGETGEIVWDKGRDFATVRKVLSMPQVNIVKKTEVQTGGFSKESILPKRNSDKLIARKKDWDPKKYGGFDSPTVAYSVLVVAKVEKGKSKKLKSVKELLGITIMERSSFEKNPIDFLEAKGYKEVKKDLIIKLPKYSLFELENGRKRMLASAGELQKGNELALPSKYVNFLYLASHYEKLKGSPEDNEQKQLFVEQHKHYLDEIIEQISEFSKRVILADANLDKVLSAYNKHRDKPIREQAENIIHLFTLTNLGAPAAFKYFDTTIDRKRYTSTKEVLDATLIHQSITGLYETRIDLSQLGGDGGGGSPAPEAAAKGGMDPLQLLQPLEAEIKGTKLKAHWNSGATITCVPQAFLEEEVPIKNIWIKTIHGEKEQPVYYLTFKIQGRKVEAEVISSPYDYILVSPSDIPWLMKKPLQLTTLVPLQEYEERLLKQTMLTGSYKEKLQSLFLKYDALWQHWENQVGHRRIKPHHIATGTVNPRPQKQYPINPKAKASIQTVINDLLKQGVLIQQNSIMNTPVYPVPKPDGKWRMVLDYREVNKTIPLIAAQNQHSAGILSSIFRGKYKTTLDLSNGFWAHSITPESYWLTAFTWLGQQYCWTRLPQGFLNSPALFNADVVDLLKEVPNVQVYVDDIYISHDDPREHLEQLEKVFSLLLNAGYVVSLKKSEIAQHEVEFLGFNITKEGRGLTETFKQKLLNITPPRDLKQLQSILGLLNFARNFIPNFSELVKPLYNIIATAPGKYITWTTDNSQQLQNIISMLNSAENLEERNPEVRLIMKVNTSPSAGYIRFYNEFAKRPIMYLNYVYTKAEVKFTNTEKLLTTIHKGLIKALDLGMGQEILVYSPIVSMTKIQKTPLPERKALPIRWITWMSYLEDPRIQFHYDKTLPELQQVPTVTDDIIAKIKHPSEFSMVFYTDGSAIKHPNVNKSHNAGMGIAQVQFKPEFTVINTWSIPLGDHTAQLAEVAAVEFACKKALKIDGPVLIVTDSFYVAESVNKELPYWQSNGFFNNKKKPLKHVSKWKSIADCIQLKPDIIIIHEKGHQPTASTFHTEGNNLADKLATQGSYVVNAGKRTADGSEFEKRTADGSEFESPKKKAKVE

SEQ ID NO: 634 - protein, 2174 aa, synthetic construct
MPAAKRVKLDGGDKKYSIGLDIGTNSVGWAVITDEYKVPSKKFKVLGNTDRHSIKKNLIGALLFDSGETAEATRLKRTARRRYTRRKNRICYLQEIFSNEMAKVDDSFFHRLEESFLVEEDKKHERHPIFGNIVDEVAYHEKYPTIYHLRKKLVDSTDKADLRLIYLALAHMIKFRGHFLIEGDLNPDNSDVDKLFIQLVQTYNQLFEENPINASGVDAKAILSARLSKSRRLENLIAQLPGEKKNGLFGNLIALSLGLTPNFKSNFDLAEDAKLQLSKDTYDDDLDNLLAQIGDQYADLFLAAKNLSDAILLSDILRVNTEITKAPLSASMIKRYDEHHQDLTLLKALVRQQLPEKYKEIFFDQSKNGYAGYIDGGASQEEFYKFIKPILEKMDGTEELLVKLNREDLLRKQRTFDNGSIPHQIHLGELHAILRRQEDFYPFLKDNREKIEKILTFRIPYYVGPLARGNSRFAWMTRKSEETITPWNFEEVVDKGASAQSFIERMTNFDKNLPNEKVLPKHSLLYEYFTVYNELTKVKYVTEGMRKPAFLSGEQKKAIVDLLFKTNRKVTVKQLKEDYFKKIECFDSVEISGVEDRFNASLGTYHDLLKIIKDKDFLDNEENEDILEDIVLTLTLFEDREMIEERLKTYAHLFDDKVMKQLKRRRYTGWGRLSRKLINGIRDKQSGKTILDFLKSDGFANRNFMQLIHDDSLTFKEDIQKAQVSGQGDSLHEHIANLAGSPAIKKGILQTVKVVDELVKVMGRHKPENIVIEMARENQTTQKGQKNSRERMKRIEEGIKELGSQILKEHPVENTQLQNEKLYLYYLQNGRDMYVDQELDINRLSDYDVDHIVPQSFLKDDSIDNKVLTRSDKARGKSDNVPSEEVVKKMKNYWRQLLNAKLITQRKFDNLTKAERGGLSELDKAGFIKRQLVETRQITKHVAQILDSRMNTKYDENDKLIREVKVITLKSKLVSDFRKDFQFYKVREINNYHHAHDAYLNAVVGTALIKKYPKLESEFVYGDYKVYDVRKMIAKSEQEIGKATAKYFFYSNIMNFFKTEITLANGEIRKRPLIETNGETGEIVWDKGRDFATVRKVLSMPQVNIVKKTEVQTGGFSKESILPKRNSDKLIARKKDWDPKKYGGFDSPTVAYSVLVVAKVEKGKSKKLKSVKELLGITIMERSSFEKNPIDFLEAKGYKEVKKDLIIKLPKYSLFELENGRKRMLASAGELQKGNELALPSKYVNFLYLASHYEKLKGSPEDNEQKQLFVEQHKHYLDEIIEQISEFSKRVILADANLDKVLSAYNKHRDKPIREQAENIIHLFTLTNLGAPAAFKYFDTTIDRKRYTSTKEVLDATLIHQSITGLYETRIDLSQLGGDGGGGGPAPGSSGGMDPLQLLQPLEAEIKGTKLKAHWNSGATITCVPQAFLEEEVPIKNIWIKTIHGEKEQPVYYLTFKIQGRKVEAEVISSPYDYILVSPSDIPWLMKKPLQLTTLVPLQEYEERLLKQTMLTGSYKEKLQSLFLKYDALWQHWENQVGHRRIKPHHIATGTVNPRPQKQYPINPKAKASIQTVINDLLKQGVLIQQNSIMNTPVYPVPKPDGKWRMVLDYREVNKTIPLIAAQNQHSAGILSSIFRGKYKTTLDLSNGFWAHSITPESYWLTAFTWLGQQYCWTRLPQGFLNSPALFNADVVDLLKEVPNVQVYVDDIYISHDDPREHLEQLEKVFSLLLNAGYVVSLKKSEIAQHEVEFLGFNITKEGRGLTETFKQKLLNITPPRDLKQLQSILGLLNFARNFIPNFSELVKPLYNIIATAPGKYITWTTDNSQQLQNIISMLNSAENLEERNPEVRLIMKVNTSPSAGYIRFYNEFAKRPIMYLNYVYTKAEVKFTNTEKLLTTIHKGLIKALDLGMGQEILVYSPIVSMTKIQKTPLPERKALPIRWITWMSYLEDPRIQFHYDKTLPELQQVPTVTDDIIAKIKHPSEFSMVFYTDGSAIKHPNVNKSHNAGMGIAQVQFKPEFTVINTWSIPLGDHTAQLAEVAAVEFACKKALKIDGPVLIVTDSFYVAESVNKELPYWQSNGFFNNKKKPLKHVSKWKSIADCIQLKPDIIIIHEKGHQPTASTFHTEGNNLADKLATQGSYVVNAGKRTADGSEFEKRTADGSEFESPKKKAKVE

SEQ ID NO: 635 - protein, 2174 aa, synthetic construct
MPAAKRVKLDGGDKKYSIGLDIGTNSVGWAVITDEYKVPSKKFKVLGNTDRHSIKKNLIGALLFDSGETAEATRLKRTARRRYTRRKNRICYLQEIFSNEMAKVDDSFFHRLEESFLVEEDKKHERHPIFGNIVDEVAYHEKYPTIYHLRKKLVDSTDKADLRLIYLALAHMIKFRGHFLIEGDLNPDNSDVDKLFIQLVQTYNQLFEENPINASGVDAKAILSARLSKSRRLENLIAQLPGEKKNGLFGNLIALSLGLTPNFKSNFDLAEDAKLQLSKDTYDDDLDNLLAQIGDQYADLFLAAKNLSDAILLSDILRVNTEITKAPLSASMIKRYDEHHQDLTLLKALVRQQLPEKYKEIFFDQSKNGYAGYIDGGASQEEFYKFIKPILEKMDGTEELLVKLNREDLLRKQRTFDNGSIPHQIHLGELHAILRRQEDFYPFLKDNREKIEKILTFRIPYYVGPLARGNSRFAWMTRKSEETITPWNFEEVVDKGASAQSFIERMTNFDKNLPNEKVLPKHSLLYEYFTVYNELTKVKYVTEGMRKPAFLSGEQKKAIVDLLFKTNRKVTVKQLKEDYFKKIECFDSVEISGVEDRFNASLGTYHDLLKIIKDKDFLDNEENEDILEDIVLTLTLFEDREMIEERLKTYAHLFDDKVMKQLKRRRYTGWGRLSRKLINGIRDKQSGKTILDFLKSDGFANRNFMQLIHDDSLTFKEDIQKAQVSGQGDSLHEHIANLAGSPAIKKGILQTVKVVDELVKVMGRHKPENIVIEMARENQTTQKGQKNSRERMKRIEEGIKELGSQILKEHPVENTQLQNEKLYLYYLQNGRDMYVDQELDINRLSDYDVDHIVPQSFLKDDSIDNKVLTRSDKARGKSDNVPSEEVVKKMKNYWRQLLNAKLITQRKFDNLTKAERGGLSELDKAGFIKRQLVETRQITKHVAQILDSRMNTKYDENDKLIREVKVITLKSKLVSDFRKDFQFYKVREINNYHHAHDAYLNAVVGTALIKKYPKLESEFVYGDYKVYDVRKMIAKSEQEIGKATAKYFFYSNIMNFFKTEITLANGEIRKRPLIETNGETGEIVWDKGRDFATVRKVLSMPQVNIVKKTEVQTGGFSKESILPKRNSDKLIARKKDWDPKKYGGFDSPTVAYSVLVVAKVEKGKSKKLKSVKELLGITIMERSSFEKNPIDFLEAKGYKEVKKDLIIKLPKYSLFELENGRKRMLASAGELQKGNELALPSKYVNFLYLASHYEKLKGSPEDNEQKQLFVEQHKHYLDEIIEQISEFSKRVILADANLDKVLSAYNKHRDKPIREQAENIIHLFTLTNLGAPAAFKYFDTTIDRKRYTSTKEVLDATLIHQSITGLYETRIDLSQLGGDGGGGSGSSPAPGGMDPLQLLQPLEAEIKGTKLKAHWNSGATITCVPQAFLEEEVPIKNIWIKTIHGEKEQPVYYLTFKIQGRKVEAEVISSPYDYILVSPSDIPWLMKKPLQLTTLVPLQEYEERLLKQTMLTGSYKEKLQSLFLKYDALWQHWENQVGHRRIKPHHIATGTVNPRPQKQYPINPKAKASIQTVINDLLKQGVLIQQNSIMNTPVYPVPKPDGKWRMVLDYREVNKTIPLIAAQNQHSAGILSSIFRGKYKTTLDLSNGFWAHSITPESYWLTAFTWLGQQYCWTRLPQGFLNSPALFNADVVDLLKEVPNVQVYVDDIYISHDDPREHLEQLEKVFSLLLNAGYVVSLKKSEIAQHEVEFLGFNITKEGRGLTETFKQKLLNITPPRDLKQLQSILGLLNFARNFIPNFSELVKPLYNIIATAPGKYITWTTDNSQQLQNIISMLNSAENLEERNPEVRLIMKVNTSPSAGYIRFYNEFAKRPIMYLNYVYTKAEVKFTNTEKLLTTIHKGLIKALDLGMGQEILVYSPIVSMTKIQKTPLPERKALPIRWITWMSYLEDPRIQFHYDKTLPELQQVPTVTDDIIAKIKHPSEFSMVFYTDGSAIKHPNVNKSHNAGMGIAQVQFKPEFTVINTWSIPLGDHTAQLAEVAAVEFACKKALKIDGPVLIVTDSFYVAESVNKELPYWQSNGFFNNKKKPLKHVSKWKSIADCIQLKPDIIIIHEKGHQPTASTFHTEGNNLADKLATQGSYVVNAGKRTADGSEFEKRTADGSEFESPKKKAKVE

SEQ ID NO: 636 - protein, 2176 aa, synthetic construct
MPAAKRVKLDGGDKKYSIGLDIGTNSVGWAVITDEYKVPSKKFKVLGNTDRHSIKKNLIGALLFDSGETAEATRLKRTARRRYTRRKNRICYLQEIFSNEMAKVDDSFFHRLEESFLVEEDKKHERHPIFGNIVDEVAYHEKYPTIYHLRKKLVDSTDKADLRLIYLALAHMIKFRGHFLIEGDLNPDNSDVDKLFIQLVQTYNQLFEENPINASGVDAKAILSARLSKSRRLENLIAQLPGEKKNGLFGNLIALSLGLTPNFKSNFDLAEDAKLQLSKDTYDDDLDNLLAQIGDQYADLFLAAKNLSDAILLSDILRVNTEITKAPLSASMIKRYDEHHQDLTLLKALVRQQLPEKYKEIFFDQSKNGYAGYIDGGASQEEFYKFIKPILEKMDGTEELLVKLNREDLLRKQRTFDNGSIPHQIHLGELHAILRRQEDFYPFLKDNREKIEKILTFRIPYYVGPLARGNSRFAWMTRKSEETITPWNFEEVVDKGASAQSFIERMTNFDKNLPNEKVLPKHSLLYEYFTVYNELTKVKYVTEGMRKPAFLSGEQKKAIVDLLFKTNRKVTVKQLKEDYFKKIECFDSVEISGVEDRFNASLGTYHDLLKIIKDKDFLDNEENEDILEDIVLTLTLFEDREMIEERLKTYAHLFDDKVMKQLKRRRYTGWGRLSRKLINGIRDKQSGKTILDFLKSDGFANRNFMQLIHDDSLTFKEDIQKAQVSGQGDSLHEHIANLAGSPAIKKGILQTVKVVDELVKVMGRHKPENIVIEMARENQTTQKGQKNSRERMKRIEEGIKELGSQILKEHPVENTQLQNEKLYLYYLQNGRDMYVDQELDINRLSDYDVDHIVPQSFLKDDSIDNKVLTRSDKARGKSDNVPSEEVVKKMKNYWRQLLNAKLITQRKFDNLTKAERGGLSELDKAGFIKRQLVETRQITKHVAQILDSRMNTKYDENDKLIREVKVITLKSKLVSDFRKDFQFYKVREINNYHHAHDAYLNAVVGTALIKKYPKLESEFVYGDYKVYDVRKMIAKSEQEIGKATAKYFFYSNIMNFFKTEITLANGEIRKRPLIETNGETGEIVWDKGRDFATVRKVLSMPQVNIVKKTEVQTGGFSKESILPKRNSDKLIARKKDWDPKKYGGFDSPTVAYSVLVVAKVEKGKSKKLKSVKELLGITIMERSSFEKNPIDFLEAKGYKEVKKDLIIKLPKYSLFELENGRKRMLASAGELQKGNELALPSKYVNFLYLASHYEKLKGSPEDNEQKQLFVEQHKHYLDEIIEQISEFSKRVILADANLDKVLSAYNKHRDKPIREQAENIIHLFTLTNLGAPAAFKYFDTTIDRKRYTSTKEVLDATLIHQSITGLYETRIDLSQLGGDGGEAAAKGGGPAPGGMDPLQLLQPLEAEIKGTKLKAHWNSGATITCVPQAFLEEEVPIKNIWIKTIHGEKEQPVYYLTFKIQGRKVEAEVISSPYDYILVSPSDIPWLMKKPLQLTTLVPLQEYEERLLKQTMLTGSYKEKLQSLFLKYDALWQHWENQVGHRRIKPHHIATGTVNPRPQKQYPINPKAKASIQTVINDLLKQGVLIQQNSIMNTPVYPVPKPDGKWRMVLDYREVNKTIPLIAAQNQHSAGILSSIFRGKYKTTLDLSNGFWAHSITPESYWLTAFTWLGQQYCWTRLPQGFLNSPALFNADVVDLLKEVPNVQVYVDDIYISHDDPREHLEQLEKVFSLLLNAGYVVSLKKSEIAQHEVEFLGFNITKEGRGLTETFKQKLLNITPPRDLKQLQSILGLLNFARNFIPNFSELVKPLYNIIATAPGKYITWTTDNSQQLQNIISMLNSAENLEERNPEVRLIMKVNTSPSAGYIRFYNEFAKRPIMYLNYVYTKAEVKFTNTEKLLTTIHKGLIKALDLGMGQEILVYSPIVSMTKIQKTPLPERKALPIRWITWMSYLEDPRIQFHYDKTLPELQQVPTVTDDIIAKIKHPSEFSMVFYTDGSAIKHPNVNKSHNAGMGIAQVQFKPEFTVINTWSIPLGDHTAQLAEVAAVEFACKKALKIDGPVLIVTDSFYVAESVNKELPYWQSNGFFNNKKKPLKHVSKWKSIADCIQLKPDIIIIHEKGHQPTASTFHTEGNNLADKLATQGSYVVNAGKRTADGSEFEKRTADGSEFESPKKKAKVE

SEQ ID NO: 637 - protein, 2180 aa, synthetic construct
MPAAKRVKLDGGDKKYSIGLDIGTNSVGWAVITDEYKVPSKKFKVLGNTDRHSIKKNLIGALLFDSGETAEATRLKRTARRRYTRRKNRICYLQEIFSNEMAKVDDSFFHRLEESFLVEEDKKHERHPIFGNIVDEVAYHEKYPTIYHLRKKLVDSTDKADLRLIYLALAHMIKFRGHFLIEGDLNPDNSDVDKLFIQLVQTYNQLFEENPINASGVDAKAILSARLSKSRRLENLIAQLPGEKKNGLFGNLIALSLGLTPNFKSNFDLAEDAKLQLSKDTYDDDLDNLLAQIGDQYADLFLAAKNLSDAILLSDILRVNTEITKAPLSASMIKRYDEHHQDLTLLKALVRQQLPEKYKEIFFDQSKNGYAGYIDGGASQEEFYKFIKPILEKMDGTEELLVKLNREDLLRKQRTFDNGSIPHQIHLGELHAILRRQEDFYPFLKDNREKIEKILTFRIPYYVGPLARGNSRFAWMTRKSEETITPWNFEEVVDKGASAQSFIERMTNFDKNLPNEKVLPKHSLLYEYFTVYNELTKVKYVTEGMRKPAFLSGEQKKAIVDLLFKTNRKVTVKQLKEDYFKKIECFDSVEISGVEDRFNASLGTYHDLLKIIKDKDFLDNEENEDILEDIVLTLTLFEDREMIEERLKTYAHLFDDKVMKQLKRRRYTGWGRLSRKLINGIRDKQSGKTILDFLKSDGFANRNFMQLIHDDSLTFKEDIQKAQVSGQGDSLHEHIANLAGSPAIKKGILQTVKVVDELVKVMGRHKPENIVIEMARENQTTQKGQKNSRERMKRIEEGIKELGSQILKEHPVENTQLQNEKLYLYYLQNGRDMYVDQELDINRLSDYDVDHIVPQSFLKDDSIDNKVLTRSDKARGKSDNVPSEEVVKKMKNYWRQLLNAKLITQRKFDNLTKAERGGLSELDKAGFIKRQLVETRQITKHVAQILDSRMNTKYDENDKLIREVKVITLKSKLVSDFRKDFQFYKVREINNYHHAHDAYLNAVVGTALIKKYPKLESEFVYGDYKVYDVRKMIAKSEQEIGKATAKYFFYSNIMNFFKTEITLANGEIRKRPLIETNGETGEIVWDKGRDFATVRKVLSMPQVNIVKKTEVQTGGFSKESILPKRNSDKLIARKKDWDPKKYGGFDSPTVAYSVLVVAKVEKGKSKKLKSVKELLGITIMERSSFEKNPIDFLEAKGYKEVKKDLIIKLPKYSLFELENGRKRMLASAGELQKGNELALPSKYVNFLYLASHYEKLKGSPEDNEQKQLFVEQHKHYLDEIIEQISEFSKRVILADANLDKVLSAYNKHRDKPIREQAENIIHLFTLTNLGAPAAFKYFDTTIDRKRYTSTKEVLDATLIHQSITGLYETRIDLSQLGGDGGGSSGSSGSSGSSGSSGGMDPLQLLQPLEAEIKGTKLKAHWNSGATITCVPQAFLEEEVPIKNIWIKTIHGEKEQPVYYLTFKIQGRKVEAEVISSPYDYILVSPSDIPWLMKKPLQLTTLVPLQEYEERLLKQTMLTGSYKEKLQSLFLKYDALWQHWENQVGHRRIKPHHIATGTVNPRPQKQYPINPKAKASIQTVINDLLKQGVLIQQNSIMNTPVYPVPKPDGKWRMVLDYREVNKTIPLIAAQNQHSAGILSSIFRGKYKTTLDLSNGFWAHSITPESYWLTAFTWLGQQYCWTRLPQGFLNSPALFNADVVDLLKEVPNVQVYVDDIYISHDDPREHLEQLEKVFSLLLNAGYVVSLKKSEIAQHEVEFLGFNITKEGRGLTETFKQKLLNITPPRDLKQLQSILGLLNFARNFIPNFSELVKPLYNIIATAPGKYITWTTDNSQQLQNIISMLNSAENLEERNPEVRLIMKVNTSPSAGYIRFYNEFAKRPIMYLNYVYTKAEVKFTNTEKLLTTIHKGLIKALDLGMGQEILVYSPIVSMTKIQKTPLPERKALPIRWITWMSYLEDPRIQFHYDKTLPELQQVPTVTDDIIAKIKHPSEFSMVFYTDGSAIKHPNVNKSHNAGMGIAQVQFKPEFTVINTWSIPLGDHTAQLAEVAAVEFACKKALKIDGPVLIVTDSFYVAESVNKELPYWQSNGFFNNKKKPLKHVSKWKSIADCIQLKPDIIIIHEKGHQPTASTFHTEGNNLADKLATQGSYVVNAGKRTADGSEFEKRTADGSEFESPKKKAKVE

SEQ ID NO: 638 - protein, 2173 aa, synthetic construct
MPAAKRVKLDGGDKKYSIGLDIGTNSVGWAVITDEYKVPSKKFKVLGNTDRHSIKKNLIGALLFDSGETAEATRLKRTARRRYTRRKNRICYLQEIFSNEMAKVDDSFFHRLEESFLVEEDKKHERHPIFGNIVDEVAYHEKYPTIYHLRKKLVDSTDKADLRLIYLALAHMIKFRGHFLIEGDLNPDNSDVDKLFIQLVQTYNQLFEENPINASGVDAKAILSARLSKSRRLENLIAQLPGEKKNGLFGNLIALSLGLTPNFKSNFDLAEDAKLQLSKDTYDDDLDNLLAQIGDQYADLFLAAKNLSDAILLSDILRVNTEITKAPLSASMIKRYDEHHQDLTLLKALVRQQLPEKYKEIFFDQSKNGYAGYIDGGASQEEFYKFIKPILEKMDGTEELLVKLNREDLLRKQRTFDNGSIPHQIHLGELHAILRRQEDFYPFLKDNREKIEKILTFRIPYYVGPLARGNSRFAWMTRKSEETITPWNFEEVVDKGASAQSFIERMTNFDKNLPNEKVLPKHSLLYEYFTVYNELTKVKYVTEGMRKPAFLSGEQKKAIVDLLFKTNRKVTVKQLKEDYFKKIECFDSVEISGVEDRFNASLGTYHDLLKIIKDKDFLDNEENEDILEDIVLTLTLFEDREMIEERLKTYAHLFDDKVMKQLKRRRYTGWGRLSRKLINGIRDKQSGKTILDFLKSDGFANRNFMQLIHDDSLTFKEDIQKAQVSGQGDSLHEHIANLAGSPAIKKGILQTVKVVDELVKVMGRHKPENIVIEMARENQTTQKGQKNSRERMKRIEEGIKELGSQILKEHPVENTQLQNEKLYLYYLQNGRDMYVDQELDINRLSDYDVDHIVPQSFLKDDSIDNKVLTRSDKARGKSDNVPSEEVVKKMKNYWRQLLNAKLITQRKFDNLTKAERGGLSELDKAGFIKRQLVETRQITKHVAQILDSRMNTKYDENDKLIREVKVITLKSKLVSDFRKDFQFYKVREINNYHHAHDAYLNAVVGTALIKKYPKLESEFVYGDYKVYDVRKMIAKSEQEIGKATAKYFFYSNIMNFFKTEITLANGEIRKRPLIETNGETGEIVWDKGRDFATVRKVLSMPQVNIVKKTEVQTGGFSKESILPKRNSDKLIARKKDWDPKKYGGFDSPTVAYSVLVVAKVEKGKSKKLKSVKELLGITIMERSSFEKNPIDFLEAKGYKEVKKDLIIKLPKYSLFELENGRKRMLASAGELQKGNELALPSKYVNFLYLASHYEKLKGSPEDNEQKQLFVEQHKHYLDEIIEQISEFSKRVILADANLDKVLSAYNKHRDKPIREQAENIIHLFTLTNLGAPAAFKYFDTTIDRKRYTSTKEVLDATLIHQSITGLYETRIDLSQLGGDGGEAAAKGSSGGMDPLQLLQPLEAEIKGTKLKAHWNSGATITCVPQAFLEEEVPIKNIWIKTIHGEKEQPVYYLTFKIQGRKVEAEVISSPYDYILVSPSDIPWLMKKPLQLTTLVPLQEYEERLLKQTMLTGSYKEKLQSLFLKYDALWQHWENQVGHRRIKPHHIATGTVNPRPQKQYPINPKAKASIQTVINDLLKQGVLIQQNSIMNTPVYPVPKPDGKWRMVLDYREVNKTIPLIAAQNQHSAGILSSIFRGKYKTTLDLSNGFWAHSITPESYWLTAFTWLGQQYCWTRLPQGFLNSPALFNADVVDLLKEVPNVQVYVDDIYISHDDPREHLEQLEKVFSLLLNAGYVVSLKKSEIAQHEVEFLGFNITKEGRGLTETFKQKLLNITPPRDLKQLQSILGLLNFARNFIPNFSELVKPLYNIIATAPGKYITWTTDNSQQLQNIISMLNSAENLEERNPEVRLIMKVNTSPSAGYIRFYNEFAKRPIMYLNYVYTKAEVKFTNTEKLLTTIHKGLIKALDLGMGQEILVYSPIVSMTKIQKTPLPERKALPIRWITWMSYLEDPRIQFHYDKTLPELQQVPTVTDDIIAKIKHPSEFSMVFYTDGSAIKHPNVNKSHNAGMGIAQVQFKPEFTVINTWSIPLGDHTAQLAEVAAVEFACKKALKIDGPVLIVTDSFYVAESVNKELPYWQSNGFFNNKKKPLKHVSKWKSIADCIQLKPDIIIIHEKGHQPTASTFHTEGNNLADKLATQGSYVVNAGKRTADGSEFEKRTADGSEFESPKKKAKVE

SEQ ID NO: 639 - protein, 2172 aa, synthetic construct
MPAAKRVKLDGGDKKYSIGLDIGTNSVGWAVITDEYKVPSKKFKVLGNTDRHSIKKNLIGALLFDSGETAEATRLKRTARRRYTRRKNRICYLQEIFSNEMAKVDDSFFHRLEESFLVEEDKKHERHPIFGNIVDEVAYHEKYPTIYHLRKKLVDSTDKADLRLIYLALAHMIKFRGHFLIEGDLNPDNSDVDKLFIQLVQTYNQLFEENPINASGVDAKAILSARLSKSRRLENLIAQLPGEKKNGLFGNLIALSLGLTPNFKSNFDLAEDAKLQLSKDTYDDDLDNLLAQIGDQYADLFLAAKNLSDAILLSDILRVNTEITKAPLSASMIKRYDEHHQDLTLLKALVRQQLPEKYKEIFFDQSKNGYAGYIDGGASQEEFYKFIKPILEKMDGTEELLVKLNREDLLRKQRTFDNGSIPHQIHLGELHAILRRQEDFYPFLKDNREKIEKILTFRIPYYVGPLARGNSRFAWMTRKSEETITPWNFEEVVDKGASAQSFIERMTNFDKNLPNEKVLPKHSLLYEYFTVYNELTKVKYVTEGMRKPAFLSGEQKKAIVDLLFKTNRKVTVKQLKEDYFKKIECFDSVEISGVEDRFNASLGTYHDLLKIIKDKDFLDNEENEDILEDIVLTLTLFEDREMIEERLKTYAHLFDDKVMKQLKRRRYTGWGRLSRKLINGIRDKQSGKTILDFLKSDGFANRNFMQLIHDDSLTFKEDIQKAQVSGQGDSLHEHIANLAGSPAIKKGILQTVKVVDELVKVMGRHKPENIVIEMARENQTTQKGQKNSRERMKRIEEGIKELGSQILKEHPVENTQLQNEKLYLYYLQNGRDMYVDQELDINRLSDYDVDHIVPQSFLKDDSIDNKVLTRSDKARGKSDNVPSEEVVKKMKNYWRQLLNAKLITQRKFDNLTKAERGGLSELDKAGFIKRQLVETRQITKHVAQILDSRMNTKYDENDKLIREVKVITLKSKLVSDFRKDFQFYKVREINNYHHAHDAYLNAVVGTALIKKYPKLESEFVYGDYKVYDVRKMIAKSEQEIGKATAKYFFYSNIMNFFKTEITLANGEIRKRPLIETNGETGEIVWDKGRDFATVRKVLSMPQVNIVKKTEVQTGGFSKESILPKRNSDKLIARKKDWDPKKYGGFDSPTVAYSVLVVAKVEKGKSKKLKSVKELLGITIMERSSFEKNPIDFLEAKGYKEVKKDLIIKLPKYSLFELENGRKRMLASAGELQKGNELALPSKYVNFLYLASHYEKLKGSPEDNEQKQLFVEQHKHYLDEIIEQISEFSKRVILADANLDKVLSAYNKHRDKPIREQAENIIHLFTLTNLGAPAAFKYFDTTIDRKRYTSTKEVLDATLIHQSITGLYETRIDLSQLGGDGGGGGGGGGGGMDPLQLLQPLEAEIKGTKLKAHWNSGATITCVPQAFLEEEVPIKNIWIKTIHGEKEQPVYYLTFKIQGRKVEAEVISSPYDYILVSPSDIPWLMKKPLQLTTLVPLQEYEERLLKQTMLTGSYKEKLQSLFLKYDALWQHWENQVGHRRIKPHHIATGTVNPRPQKQYPINPKAKASIQTVINDLLKQGVLIQQNSIMNTPVYPVPKPDGKWRMVLDYREVNKTIPLIAAQNQHSAGILSSIFRGKYKTTLDLSNGFWAHSITPESYWLTAFTWLGQQYCWTRLPQGFLNSPALFNADVVDLLKEVPNVQVYVDDIYISHDDPREHLEQLEKVFSLLLNAGYVVSLKKSEIAQHEVEFLGFNITKEGRGLTETFKQKLLNITPPRDLKQLQSILGLLNFARNFIPNFSELVKPLYNIIATAPGKYITWTTDNSQQLQNIISMLNSAENLEERNPEVRLIMKVNTSPSAGYIRFYNEFAKRPIMYLNYVYTKAEVKFTNTEKLLTTIHKGLIKALDLGMGQEILVYSPIVSMTKIQKTPLPERKALPIRWITWMSYLEDPRIQFHYDKTLPELQQVPTVTDDIIAKIKHPSEFSMVFYTDGSAIKHPNVNKSHNAGMGIAQVQFKPEFTVINTWSIPLGDHTAQLAEVAAVEFACKKALKIDGPVLIVTDSFYVAESVNKELPYWQSNGFFNNKKKPLKHVSKWKSIADCIQLKPDIIIIHEKGHQPTASTFHTEGNNLADKLATQGSYVVNAGKRTADGSEFEKRTADGSEFESPKKKAKVE

SEQ ID NO: 640 - protein, 2176 aa, synthetic construct
MPAAKRVKLDGGDKKYSIGLDIGTNSVGWAVITDEYKVPSKKFKVLGNTDRHSIKKNLIGALLFDSGETAEATRLKRTARRRYTRRKNRICYLQEIFSNEMAKVDDSFFHRLEESFLVEEDKKHERHPIFGNIVDEVAYHEKYPTIYHLRKKLVDSTDKADLRLIYLALAHMIKFRGHFLIEGDLNPDNSDVDKLFIQLVQTYNQLFEENPINASGVDAKAILSARLSKSRRLENLIAQLPGEKKNGLFGNLIALSLGLTPNFKSNFDLAEDAKLQLSKDTYDDDLDNLLAQIGDQYADLFLAAKNLSDAILLSDILRVNTEITKAPLSASMIKRYDEHHQDLTLLKALVRQQLPEKYKEIFFDQSKNGYAGYIDGGASQEEFYKFIKPILEKMDGTEELLVKLNREDLLRKQRTFDNGSIPHQIHLGELHAILRRQEDFYPFLKDNREKIEKILTFRIPYYVGPLARGNSRFAWMTRKSEETITPWNFEEVVDKGASAQSFIERMTNFDKNLPNEKVLPKHSLLYEYFTVYNELTKVKYVTEGMRKPAFLSGEQKKAIVDLLFKTNRKVTVKQLKEDYFKKIECFDSVEISGVEDRFNASLGTYHDLLKIIKDKDFLDNEENEDILEDIVLTLTLFEDREMIEERLKTYAHLFDDKVMKQLKRRRYTGWGRLSRKLINGIRDKQSGKTILDFLKSDGFANRNFMQLIHDDSLTFKEDIQKAQVSGQGDSLHEHIANLAGSPAIKKGILQTVKVVDELVKVMGRHKPENIVIEMARENQTTQKGQKNSRERMKRIEEGIKELGSQILKEHPVENTQLQNEKLYLYYLQNGRDMYVDQELDINRLSDYDVDHIVPQSFLKDDSIDNKVLTRSDKARGKSDNVPSEEVVKKMKNYWRQLLNAKLITQRKFDNLTKAERGGLSELDKAGFIKRQLVETRQITKHVAQILDSRMNTKYDENDKLIREVKVITLKSKLVSDFRKDFQFYKVREINNYHHAHDAYLNAVVGTALIKKYPKLESEFVYGDYKVYDVRKMIAKSEQEIGKATAKYFFYSNIMNFFKTEITLANGEIRKRPLIETNGETGEIVWDKGRDFATVRKVLSMPQVNIVKKTEVQTGGFSKESILPKRNSDKLIARKKDWDPKKYGGFDSPTVAYSVLVVAKVEKGKSKKLKSVKELLGITIMERSSFEKNPIDFLEAKGYKEVKKDLIIKLPKYSLFELENGRKRMLASAGELQKGNELALPSKYVNFLYLASHYEKLKGSPEDNEQKQLFVEQHKHYLDEIIEQISEFSKRVILADANLDKVLSAYNKHRDKPIREQAENIIHLFTLTNLGAPAAFKYFDTTIDRKRYTSTKEVLDATLIHQSITGLYETRIDLSQLGGDGGGGSEAAAKGSSGGMDPLQLLQPLEAEIKGTKLKAHWNSGATITCVPQAFLEEEVPIKNIWIKTIHGEKEQPVYYLTFKIQGRKVEAEVISSPYDYILVSPSDIPWLMKKPLQLTTLVPLQEYEERLLKQTMLTGSYKEKLQSLFLKYDALWQHWENQVGHRRIKPHHIATGTVNPRPQKQYPINPKAKASIQTVINDLLKQGVLIQQNSIMNTPVYPVPKPDGKWRMVLDYREVNKTIPLIAAQNQHSAGILSSIFRGKYKTTLDLSNGFWAHSITPESYWLTAFTWLGQQYCWTRLPQGFLNSPALFNADVVDLLKEVPNVQVYVDDIYISHDDPREHLEQLEKVFSLLLNAGYVVSLKKSEIAQHEVEFLGFNITKEGRGLTETFKQKLLNITPPRDLKQLQSILGLLNFARNFIPNFSELVKPLYNIIATAPGKYITWTTDNSQQLQNIISMLNSAENLEERNPEVRLIMKVNTSPSAGYIRFYNEFAKRPIMYLNYVYTKAEVKFTNTEKLLTTIHKGLIKALDLGMGQEILVYSPIVSMTKIQKTPLPERKALPIRWITWMSYLEDPRIQFHYDKTLPELQQVPTVTDDIIAKIKHPSEFSMVFYTDGSAIKHPNVNKSHNAGMGIAQVQFKPEFTVINTWSIPLGDHTAQLAEVAAVEFACKKALKIDGPVLIVTDSFYVAESVNKELPYWQSNGFFNNKKKPLKHVSKWKSIADCIQLKPDIIIIHEKGHQPTASTFHTEGNNLADKLATQGSYVVNAGKRTADGSEFEKRTADGSEFESPKKKAKVE

SEQ ID NO: 641 - protein, 2176 aa, synthetic construct
MPAAKRVKLDGGDKKYSIGLDIGTNSVGWAVITDEYKVPSKKFKVLGNTDRHSIKKNLIGALLFDSGETAEATRLKRTARRRYTRRKNRICYLQEIFSNEMAKVDDSFFHRLEESFLVEEDKKHERHPIFGNIVDEVAYHEKYPTIYHLRKKLVDSTDKADLRLIYLALAHMIKFRGHFLIEGDLNPDNSDVDKLFIQLVQTYNQLFEENPINASGVDAKAILSARLSKSRRLENLIAQLPGEKKNGLFGNLIALSLGLTPNFKSNFDLAEDAKLQLSKDTYDDDLDNLLAQIGDQYADLFLAAKNLSDAILLSDILRVNTEITKAPLSASMIKRYDEHHQDLTLLKALVRQQLPEKYKEIFFDQSKNGYAGYIDGGASQEEFYKFIKPILEKMDGTEELLVKLNREDLLRKQRTFDNGSIPHQIHLGELHAILRRQEDFYPFLKDNREKIEKILTFRIPYYVGPLARGNSRFAWMTRKSEETITPWNFEEVVDKGASAQSFIERMTNFDKNLPNEKVLPKHSLLYEYFTVYNELTKVKYVTEGMRKPAFLSGEQKKAIVDLLFKTNRKVTVKQLKEDYFKKIECFDSVEISGVEDRFNASLGTYHDLLKIIKDKDFLDNEENEDILEDIVLTLTLFEDREMIEERLKTYAHLFDDKVMKQLKRRRYTGWGRLSRKLINGIRDKQSGKTILDFLKSDGFANRNFMQLIHDDSLTFKEDIQKAQVSGQGDSLHEHIANLAGSPAIKKGILQTVKVVDELVKVMGRHKPENIVIEMARENQTTQKGQKNSRERMKRIEEGIKELGSQILKEHPVENTQLQNEKLYLYYLQNGRDMYVDQELDINRLSDYDVDHIVPQSFLKDDSIDNKVLTRSDKARGKSDNVPSEEVVKKMKNYWRQLLNAKLITQRKFDNLTKAERGGLSELDKAGFIKRQLVETRQITKHVAQILDSRMNTKYDENDKLIREVKVITLKSKLVSDFRKDFQFYKVREINNYHHAHDAYLNAVVGTALIKKYPKLESEFVYGDYKVYDVRKMIAKSEQEIGKATAKYFFYSNIMNFFKTEITLANGEIRKRPLIETNGETGEIVWDKGRDFATVRKVLSMPQVNIVKKTEVQTGGFSKESILPKRNSDKLIARKKDWDPKKYGGFDSPTVAYSVLVVAKVEKGKSKKLKSVKELLGITIMERSSFEKNPIDFLEAKGYKEVKKDLIIKLPKYSLFELENGRKRMLASAGELQKGNELALPSKYVNFLYLASHYEKLKGSPEDNEQKQLFVEQHKHYLDEIIEQISEFSKRVILADANLDKVLSAYNKHRDKPIREQAENIIHLFTLTNLGAPAAFKYFDTTIDRKRYTSTKEVLDATLIHQSITGLYETRIDLSQLGGDGGPAPEAAAKGGSGGMDPLQLLQPLEAEIKGTKLKAHWNSGATITCVPQAFLEEEVPIKNIWIKTIHGEKEQPVYYLTFKIQGRKVEAEVISSPYDYILVSPSDIPWLMKKPLQLTTLVPLQEYEERLLKQTMLTGSYKEKLQSLFLKYDALWQHWENQVGHRRIKPHHIATGTVNPRPQKQYPINPKAKASIQTVINDLLKQGVLIQQNSIMNTPVYPVPKPDGKWRMVLDYREVNKTIPLIAAQNQHSAGILSSIFRGKYKTTLDLSNGFWAHSITPESYWLTAFTWLGQQYCWTRLPQGFLNSPALFNADVVDLLKEVPNVQVYVDDIYISHDDPREHLEQLEKVFSLLLNAGYVVSLKKSEIAQHEVEFLGFNITKEGRGLTETFKQKLLNITPPRDLKQLQSILGLLNFARNFIPNFSELVKPLYNIIATAPGKYITWTTDNSQQLQNIISMLNSAENLEERNPEVRLIMKVNTSPSAGYIRFYNEFAKRPIMYLNYVYTKAEVKFTNTEKLLTTIHKGLIKALDLGMGQEILVYSPIVSMTKIQKTPLPERKALPIRWITWMSYLEDPRIQFHYDKTLPELQQVPTVTDDIIAKIKHPSEFSMVFYTDGSAIKHPNVNKSHNAGMGIAQVQFKPEFTVINTWSIPLGDHTAQLAEVAAVEFACKKALKIDGPVLIVTDSFYVAESVNKELPYWQSNGFFNNKKKPLKHVSKWKSIADCIQLKPDIIIIHEKGHQPTASTFHTEGNNLADKLATQGSYVVNAGKRTADGSEFEKRTADGSEFESPKKKAKVE

SEQ ID NO: 642 - protein, 2173 aa, synthetic construct
MPAAKRVKLDGGDKKYSIGLDIGTNSVGWAVITDEYKVPSKKFKVLGNTDRHSIKKNLIGALLFDSGETAEATRLKRTARRRYTRRKNRICYLQEIFSNEMAKVDDSFFHRLEESFLVEEDKKHERHPIFGNIVDEVAYHEKYPTIYHLRKKLVDSTDKADLRLIYLALAHMIKFRGHFLIEGDLNPDNSDVDKLFIQLVQTYNQLFEENPINASGVDAKAILSARLSKSRRLENLIAQLPGEKKNGLFGNLIALSLGLTPNFKSNFDLAEDAKLQLSKDTYDDDLDNLLAQIGDQYADLFLAAKNLSDAILLSDILRVNTEITKAPLSASMIKRYDEHHQDLTLLKALVRQQLPEKYKEIFFDQSKNGYAGYIDGGASQEEFYKFIKPILEKMDGTEELLVKLNREDLLRKQRTFDNGSIPHQIHLGELHAILRRQEDFYPFLKDNREKIEKILTFRIPYYVGPLARGNSRFAWMTRKSEETITPWNFEEVVDKGASAQSFIERMTNFDKNLPNEKVLPKHSLLYEYFTVYNELTKVKYVTEGMRKPAFLSGEQKKAIVDLLFKTNRKVTVKQLKEDYFKKIECFDSVEISGVEDRFNASLGTYHDLLKIIKDKDFLDNEENEDILEDIVLTLTLFEDREMIEERLKTYAHLFDDKVMKQLKRRRYTGWGRLSRKLINGIRDKQSGKTILDFLKSDGFANRNFMQLIHDDSLTFKEDIQKAQVSGQGDSLHEHIANLAGSPAIKKGILQTVKVVDELVKVMGRHKPENIVIEMARENQTTQKGQKNSRERMKRIEEGIKELGSQILKEHPVENTQLQNEKLYLYYLQNGRDMYVDQELDINRLSDYDVDHIVPQSFLKDDSIDNKVLTRSDKARGKSDNVPSEEVVKKMKNYWRQLLNAKLITQRKFDNLTKAERGGLSELDKAGFIKRQLVETRQITKHVAQILDSRMNTKYDENDKLIREVKVITLKSKLVSDFRKDFQFYKVREINNYHHAHDAYLNAVVGTALIKKYPKLESEFVYGDYKVYDVRKMIAKSEQEIGKATAKYFFYSNIMNFFKTEITLANGEIRKRPLIETNGETGEIVWDKGRDFATVRKVLSMPQVNIVKKTEVQTGGFSKESILPKRNSDKLIARKKDWDPKKYGGFDSPTVAYSVLVVAKVEKGKSKKLKSVKELLGITIMERSSFEKNPIDFLEAKGYKEVKKDLIIKLPKYSLFELENGRKRMLASAGELQKGNELALPSKYVNFLYLASHYEKLKGSPEDNEQKQLFVEQHKHYLDEIIEQISEFSKRVILADANLDKVLSAYNKHRDKPIREQAENIIHLFTLTNLGAPAAFKYFDTTIDRKRYTSTKEVLDATLIHQSITGLYETRIDLSQLGGDGGGGGGGGGGGGMDPLQLLQPLEAEIKGTKLKAHWNSGATITCVPQAFLEEEVPIKNIWIKTIHGEKEQPVYYLTFKIQGRKVEAEVISSPYDYILVSPSDIPWLMKKPLQLTTLVPLQEYEERLLKQTMLTGSYKEKLQSLFLKYDALWQHWENQVGHRRIKPHHIATGTVNPRPQKQYPINPKAKASIQTVINDLLKQGVLIQQNSIMNTPVYPVPKPDGKWRMVLDYREVNKTIPLIAAQNQHSAGILSSIFRGKYKTTLDLSNGFWAHSITPESYWLTAFTWLGQQYCWTRLPQGFLNSPALFNADVVDLLKEVPNVQVYVDDIYISHDDPREHLEQLEKVFSLLLNAGYVVSLKKSEIAQHEVEFLGFNITKEGRGLTETFKQKLLNITPPRDLKQLQSILGLLNFARNFIPNFSELVKPLYNIIATAPGKYITWTTDNSQQLQNIISMLNSAENLEERNPEVRLIMKVNTSPSAGYIRFYNEFAKRPIMYLNYVYTKAEVKFTNTEKLLTTIHKGLIKALDLGMGQEILVYSPIVSMTKIQKTPLPERKALPIRWITWMSYLEDPRIQFHYDKTLPELQQVPTVTDDIIAKIKHPSEFSMVFYTDGSAIKHPNVNKSHNAGMGIAQVQFKPEFTVINTWSIPLGDHTAQLAEVAAVEFACKKALKIDGPVLIVTDSFYVAESVNKELPYWQSNGFFNNKKKPLKHVSKWKSIADCIQLKPDIIIIHEKGHQPTASTFHTEGNNLADKLATQGSYVVNAGKRTADGSEFEKRTADGSEFESPKKKAKVE

SEQ ID NO: 643 - protein, 2171 aa, synthetic construct
MPAAKRVKLDGGDKKYSIGLDIGTNSVGWAVITDEYKVPSKKFKVLGNTDRHSIKKNLIGALLFDSGETAEATRLKRTARRRYTRRKNRICYLQEIFSNEMAKVDDSFFHRLEESFLVEEDKKHERHPIFGNIVDEVAYHEKYPTIYHLRKKLVDSTDKADLRLIYLALAHMIKFRGHFLIEGDLNPDNSDVDKLFIQLVQTYNQLFEENPINASGVDAKAILSARLSKSRRLENLIAQLPGEKKNGLFGNLIALSLGLTPNFKSNFDLAEDAKLQLSKDTYDDDLDNLLAQIGDQYADLFLAAKNLSDAILLSDILRVNTEITKAPLSASMIKRYDEHHQDLTLLKALVRQQLPEKYKEIFFDQSKNGYAGYIDGGASQEEFYKFIKPILEKMDGTEELLVKLNREDLLRKQRTFDNGSIPHQIHLGELHAILRRQEDFYPFLKDNREKIEKILTFRIPYYVGPLARGNSRFAWMTRKSEETITPWNFEEVVDKGASAQSFIERMTNFDKNLPNEKVLPKHSLLYEYFTVYNELTKVKYVTEGMRKPAFLSGEQKKAIVDLLFKTNRKVTVKQLKEDYFKKIECFDSVEISGVEDRFNASLGTYHDLLKIIKDKDFLDNEENEDILEDIVLTLTLFEDREMIEERLKTYAHLFDDKVMKQLKRRRYTGWGRLSRKLINGIRDKQSGKTILDFLKSDGFANRNFMQLIHDDSLTFKEDIQKAQVSGQGDSLHEHIANLAGSPAIKKGILQTVKVVDELVKVMGRHKPENIVIEMARENQTTQKGQKNSRERMKRIEEGIKELGSQILKEHPVENTQLQNEKLYLYYLQNGRDMYVDQELDINRLSDYDVDHIVPQSFLKDDSIDNKVLTRSDKARGKSDNVPSEEVVKKMKNYWRQLLNAKLITQRKFDNLTKAERGGLSELDKAGFIKRQLVETRQITKHVAQILDSRMNTKYDENDKLIREVKVITLKSKLVSDFRKDFQFYKVREINNYHHAHDAYLNAVVGTALIKKYPKLESEFVYGDYKVYDVRKMIAKSEQEIGKATAKYFFYSNIMNFFKTEITLANGEIRKRPLIETNGETGEIVWDKGRDFATVRKVLSMPQVNIVKKTEVQTGGFSKESILPKRNSDKLIARKKDWDPKKYGGFDSPTVAYSVLVVAKVEKGKSKKLKSVKELLGITIMERSSFEKNPIDFLEAKGYKEVKKDLIIKLPKYSLFELENGRKRMLASAGELQKGNELALPSKYVNFLYLASHYEKLKGSPEDNEQKQLFVEQHKHYLDEIIEQISEFSKRVILADANLDKVLSAYNKHRDKPIREQAENIIHLFTLTNLGAPAAFKYFDTTIDRKRYTSTKEVLDATLIHQSITGLYETRIDLSQLGGDGGGGSGSSGGMDPLQLLQPLEAEIKGTKLKAHWNSGATITCVPQAFLEEEVPIKNIWIKTIHGEKEQPVYYLTFKIQGRKVEAEVISSPYDYILVSPSDIPWLMKKPLQLTTLVPLQEYEERLLKQTMLTGSYKEKLQSLFLKYDALWQHWENQVGHRRIKPHHIATGTVNPRPQKQYPINPKAKASIQTVINDLLKQGVLIQQNSIMNTPVYPVPKPDGKWRMVLDYREVNKTIPLIAAQNQHSAGILSSIFRGKYKTTLDLSNGFWAHSITPESYWLTAFTWLGQQYCWTRLPQGFLNSPALFNADVVDLLKEVPNVQVYVDDIYISHDDPREHLEQLEKVFSLLLNAGYVVSLKKSEIAQHEVEFLGFNITKEGRGLTETFKQKLLNITPPRDLKQLQSILGLLNFARNFIPNFSELVKPLYNIIATAPGKYITWTTDNSQQLQNIISMLNSAENLEERNPEVRLIMKVNTSPSAGYIRFYNEFAKRPIMYLNYVYTKAEVKFTNTEKLLTTIHKGLIKALDLGMGQEILVYSPIVSMTKIQKTPLPERKALPIRWITWMSYLEDPRIQFHYDKTLPELQQVPTVTDDIIAKIKHPSEFSMVFYTDGSAIKHPNVNKSHNAGMGIAQVQFKPEFTVINTWSIPLGDHTAQLAEVAAVEFACKKALKIDGPVLIVTDSFYVAESVNKELPYWQSNGFFNNKKKPLKHVSKWKSIADCIQLKPDIIIIHEKGHQPTASTFHTEGNNLADKLATQGSYVVNAGKRTADGSEFEKRTADGSEFESPKKKAKVE

SEQ ID NO: 644 - protein, 2171 aa, synthetic construct
MPAAKRVKLDGGDKKYSIGLDIGTNSVGWAVITDEYKVPSKKFKVLGNTDRHSIKKNLIGALLFDSGETAEATRLKRTARRRYTRRKNRICYLQEIFSNEMAKVDDSFFHRLEESFLVEEDKKHERHPIFGNIVDEVAYHEKYPTIYHLRKKLVDSTDKADLRLIYLALAHMIKFRGHFLIEGDLNPDNSDVDKLFIQLVQTYNQLFEENPINASGVDAKAILSARLSKSRRLENLIAQLPGEKKNGLFGNLIALSLGLTPNFKSNFDLAEDAKLQLSKDTYDDDLDNLLAQIGDQYADLFLAAKNLSDAILLSDILRVNTEITKAPLSASMIKRYDEHHQDLTLLKALVRQQLPEKYKEIFFDQSKNGYAGYIDGGASQEEFYKFIKPILEKMDGTEELLVKLNREDLLRKQRTFDNGSIPHQIHLGELHAILRRQEDFYPFLKDNREKIEKILTFRIPYYVGPLARGNSRFAWMTRKSEETITPWNFEEVVDKGASAQSFIERMTNFDKNLPNEKVLPKHSLLYEYFTVYNELTKVKYVTEGMRKPAFLSGEQKKAIVDLLFKTNRKVTVKQLKEDYFKKIECFDSVEISGVEDRFNASLGTYHDLLKIIKDKDFLDNEENEDILEDIVLTLTLFEDREMIEERLKTYAHLFDDKVMKQLKRRRYTGWGRLSRKLINGIRDKQSGKTILDFLKSDGFANRNFMQLIHDDSLTFKEDIQKAQVSGQGDSLHEHIANLAGSPAIKKGILQTVKVVDELVKVMGRHKPENIVIEMARENQTTQKGQKNSRERMKRIEEGIKELGSQILKEHPVENTQLQNEKLYLYYLQNGRDMYVDQELDINRLSDYDVDHIVPQSFLKDDSIDNKVLTRSDKARGKSDNVPSEEVVKKMKNYWRQLLNAKLITQRKFDNLTKAERGGLSELDKAGFIKRQLVETRQITKHVAQILDSRMNTKYDENDKLIREVKVITLKSKLVSDFRKDFQFYKVREINNYHHAHDAYLNAVVGTALIKKYPKLESEFVYGDYKVYDVRKMIAKSEQEIGKATAKYFFYSNIMNFFKTEITLANGEIRKRPLIETNGETGEIVWDKGRDFATVRKVLSMPQVNIVKKTEVQTGGFSKESILPKRNSDKLIARKKDWDPKKYGGFDSPTVAYSVLVVAKVEKGKSKKLKSVKELLGITIMERSSFEKNPIDFLEAKGYKEVKKDLIIKLPKYSLFELENGRKRMLASAGELQKGNELALPSKYVNFLYLASHYEKLKGSPEDNEQKQLFVEQHKHYLDEIIEQISEFSKRVILADANLDKVLSAYNKHRDKPIREQAENIIHLFTLTNLGAPAAFKYFDTTIDRKRYTSTKEVLDATLIHQSITGLYETRIDLSQLGGDGGGGGGGGGGMDPLQLLQPLEAEIKGTKLKAHWNSGATITCVPQAFLEEEVPIKNIWIKTIHGEKEQPVYYLTFKIQGRKVEAEVISSPYDYILVSPSDIPWLMKKPLQLTTLVPLQEYEERLLKQTMLTGSYKEKLQSLFLKYDALWQHWENQVGHRRIKPHHIATGTVNPRPQKQYPINPKAKASIQTVINDLLKQGVLIQQNSIMNTPVYPVPKPDGKWRMVLDYREVNKTIPLIAAQNQHSAGILSSIFRGKYKTTLDLSNGFWAHSITPESYWLTAFTWLGQQYCWTRLPQGFLNSPALFNADVVDLLKEVPNVQVYVDDIYISHDDPREHLEQLEKVFSLLLNAGYVVSLKKSEIAQHEVEFLGFNITKEGRGLTETFKQKLLNITPPRDLKQLQSILGLLNFARNFIPNFSELVKPLYNIIATAPGKYITWTTDNSQQLQNIISMLNSAENLEERNPEVRLIMKVNTSPSAGYIRFYNEFAKRPIMYLNYVYTKAEVKFTNTEKLLTTIHKGLIKALDLGMGQEILVYSPIVSMTKIQKTPLPERKALPIRWITWMSYLEDPRIQFHYDKTLPELQQVPTVTDDIIAKIKHPSEFSMVFYTDGSAIKHPNVNKSHNAGMGIAQVQFKPEFTVINTWSIPLGDHTAQLAEVAAVEFACKKALKIDGPVLIVTDSFYVAESVNKELPYWQSNGFFNNKKKPLKHVSKWKSIADCIQLKPDIIIIHEKGHQPTASTFHTEGNNLADKLATQGSYVVNAGKRTADGSEFEKRTADGSEFESPKKKAKVE

SEQ ID NO: 645 - protein, 2174 aa, synthetic construct
MPAAKRVKLDGGDKKYSIGLDIGTNSVGWAVITDEYKVPSKKFKVLGNTDRHSIKKNLIGALLFDSGETAEATRLKRTARRRYTRRKNRICYLQEIFSNEMAKVDDSFFHRLEESFLVEEDKKHERHPIFGNIVDEVAYHEKYPTIYHLRKKLVDSTDKADLRLIYLALAHMIKFRGHFLIEGDLNPDNSDVDKLFIQLVQTYNQLFEENPINASGVDAKAILSARLSKSRRLENLIAQLPGEKKNGLFGNLIALSLGLTPNFKSNFDLAEDAKLQLSKDTYDDDLDNLLAQIGDQYADLFLAAKNLSDAILLSDILRVNTEITKAPLSASMIKRYDEHHQDLTLLKALVRQQLPEKYKEIFFDQSKNGYAGYIDGGASQEEFYKFIKPILEKMDGTEELLVKLNREDLLRKQRTFDNGSIPHQIHLGELHAILRRQEDFYPFLKDNREKIEKILTFRIPYYVGPLARGNSRFAWMTRKSEETITPWNFEEVVDKGASAQSFIERMTNFDKNLPNEKVLPKHSLLYEYFTVYNELTKVKYVTEGMRKPAFLSGEQKKAIVDLLFKTNRKVTVKQLKEDYFKKIECFDSVEISGVEDRFNASLGTYHDLLKIIKDKDFLDNEENEDILEDIVLTLTLFEDREMIEERLKTYAHLFDDKVMKQLKRRRYTGWGRLSRKLINGIRDKQSGKTILDFLKSDGFANRNFMQLIHDDSLTFKEDIQKAQVSGQGDSLHEHIANLAGSPAIKKGILQTVKVVDELVKVMGRHKPENIVIEMARENQTTQKGQKNSRERMKRIEEGIKELGSQILKEHPVENTQLQNEKLYLYYLQNGRDMYVDQELDINRLSDYDVDHIVPQSFLKDDSIDNKVLTRSDKARGKSDNVPSEEVVKKMKNYWRQLLNAKLITQRKFDNLTKAERGGLSELDKAGFIKRQLVETRQITKHVAQILDSRMNTKYDENDKLIREVKVITLKSKLVSDFRKDFQFYKVREINNYHHAHDAYLNAVVGTALIKKYPKLESEFVYGDYKVYDVRKMIAKSEQEIGKATAKYFFYSNIMNFFKTEITLANGEIRKRPLIETNGETGEIVWDKGRDFATVRKVLSMPQVNIVKKTEVQTGGFSKESILPKRNSDKLIARKKDWDPKKYGGFDSPTVAYSVLVVAKVEKGKSKKLKSVKELLGITIMERSSFEKNPIDFLEAKGYKEVKKDLIIKLPKYSLFELENGRKRMLASAGELQKGNELALPSKYVNFLYLASHYEKLKGSPEDNEQKQLFVEQHKHYLDEIIEQISEFSKRVILADANLDKVLSAYNKHRDKPIREQAENIIHLFTLTNLGAPAAFKYFDTTIDRKRYTSTKEVLDATLIHQSITGLYETRIDLSQLGGDGGGGSGGGPAPGGMDPLQLLQPLEAEIKGTKLKAHWNSGATITCVPQAFLEEEVPIKNIWIKTIHGEKEQPVYYLTFKIQGRKVEAEVISSPYDYILVSPSDIPWLMKKPLQLTTLVPLQEYEERLLKQTMLTGSYKEKLQSLFLKYDALWQHWENQVGHRRIKPHHIATGTVNPRPQKQYPINPKAKASIQTVINDLLKQGVLIQQNSIMNTPVYPVPKPDGKWRMVLDYREVNKTIPLIAAQNQHSAGILSSIFRGKYKTTLDLSNGFWAHSITPESYWLTAFTWLGQQYCWTRLPQGFLNSPALFNADVVDLLKEVPNVQVYVDDIYISHDDPREHLEQLEKVFSLLLNAGYVVSLKKSEIAQHEVEFLGFNITKEGRGLTETFKQKLLNITPPRDLKQLQSILGLLNFARNFIPNFSELVKPLYNIIATAPGKYITWTTDNSQQLQNIISMLNSAENLEERNPEVRLIMKVNTSPSAGYIRFYNEFAKRPIMYLNYVYTKAEVKFTNTEKLLTTIHKGLIKALDLGMGQEILVYSPIVSMTKIQKTPLPERKALPIRWITWMSYLEDPRIQFHYDKTLPELQQVPTVTDDIIAKIKHPSEFSMVFYTDGSAIKHPNVNKSHNAGMGIAQVQFKPEFTVINTWSIPLGDHTAQLAEVAAVEFACKKALKIDGPVLIVTDSFYVAESVNKELPYWQSNGFFNNKKKPLKHVSKWKSIADCIQLKPDIIIIHEKGHQPTASTFHTEGNNLADKLATQGSYVVNAGKRTADGSEFEKRTADGSEFESPKKKAKVE

SEQ ID NO: 646 - protein, 2176 aa, synthetic construct
MPAAKRVKLDGGDKKYSIGLDIGTNSVGWAVITDEYKVPSKKFKVLGNTDRHSIKKNLIGALLFDSGETAEATRLKRTARRRYTRRKNRICYLQEIFSNEMAKVDDSFFHRLEESFLVEEDKKHERHPIFGNIVDEVAYHEKYPTIYHLRKKLVDSTDKADLRLIYLALAHMIKFRGHFLIEGDLNPDNSDVDKLFIQLVQTYNQLFEENPINASGVDAKAILSARLSKSRRLENLIAQLPGEKKNGLFGNLIALSLGLTPNFKSNFDLAEDAKLQLSKDTYDDDLDNLLAQIGDQYADLFLAAKNLSDAILLSDILRVNTEITKAPLSASMIKRYDEHHQDLTLLKALVRQQLPEKYKEIFFDQSKNGYAGYIDGGASQEEFYKFIKPILEKMDGTEELLVKLNREDLLRKQRTFDNGSIPHQIHLGELHAILRRQEDFYPFLKDNREKIEKILTFRIPYYVGPLARGNSRFAWMTRKSEETITPWNFEEVVDKGASAQSFIERMTNFDKNLPNEKVLPKHSLLYEYFTVYNELTKVKYVTEGMRKPAFLSGEQKKAIVDLLFKTNRKVTVKQLKEDYFKKIECFDSVEISGVEDRFNASLGTYHDLLKIIKDKDFLDNEENEDILEDIVLTLTLFEDREMIEERLKTYAHLFDDKVMKQLKRRRYTGWGRLSRKLINGIRDKQSGKTILDFLKSDGFANRNFMQLIHDDSLTFKEDIQKAQVSGQGDSLHEHIANLAGSPAIKKGILQTVKVVDELVKVMGRHKPENIVIEMARENQTTQKGQKNSRERMKRIEEGIKELGSQILKEHPVENTQLQNEKLYLYYLQNGRDMYVDQELDINRLSDYDVDHIVPQSFLKDDSIDNKVLTRSDKARGKSDNVPSEEVVKKMKNYWRQLLNAKLITQRKFDNLTKAERGGLSELDKAGFIKRQLVETRQITKHVAQILDSRMNTKYDENDKLIREVKVITLKSKLVSDFRKDFQFYKVREINNYHHAHDAYLNAVVGTALIKKYPKLESEFVYGDYKVYDVRKMIAKSEQEIGKATAKYFFYSNIMNFFKTEITLANGEIRKRPLIETNGETGEIVWDKGRDFATVRKVLSMPQVNIVKKTEVQTGGFSKESILPKRNSDKLIARKKDWDPKKYGGFDSPTVAYSVLVVAKVEKGKSKKLKSVKELLGITIMERSSFEKNPIDFLEAKGYKEVKKDLIIKLPKYSLFELENGRKRMLASAGELQKGNELALPSKYVNFLYLASHYEKLKGSPEDNEQKQLFVEQHKHYLDEIIEQISEFSKRVILADANLDKVLSAYNKHRDKPIREQAENIIHLFTLTNLGAPAAFKYFDTTIDRKRYTSTKEVLDATLIHQSITGLYETRIDLSQLGGDGGEAAAKGGSGGGGGMDPLQLLQPLEAEIKGTKLKAHWNSGATITCVPQAFLEEEVPIKNIWIKTIHGEKEQPVYYLTFKIQGRKVEAEVISSPYDYILVSPSDIPWLMKKPLQLTTLVPLQEYEERLLKQTMLTGSYKEKLQSLFLKYDALWQHWENQVGHRRIKPHHIATGTVNPRPQKQYPINPKAKASIQTVINDLLKQGVLIQQNSIMNTPVYPVPKPDGKWRMVLDYREVNKTIPLIAAQNQHSAGILSSIFRGKYKTTLDLSNGFWAHSITPESYWLTAFTWLGQQYCWTRLPQGFLNSPALFNADVVDLLKEVPNVQVYVDDIYISHDDPREHLEQLEKVFSLLLNAGYVVSLKKSEIAQHEVEFLGFNITKEGRGLTETFKQKLLNITPPRDLKQLQSILGLLNFARNFIPNFSELVKPLYNIIATAPGKYITWTTDNSQQLQNIISMLNSAENLEERNPEVRLIMKVNTSPSAGYIRFYNEFAKRPIMYLNYVYTKAEVKFTNTEKLLTTIHKGLIKALDLGMGQEILVYSPIVSMTKIQKTPLPERKALPIRWITWMSYLEDPRIQFHYDKTLPELQQVPTVTDDIIAKIKHPSEFSMVFYTDGSAIKHPNVNKSHNAGMGIAQVQFKPEFTVINTWSIPLGDHTAQLAEVAAVEFACKKALKIDGPVLIVTDSFYVAESVNKELPYWQSNGFFNNKKKPLKHVSKWKSIADCIQLKPDIIIIHEKGHQPTASTFHTEGNNLADKLATQGSYVVNAGKRTADGSEFEKRTADGSEFESPKKKAKVE

SEQ ID NO: 647 - protein, 2211 aa, synthetic construct
MPAAKRVKLDGGDKKYSIGLDIGTNSVGWAVITDEYKVPSKKFKVLGNTDRHSIKKNLIGALLFDSGETAEATRLKRTARRRYTRRKNRICYLQEIFSNEMAKVDDSFFHRLEESFLVEEDKKHERHPIFGNIVDEVAYHEKYPTIYHLRKKLVDSTDKADLRLIYLALAHMIKFRGHFLIEGDLNPDNSDVDKLFIQLVQTYNQLFEENPINASGVDAKAILSARLSKSRRLENLIAQLPGEKKNGLFGNLIALSLGLTPNFKSNFDLAEDAKLQLSKDTYDDDLDNLLAQIGDQYADLFLAAKNLSDAILLSDILRVNTEITKAPLSASMIKRYDEHHQDLTLLKALVRQQLPEKYKEIFFDQSKNGYAGYIDGGASQEEFYKFIKPILEKMDGTEELLVKLNREDLLRKQRTFDNGSIPHQIHLGELHAILRRQEDFYPFLKDNREKIEKILTFRIPYYVGPLARGNSRFAWMTRKSEETITPWNFEEVVDKGASAQSFIERMTNFDKNLPNEKVLPKHSLLYEYFTVYNELTKVKYVTEGMRKPAFLSGEQKKAIVDLLFKTNRKVTVKQLKEDYFKKIECFDSVEISGVEDRFNASLGTYHDLLKIIKDKDFLDNEENEDILEDIVLTLTLFEDREMIEERLKTYAHLFDDKVMKQLKRRRYTGWGRLSRKLINGIRDKQSGKTILDFLKSDGFANRNFMQLIHDDSLTFKEDIQKAQVSGQGDSLHEHIANLAGSPAIKKGILQTVKVVDELVKVMGRHKPENIVIEMARENQTTQKGQKNSRERMKRIEEGIKELGSQILKEHPVENTQLQNEKLYLYYLQNGRDMYVDQELDINRLSDYDVDHIVPQSFLKDDSIDNKVLTRSDKARGKSDNVPSEEVVKKMKNYWRQLLNAKLITQRKFDNLTKAERGGLSELDKAGFIKRQLVETRQITKHVAQILDSRMNTKYDENDKLIREVKVITLKSKLVSDFRKDFQFYKVREINNYHHAHDAYLNAVVGTALIKKYPKLESEFVYGDYKVYDVRKMIAKSEQEIGKATAKYFFYSNIMNFFKTEITLANGEIRKRPLIETNGETGEIVWDKGRDFATVRKVLSMPQVNIVKKTEVQTGGFSKESILPKRNSDKLIARKKDWDPKKYGGFDSPTVAYSVLVVAKVEKGKSKKLKSVKELLGITIMERSSFEKNPIDFLEAKGYKEVKKDLIIKLPKYSLFELENGRKRMLASAGELQKGNELALPSKYVNFLYLASHYEKLKGSPEDNEQKQLFVEQHKHYLDEIIEQISEFSKRVILADANLDKVLSAYNKHRDKPIREQAENIIHLFTLTNLGAPAAFKYFDTTIDRKRYTSTKEVLDATLIHQSITGLYETRIDLSQLGGDGGAEAAAKEAAAKEAAAKEAAAKALEAEAAAKEAAAKEAAAKEAAAKAGGMDPLQLLQPLEAEIKGTKLKAHWNSGATITCVPQAFLEEEVPIKNIWIKTIHGEKEQPVYYLTFKIQGRKVEAEVISSPYDYILVSPSDIPWLMKKPLQLTTLVPLQEYEERLLKQTMLTGSYKEKLQSLFLKYDALWQHWENQVGHRRIKPHHIATGTVNPRPQKQYPINPKAKASIQTVINDLLKQGVLIQQNSIMNTPVYPVPKPDGKWRMVLDYREVNKTIPLIAAQNQHSAGILSSIFRGKYKTTLDLSNGFWAHSITPESYWLTAFTWLGQQYCWTRLPQGFLNSPALFNADVVDLLKEVPNVQVYVDDIYISHDDPREHLEQLEKVFSLLLNAGYVVSLKKSEIAQHEVEFLGFNITKEGRGLTETFKQKLLNITPPRDLKQLQSILGKLNFARNFIPNFSELVKPLYNIIATAPGKYITWTTDNSQQLQNIISMLNSAENLEERNPEVRLIMKVNTSPSAGYIRFYNEFAKRPIMYLNYVYTKAEVKFTNTEKLLTTIHKGLIKALDLGMGQEILVYSPIVSMTKIQKTPLPERKALPIRWITWMSYLEDPRIQFHYDKTLPELQQVPTVTDDIIAKIKHPSEFSMVFYTDGSAIKHPNVNKSHNAGMGIAQVQFKPEFTVINTWSIPLGDHTAQLAEVAAVEFACKKALKIDGPVLIVTDSFYVAESVNKELPYWQSNGFFNNKKKPLKHVSKWKSIADCIQLKPDIIIIHEKGHQPTASTFHTEGNNLADKLATQGSYVVNAGKRTADGSEFEKRTADGSEFESPKKKAKVE

SEQ ID NO: 648 - protein, 2195 aa, synthetic construct
MPAAKRVKLDGGDKKYSIGLDIGTNSVGWAVITDEYKVPSKKFKVLGNTDRHSIKKNLIGALLFDSGETAEATRLKRTARRRYTRRKNRICYLQEIFSNEMAKVDDSFFHRLEESFLVEEDKKHERHPIFGNIVDEVAYHEKYPTIYHLRKKLVDSTDKADLRLIYLALAHMIKFRGHFLIEGDLNPDNSDVDKLFIQLVQTYNQLFEENPINASGVDAKAILSARLSKSRRLENLIAQLPGEKKNGLFGNLIALSLGLTPNFKSNFDLAEDAKLQLSKDTYDDDLDNLLAQIGDQYADLFLAAKNLSDAILLSDILRVNTEITKAPLSASMIKRYDEHHQDLTLLKALVRQQLPEKYKEIFFDQSKNGYAGYIDGGASQEEFYKFIKPILEKMDGTEELLVKLNREDLLRKQRTFDNGSIPHQIHLGELHAILRRQEDFYPFLKDNREKIEKILTFRIPYYVGPLARGNSRFAWMTRKSEETITPWNFEEVVDKGASAQSFIERMTNFDKNLPNEKVLPKHSLLYEYFTVYNELTKVKYVTEGMRKPAFLSGEQKKAIVDLLFKTNRKVTVKQLKEDYFKKIECFDSVEISGVEDRFNASLGTYHDLLKIIKDKDFLDNEENEDILEDIVLTLTLFEDREMIEERLKTYAHLFDDKVMKQLKRRRYTGWGRLSRKLINGIRDKQSGKTILDFLKSDGFANRNFMQLIHDDSLTFKEDIQKAQVSGQGDSLHEHIANLAGSPAIKKGILQTVKVVDELVKVMGRHKPENIVIEMARENQTTQKGQKNSRERMKRIEEGIKELGSQILKEHPVENTQLQNEKLYLYYLQNGRDMYVDQELDINRLSDYDVDHIVPQSFLKDDSIDNKVLTRSDKARGKSDNVPSEEVVKKMKNYWRQLLNAKLITQRKFDNLTKAERGGLSELDKAGFIKRQLVETRQITKHVAQILDSRMNTKYDENDKLIREVKVITLKSKLVSDFRKDFQFYKVREINNYHHAHDAYLNAVVGTALIKKYPKLESEFVYGDYKVYDVRKMIAKSEQEIGKATAKYFFYSNIMNFFKTEITLANGEIRKRPLIETNGETGEIVWDKGRDFATVRKVLSMPQVNIVKKTEVQTGGFSKESILPKRNSDKLIARKKDWDPKKYGGFDSPTVAYSVLVVAKVEKGKSKKLKSVKELLGITIMERSSFEKNPIDFLEAKGYKEVKKDLIIKLPKYSLFELENGRKRMLASAGELQKGNELALPSKYVNFLYLASHYEKLKGSPEDNEQKQLFVEQHKHYLDEIIEQISEFSKRVILADANLDKVLSAYNKHRDKPIREQAENIIHLFTLTNLGAPAAFKYFDTTIDRKRYTSTKEVLDATLIHQSITGLYETRIDLSQLGGDGGGGGGSGGGGSGGGGSGGGGSGGGGSGGGGSGGMDPLQLLQPLEAEIKGTKLKAHWNSGATITCVPQAFLEEEVPIKNIWIKTIHGEKEQPVYYLTFKIQGRKVEAEVISSPYDYILVSPSDIPWLMKKPLQLTTLVPLQEYEERLLKQTMLTGSYKEKLQSLFLKYDALWQHWENQVGHRRIKPHHIATGTVNPRPQKQYPINPKAKASIQTVINDLLKQGVLIQQNSIMNTPVYPVPKPDGKWRMVLDYREVNKTIPLIAAQNQHSAGILSSIFRGKYKTTLDLSNGFWAHSITPESYWLTAFTWLGQQYCWTRLPQGFLNSPALFNADVVDLLKEVPNVQVYVDDIYISHDDPREHLEQLEKVFSLLLNAGYVVSLKKSEIAQHEVEFLGFNITKEGRGLTETFKQKLLNITPPRDLKQLQSILGKLNFARNFIPNFSELVKPLYNIIATAPGKYITWTTDNSQQLQNIISMLNSAENLEERNPEVRLIMKVNTSPSAGYIRFYNEFAKRPIMYLNYVYTKAEVKFTNTEKLLTTIHKGLIKALDLGMGQEILVYSPIVSMTKIQKTPLPERKALPIRWITWMSYLEDPRIQFHYDKTLPELQQVPTVTDDIIAKIKHPSEFSMVFYTDGSAIKHPNVNKSHNAGMGIAQVQFKPEFTVINTWSIPLGDHTAQLAEVAAVEFACKKALKIDGPVLIVTDSFYVAESVNKELPYWQSNGFFNNKKKPLKHVSKWKSIADCIQLKPDIIIIHEKGHQPTASTFHTEGNNLADKLATQGSYVVNAGKRTADGSEFEKRTADGSEFESPKKKAKVE

SEQ ID NO: 649 - protein, 2190 aa, synthetic construct
MPAAKRVKLDGGDKKYSIGLDIGTNSVGWAVITDEYKVPSKKFKVLGNTDRHSIKKNLIGALLFDSGETAEATRLKRTARRRYTRRKNRICYLQEIFSNEMAKVDDSFFHRLEESFLVEEDKKHERHPIFGNIVDEVAYHEKYPTIYHLRKKLVDSTDKADLRLIYLALAHMIKFRGHFLIEGDLNPDNSDVDKLFIQLVQTYNQLFEENPINASGVDAKAILSARLSKSRRLENLIAQLPGEKKNGLFGNLIALSLGLTPNFKSNFDLAEDAKLQLSKDTYDDDLDNLLAQIGDQYADLFLAAKNLSDAILLSDILRVNTEITKAPLSASMIKRYDEHHQDLTLLKALVRQQLPEKYKEIFFDQSKNGYAGYIDGGASQEEFYKFIKPILEKMDGTEELLVKLNREDLLRKQRTFDNGSIPHQIHLGELHAILRRQEDFYPFLKDNREKIEKILTFRIPYYVGPLARGNSRFAWMTRKSEETITPWNFEEVVDKGASAQSFIERMTNFDKNLPNEKVLPKHSLLYEYFTVYNELTKVKYVTEGMRKPAFLSGEQKKAIVDLLFKTNRKVTVKQLKEDYFKKIECFDSVEISGVEDRFNASLGTYHDLLKIIKDKDFLDNEENEDILEDIVLTLTLFEDREMIEERLKTYAHLFDDKVMKQLKRRRYTGWGRLSRKLINGIRDKQSGKTILDFLKSDGFANRNFMQLIHDDSLTFKEDIQKAQVSGQGDSLHEHIANLAGSPAIKKGILQTVKVVDELVKVMGRHKPENIVIEMARENQTTQKGQKNSRERMKRIEEGIKELGSQILKEHPVENTQLQNEKLYLYYLQNGRDMYVDQELDINRLSDYDVDHIVPQSFLKDDSIDNKVLTRSDKARGKSDNVPSEEVVKKMKNYWRQLLNAKLITQRKFDNLTKAERGGLSELDKAGFIKRQLVETRQITKHVAQILDSRMNTKYDENDKLIREVKVITLKSKLVSDFRKDFQFYKVREINNYHHAHDAYLNAVVGTALIKKYPKLESEFVYGDYKVYDVRKMIAKSEQEIGKATAKYFFYSNIMNFFKTEITLANGEIRKRPLIETNGETGEIVWDKGRDFATVRKVLSMPQVNIVKKTEVQTGGFSKESILPKRNSDKLIARKKDWDPKKYGGFDSPTVAYSVLVVAKVEKGKSKKLKSVKELLGITIMERSSFEKNPIDFLEAKGYKEVKKDLIIKLPKYSLFELENGRKRMLASAGELQKGNELALPSKYVNFLYLASHYEKLKGSPEDNEQKQLFVEQHKHYLDEIIEQISEFSKRVILADANLDKVLSAYNKHRDKPIREQAENIIHLFTLTNLGAPAAFKYFDTTIDRKRYTSTKEVLDATLIHQSITGLYETRIDLSQLGGDGGEAAAKEAAAKEAAAKEAAAKEAAAKGGMDPLQLLQPLEAEIKGTKLKAHWNSGATITCVPQAFLEEEVPIKNIWIKTIHGEKEQPVYYLTFKIQGRKVEAEVISSPYDYILVSPSDIPWLMKKPLQLTTLVPLQEYEERLLKQTMLTGSYKEKLQSLFLKYDALWQHWENQVGHRRIKPHHIATGTVNPRPQKQYPINPKAKASIQTVINDLLKQGVLIQQNSIMNTPVYPVPKPDGKWRMVLDYREVNKTIPLIAAQNQHSAGILSSIFRGKYKTTLDLSNGFWAHSITPESYWLTAFTWLGQQYCWTRLPQGFLNSPALFNADVVDLLKEVPNVQVYVDDIYISHDDPREHLEQLEKVFSLLLNAGYVVSLKKSEIAQHEVEFLGFNITKEGRGLTETFKQKLLNITPPRDLKQLQSILGKLNFARNFIPNFSELVKPLYNIIATAPGKYITWTTDNSQQLQNIISMLNSAENLEERNPEVRLIMKVNTSPSAGYIRFYNEFAKRPIMYLNYVYTKAEVKFTNTEKLLTTIHKGLIKALDLGMGQEILVYSPIVSMTKIQKTPLPERKALPIRWITWMSYLEDPRIQFHYDKTLPELQQVPTVTDDIIAKIKHPSEFSMVFYTDGSAIKHPNVNKSHNAGMGIAQVQFKPEFTVINTWSIPLGDHTAQLAEVAAVEFACKKALKIDGPVLIVTDSFYVAESVNKELPYWQSNGFFNNKKKPLKHVSKWKSIADCIQLKPDIIIIHEKGHQPTASTFHTEGNNLADKLATQGSYVVNAGKRTADGSEFEKRTADGSEFESPKKKAKVE

SEQ ID NO: 650 - protein, 2176 aa, synthetic construct
MPAAKRVKLDGGDKKYSIGLDIGTNSVGWAVITDEYKVPSKKFKVLGNTDRHSIKKNLIGALLFDSGETAEATRLKRTARRRYTRRKNRICYLQEIFSNEMAKVDDSFFHRLEESFLVEEDKKHERHPIFGNIVDEVAYHEKYPTIYHLRKKLVDSTDKADLRLIYLALAHMIKFRGHFLIEGDLNPDNSDVDKLFIQLVQTYNQLFEENPINASGVDAKAILSARLSKSRRLENLIAQLPGEKKNGLFGNLIALSLGLTPNFKSNFDLAEDAKLQLSKDTYDDDLDNLLAQIGDQYADLFLAAKNLSDAILLSDILRVNTEITKAPLSASMIKRYDEHHQDLTLLKALVRQQLPEKYKEIFFDQSKNGYAGYIDGGASQEEFYKFIKPILEKMDGTEELLVKLNREDLLRKQRTFDNGSIPHQIHLGELHAILRRQEDFYPFLKDNREKIEKILTFRIPYYVGPLARGNSRFAWMTRKSEETITPWNFEEVVDKGASAQSFIERMTNFDKNLPNEKVLPKHSLLYEYFTVYNELTKVKYVTEGMRKPAFLSGEQKKAIVDLLFKTNRKVTVKQLKEDYFKKIECFDSVEISGVEDRFNASLGTYHDLLKIIKDKDFLDNEENEDILEDIVLTLTLFEDREMIEERLKTYAHLFDDKVMKQLKRRRYTGWGRLSRKLINGIRDKQSGKTILDFLKSDGFANRNFMQLIHDDSLTFKEDIQKAQVSGQGDSLHEHIANLAGSPAIKKGILQTVKVVDELVKVMGRHKPENIVIEMARENQTTQKGQKNSRERMKRIEEGIKELGSQILKEHPVENTQLQNEKLYLYYLQNGRDMYVDQELDINRLSDYDVDHIVPQSFLKDDSIDNKVLTRSDKARGKSDNVPSEEVVKKMKNYWRQLLNAKLITQRKFDNLTKAERGGLSELDKAGFIKRQLVETRQITKHVAQILDSRMNTKYDENDKLIREVKVITLKSKLVSDFRKDFQFYKVREINNYHHAHDAYLNAVVGTALIKKYPKLESEFVYGDYKVYDVRKMIAKSEQEIGKATAKYFFYSNIMNFFKTEITLANGEIRKRPLIETNGETGEIVWDKGRDFATVRKVLSMPQVNIVKKTEVQTGGFSKESILPKRNSDKLIARKKDWDPKKYGGFDSPTVAYSVLVVAKVEKGKSKKLKSVKELLGITIMERSSFEKNPIDFLEAKGYKEVKKDLIIKLPKYSLFELENGRKRMLASAGELQKGNELALPSKYVNFLYLASHYEKLKGSPEDNEQKQLFVEQHKHYLDEIIEQISEFSKRVILADANLDKVLSAYNKHRDKPIREQAENIIHLFTLTNLGAPAAFKYFDTTIDRKRYTSTKEVLDATLIHQSITGLYETRIDLSQLGGDGGPAPGSSEAAAKGGMDPLQLLQPLEAEIKGTKLKAHWNSGATITCVPQAFLEEEVPIKNIWIKTIHGEKEQPVYYLTFKIQGRKVEAEVISSPYDYILVSPSDIPWLMKKPLQLTTLVPLQEYEERLLKQTMLTGSYKEKLQSLFLKYDALWQHWENQVGHRRIKPHHIATGTVNPRPQKQYPINPKAKASIQTVINDLLKQGVLIQQNSIMNTPVYPVPKPDGKWRMVLDYREVNKTIPLIAAQNQHSAGILSSIFRGKYKTTLDLSNGFWAHSITPESYWLTAFTWLGQQYCWTRLPQGFLNSPALFNADVVDLLKEVPNVQVYVDDIYISHDDPREHLEQLEKVFSLLLNAGYVVSLKKSEIAQHEVEFLGFNITKEGRGLTETFKQKLLNITPPRDLKQLQSILGKLNFARNFIPNFSELVKPLYNIIATAPGKYITWTTDNSQQLQNIISMLNSAENLEERNPEVRLIMKVNTSPSAGYIRFYNEFAKRPIMYLNYVYTKAEVKFTNTEKLLTTIHKGLIKALDLGMGQEILVYSPIVSMTKIQKTPLPERKALPIRWITWMSYLEDPRIQFHYDKTLPELQQVPTVTDDIIAKIKHPSEFSMVFYTDGSAIKHPNVNKSHNAGMGIAQVQFKPEFTVINTWSIPLGDHTAQLAEVAAVEFACKKALKIDGPVLIVTDSFYVAESVNKELPYWQSNGFFNNKKKPLKHVSKWKSIADCIQLKPDIIIIHEKGHQPTASTFHTEGNNLADKLATQGSYVVNAGKRTADGSEFEKRTADGSEFESPKKKAKVE

SEQ ID NO: 651 - protein, 2195 aa, synthetic construct
MPAAKRVKLDGGDKKYSIGLDIGTNSVGWAVITDEYKVPSKKFKVLGNTDRHSIKKNLIGALLFDSGETAEATRLKRTARRRYTRRKNRICYLQEIFSNEMAKVDDSFFHRLEESFLVEEDKKHERHPIFGNIVDEVAYHEKYPTIYHLRKKLVDSTDKADLRLIYLALAHMIKFRGHFLIEGDLNPDNSDVDKLFIQLVQTYNQLFEENPINASGVDAKAILSARLSKSRRLENLIAQLPGEKKNGLFGNLIALSLGLTPNFKSNFDLAEDAKLQLSKDTYDDDLDNLLAQIGDQYADLFLAAKNLSDAILLSDILRVNTEITKAPLSASMIKRYDEHHQDLTLLKALVRQQLPEKYKEIFFDQSKNGYAGYIDGGASQEEFYKFIKPILEKMDGTEELLVKLNREDLLRKQRTFDNGSIPHQIHLGELHAILRRQEDFYPFLKDNREKIEKILTFRIPYYVGPLARGNSRFAWMTRKSEETITPWNFEEVVDKGASAQSFIERMTNFDKNLPNEKVLPKHSLLYEYFTVYNELTKVKYVTEGMRKPAFLSGEQKKAIVDLLFKTNRKVTVKQLKEDYFKKIECFDSVEISGVEDRFNASLGTYHDLLKIIKDKDFLDNEENEDILEDIVLTLTLFEDREMIEERLKTYAHLFDDKVMKQLKRRRYTGWGRLSRKLINGIRDKQSGKTILDFLKSDGFANRNFMQLIHDDSLTFKEDIQKAQVSGQGDSLHEHIANLAGSPAIKKGILQTVKVVDELVKVMGRHKPENIVIEMARENQTTQKGQKNSRERMKRIEEGIKELGSQILKEHPVENTQLQNEKLYLYYLQNGRDMYVDQELDINRLSDYDVDHIVPQSFLKDDSIDNKVLTRSDKARGKSDNVPSEEVVKKMKNYWRQLLNAKLITQRKFDNLTKAERGGLSELDKAGFIKRQLVETRQITKHVAQILDSRMNTKYDENDKLIREVKVITLKSKLVSDFRKDFQFYKVREINNYHHAHDAYLNAVVGTALIKKYPKLESEFVYGDYKVYDVRKMIAKSEQEIGKATAKYFFYSNIMNFFKTEITLANGEIRKRPLIETNGETGEIVWDKGRDFATVRKVLSMPQVNIVKKTEVQTGGFSKESILPKRNSDKLIARKKDWDPKKYGGFDSPTVAYSVLVVAKVEKGKSKKLKSVKELLGITIMERSSFEKNPIDFLEAKGYKEVKKDLIIKLPKYSLFELENGRKRMLASAGELQKGNELALPSKYVNFLYLASHYEKLKGSPEDNEQKQLFVEQHKHYLDEIIEQISEFSKRVILADANLDKVLSAYNKHRDKPIREQAENIIHLFTLTNLGAPAAFKYFDTTIDRKRYTSTKEVLDATLIHQSITGLYETRIDLSQLGGDGGEAAAKEAAAKEAAAKEAAAKEAAAKEAAAKGGMDPLQLLQPLEAEIKGTKLKAHWNSGATITCVPQAFLEEEVPIKNIWIKTIHGEKEQPVYYLTFKIQGRKVEAEVISSPYDYILVSPSDIPWLMKKPLQLTTLVPLQEYEERLLKQTMLTGSYKEKLQSLFLKYDALWQHWENQVGHRRIKPHHIATGTVNPRPQKQYPINPKAKASIQTVINDLLKQGVLIQQNSIMNTPVYPVPKPDGKWRMVLDYREVNKTIPLIAAQNQHSAGILSSIFRGKYKTTLDLSNGFWAHSITPESYWLTAFTWLGQQYCWTRLPQGFLNSPALFNADVVDLLKEVPNVQVYVDDIYISHDDPREHLEQLEKVFSLLLNAGYVVSLKKSEIAQHEVEFLGFNITKEGRGLTETFKQKLLNITPPRDLKQLQSILGKLNFARNFIPNFSELVKPLYNIIATAPGKYITWTTDNSQQLQNIISMLNSAENLEERNPEVRLIMKVNTSPSAGYIRFYNEFAKRPIMYLNYVYTKAEVKFTNTEKLLTTIHKGLIKALDLGMGQEILVYSPIVSMTKIQKTPLPERKALPIRWITWMSYLEDPRIQFHYDKTLPELQQVPTVTDDIIAKIKHPSEFSMVFYTDGSAIKHPNVNKSHNAGMGIAQVQFKPEFTVINTWSIPLGDHTAQLAEVAAVEFACKKALKIDGPVLIVTDSFYVAESVNKELPYWQSNGFFNNKKKPLKHVSKWKSIADCIQLKPDIIIIHEKGHQPTASTFHTEGNNLADKLATQGSYVVNAGKRTADGSEFEKRTADGSEFESPKKKAKVE

SEQ ID NO: 652 - protein, 2198 aa, synthetic construct
MPAAKRVKLDGGDKKYSIGLDIGTNSVGWAVITDEYKVPSKKFKVLGNTDRHSIKKNLIGALLFDSGETAEATRLKRTARRRYTRRKNRICYLQEIFSNEMAKVDDSFFHRLEESFLVEEDKKHERHPIFGNIVDEVAYHEKYPTIYHLRKKLVDSTDKADLRLIYLALAHMIKFRGHFLIEGDLNPDNSDVDKLFIQLVQTYNQLFEENPINASGVDAKAILSARLSKSRRLENLIAQLPGEKKNGLFGNLIALSLGLTPNFKSNFDLAEDAKLQLSKDTYDDDLDNLLAQIGDQYADLFLAAKNLSDAILLSDILRVNTEITKAPLSASMIKRYDEHHQDLTLLKALVRQQLPEKYKEIFFDQSKNGYAGYIDGGASQEEFYKFIKPILEKMDGTEELLVKLNREDLLRKQRTFDNGSIPHQIHLGELHAILRRQEDFYPFLKDNREKIEKILTFRIPYYVGPLARGNSRFAWMTRKSEETITPWNFEEVVDKGASAQSFIERMTNFDKNLPNEKVLPKHSLLYEYFTVYNELTKVKYVTEGMRKPAFLSGEQKKAIVDLLFKTNRKVTVKQLKEDYFKKIECFDSVEISGVEDRFNASLGTYHDLLKIIKDKDFLDNEENEDILEDIVLTLTLFEDREMIEERLKTYAHLFDDKVMKQLKRRRYTGWGRLSRKLINGIRDKQSGKTILDFLKSDGFANRNFMQLIHDDSLTFKEDIQKAQVSGQGDSLHEHIANLAGSPAIKKGILQTVKVVDELVKVMGRHKPENIVIEMARENQTTQKGQKNSRERMKRIEEGIKELGSQILKEHPVENTQLQNEKLYLYYLQNGRDMYVDQELDINRLSDYDVDHIVPQSFLKDDSIDNKVLTRSDKARGKSDNVPSEEVVKKMKNYWRQLLNAKLITQRKFDNLTKAERGGLSELDKAGFIKRQLVETRQITKHVAQILDSRMNTKYDENDKLIREVKVITLKSKLVSDFRKDFQFYKVREINNYHHAHDAYLNAVVGTALIKKYPKLESEFVYGDYKVYDVRKMIAKSEQEIGKATAKYFFYSNIMNFFKTEITLANGEIRKRPLIETNGETGEIVWDKGRDFATVRKVLSMPQVNIVKKTEVQTGGFSKESILPKRNSDKLIARKKDWDPKKYGGFDSPTVAYSVLVVAKVEKGKSKKLKSVKELLGITIMERSSFEKNPIDFLEAKGYKEVKKDLIIKLPKYSLFELENGRKRMLASAGELQKGNELALPSKYVNFLYLASHYEKLKGSPEDNEQKQLFVEQHKHYLDEIIEQISEFSKRVILADANLDKVLSAYNKHRDKPIREQAENIIHLFTLTNLGAPAAFKYFDTTIDRKRYTSTKEVLDATLIHQSITGLYETRIDLSQLGGDGGSGGSSGGSSGSETPGTSESATPESSGGSSGGSSGGMDPLQLLQPLEAEIKGTKLKAHWNSGATITCVPQAFLEEEVPIKNIWIKTIHGEKEQPVYYLTFKIQGRKVEAEVISSPYDYILVSPSDIPWLMKKPLQLTTLVPLQEYEERLLKQTMLTGSYKEKLQSLFLKYDALWQHWENQVGHRRIKPHHIATGTVNPRPQKQYPINPKAKASIQTVINDLLKQGVLIQQNSIMNTPVYPVPKPDGKWRMVLDYREVNKTIPLIAAQNQHSAGILSSIFRGKYKTTLDLSNGFWAHSITPESYWLTAFTWLGQQYCWTRLPQGFLNSPALFNADVVDLLKEVPNVQVYVDDIYISHDDPREHLEQLEKVFSLLLNAGYVVSLKKSEIAQHEVEFLGFNITKEGRGLTETFKQKLLNITPPRDLKQLQSILGKLNFARNFIPNFSELVKPLYNIIATAPGKYITWTTDNSQQLQNIISMLNSAENLEERNPEVRLIMKVNTSPSAGYIRFYNEFAKRPIMYLNYVYTKAEVKFTNTEKLLTTIHKGLIKALDLGMGQEILVYSPIVSMTKIQKTPLPERKALPIRWITWMSYLEDPRIQFHYDKTLPELQQVPTVTDDIIAKIKHPSEFSMVFYTDGSAIKHPNVNKSHNAGMGIAQVQFKPEFTVINTWSIPLGDHTAQLAEVAAVEFACKKALKIDGPVLIVTDSFYVAESVNKELPYWQSNGFFNNKKKPLKHVSKWKSIADCIQLKPDIIIIHEKGHQPTASTFHTEGNNLADKLATQGSYVVNAGKRTADGSEFEKRTADGSEFESPKKKAKVE

SEQ ID NO: 653 - protein, 2176 aa, synthetic construct
MPAAKRVKLDGGDKKYSIGLDIGTNSVGWAVITDEYKVPSKKFKVLGNTDRHSIKKNLIGALLFDSGETAEATRLKRTARRRYTRRKNRICYLQEIFSNEMAKVDDSFFHRLEESFLVEEDKKHERHPIFGNIVDEVAYHEKYPTIYHLRKKLVDSTDKADLRLIYLALAHMIKFRGHFLIEGDLNPDNSDVDKLFIQLVQTYNQLFEENPINASGVDAKAILSARLSKSRRLENLIAQLPGEKKNGLFGNLIALSLGLTPNFKSNFDLAEDAKLQLSKDTYDDDLDNLLAQIGDQYADLFLAAKNLSDAILLSDILRVNTEITKAPLSASMIKRYDEHHQDLTLLKALVRQQLPEKYKEIFFDQSKNGYAGYIDGGASQEEFYKFIKPILEKMDGTEELLVKLNREDLLRKQRTFDNGSIPHQIHLGELHAILRRQEDFYPFLKDNREKIEKILTFRIPYYVGPLARGNSRFAWMTRKSEETITPWNFEEVVDKGASAQSFIERMTNFDKNLPNEKVLPKHSLLYEYFTVYNELTKVKYVTEGMRKPAFLSGEQKKAIVDLLFKTNRKVTVKQLKEDYFKKIECFDSVEISGVEDRFNASLGTYHDLLKIIKDKDFLDNEENEDILEDIVLTLTLFEDREMIEERLKTYAHLFDDKVMKQLKRRRYTGWGRLSRKLINGIRDKQSGKTILDFLKSDGFANRNFMQLIHDDSLTFKEDIQKAQVSGQGDSLHEHIANLAGSPAIKKGILQTVKVVDELVKVMGRHKPENIVIEMARENQTTQKGQKNSRERMKRIEEGIKELGSQILKEHPVENTQLQNEKLYLYYLQNGRDMYVDQELDINRLSDYDVDHIVPQSFLKDDSIDNKVLTRSDKARGKSDNVPSEEVVKKMKNYWRQLLNAKLITQRKFDNLTKAERGGLSELDKAGFIKRQLVETRQITKHVAQILDSRMNTKYDENDKLIREVKVITLKSKLVSDFRKDFQFYKVREINNYHHAHDAYLNAVVGTALIKKYPKLESEFVYGDYKVYDVRKMIAKSEQEIGKATAKYFFYSNIMNFFKTEITLANGEIRKRPLIETNGETGEIVWDKGRDFATVRKVLSMPQVNIVKKTEVQTGGFSKESILPKRNSDKLIARKKDWDPKKYGGFDSPTVAYSVLVVAKVEKGKSKKLKSVKELLGITIMERSSFEKNPIDFLEAKGYKEVKKDLIIKLPKYSLFELENGRKRMLASAGELQKGNELALPSKYVNFLYLASHYEKLKGSPEDNEQKQLFVEQHKHYLDEIIEQISEFSKRVILADANLDKVLSAYNKHRDKPIREQAENIIHLFTLTNLGAPAAFKYFDTTIDRKRYTSTKEVLDATLIHQSITGLYETRIDLSQLGGDGGGGGGGSEAAAKGGMDPLQLLQPLEAEIKGTKLKAHWNSGATITCVPQAFLEEEVPIKNIWIKTIHGEKEQPVYYLTFKIQGRKVEAEVISSPYDYILVSPSDIPWLMKKPLQLTTLVPLQEYEERLLKQTMLTGSYKEKLQSLFLKYDALWQHWENQVGHRRIKPHHIATGTVNPRPQKQYPINPKAKASIQTVINDLLKQGVLIQQNSIMNTPVYPVPKPDGKWRMVLDYREVNKTIPLIAAQNQHSAGILSSIFRGKYKTTLDLSNGFWAHSITPESYWLTAFTWLGQQYCWTRLPQGFLNSPALFNADVVDLLKEVPNVQVYVDDIYISHDDPREHLEQLEKVFSLLLNAGYVVSLKKSEIAQHEVEFLGFNITKEGRGLTETFKQKLLNITPPRDLKQLQSILGKLNFARNFIPNFSELVKPLYNIIATAPGKYITWTTDNSQQLQNIISMLNSAENLEERNPEVRLIMKVNTSPSAGYIRFYNEFAKRPIMYLNYVYTKAEVKFTNTEKLLTTIHKGLIKALDLGMGQEILVYSPIVSMTKIQKTPLPERKALPIRWITWMSYLEDPRIQFHYDKTLPELQQVPTVTDDIIAKIKHPSEFSMVFYTDGSAIKHPNVNKSHNAGMGIAQVQFKPEFTVINTWSIPLGDHTAQLAEVAAVEFACKKALKIDGPVLIVTDSFYVAESVNKELPYWQSNGFFNNKKKPLKHVSKWKSIADCIQLKPDIIIIHEKGHQPTASTFHTEGNNLADKLATQGSYVVNAGKRTADGSEFEKRTADGSEFESPKKKAKVE

SEQ ID NO: 654 - protein, 2178 aa, synthetic construct
MPAAKRVKLDGGDKKYSIGLDIGTNSVGWAVITDEYKVPSKKFKVLGNTDRHSIKKNLIGALLFDSGETAEATRLKRTARRRYTRRKNRICYLQEIFSNEMAKVDDSFFHRLEESFLVEEDKKHERHPIFGNIVDEVAYHEKYPTIYHLRKKLVDSTDKADLRLIYLALAHMIKFRGHFLIEGDLNPDNSDVDKLFIQLVQTYNQLFEENPINASGVDAKAILSARLSKSRRLENLIAQLPGEKKNGLFGNLIALSLGLTPNFKSNFDLAEDAKLQLSKDTYDDDLDNLLAQIGDQYADLFLAAKNLSDAILLSDILRVNTEITKAPLSASMIKRYDEHHQDLTLLKALVRQQLPEKYKEIFFDQSKNGYAGYIDGGASQEEFYKFIKPILEKMDGTEELLVKLNREDLLRKQRTFDNGSIPHQIHLGELHAILRRQEDFYPFLKDNREKIEKILTFRIPYYVGPLARGNSRFAWMTRKSEETITPWNFEEVVDKGASAQSFIERMTNFDKNLPNEKVLPKHSLLYEYFTVYNELTKVKYVTEGMRKPAFLSGEQKKAIVDLLFKTNRKVTVKQLKEDYFKKIECFDSVEISGVEDRFNASLGTYHDLLKIIKDKDFLDNEENEDILEDIVLTLTLFEDREMIEERLKTYAHLFDDKVMKQLKRRRYTGWGRLSRKLINGIRDKQSGKTILDFLKSDGFANRNFMQLIHDDSLTFKEDIQKAQVSGQGDSLHEHIANLAGSPAIKKGILQTVKVVDELVKVMGRHKPENIVIEMARENQTTQKGQKNSRERMKRIEEGIKELGSQILKEHPVENTQLQNEKLYLYYLQNGRDMYVDQELDINRLSDYDVDHIVPQSFLKDDSIDNKVLTRSDKARGKSDNVPSEEVVKKMKNYWRQLLNAKLITQRKFDNLTKAERGGLSELDKAGFIKRQLVETRQITKHVAQILDSRMNTKYDENDKLIREVKVITLKSKLVSDFRKDFQFYKVREINNYHHAHDAYLNAVVGTALIKKYPKLESEFVYGDYKVYDVRKMIAKSEQEIGKATAKYFFYSNIMNFFKTEITLANGEIRKRPLIETNGETGEIVWDKGRDFATVRKVLSMPQVNIVKKTEVQTGGFSKESILPKRNSDKLIARKKDWDPKKYGGFDSPTVAYSVLVVAKVEKGKSKKLKSVKELLGITIMERSSFEKNPIDFLEAKGYKEVKKDLIIKLPKYSLFELENGRKRMLASAGELQKGNELALPSKYVNFLYLASHYEKLKGSPEDNEQKQLFVEQHKHYLDEIIEQISEFSKRVILADANLDKVLSAYNKHRDKPIREQAENIIHLFTLTNLGAPAAFKYFDTTIDRKRYTSTKEVLDATLIHQSITGLYETRIDLSQLGGDGGPAPAPAPAPAPAPGGMDPLQLLQPLEAEIKGTKLKAHWNSGATITCVPQAFLEEEVPIKNIWIKTIHGEKEQPVYYLTFKIQGRKVEAEVISSPYDYILVSPSDIPWLMKKPLQLTTLVPLQEYEERLLKQTMLTGSYKEKLQSLFLKYDALWQHWENQVGHRRIKPHHIATGTVNPRPQKQYPINPKAKASIQTVINDLLKQGVLIQQNSIMNTPVYPVPKPDGKWRMVLDYREVNKTIPLIAAQNQHSAGILSSIFRGKYKTTLDLSNGFWAHSITPESYWLTAFTWLGQQYCWTRLPQGFLNSPALFNADVVDLLKEVPNVQVYVDDIYISHDDPREHLEQLEKVFSLLLNAGYVVSLKKSEIAQHEVEFLGFNITKEGRGLTETFKQKLLNITPPRDLKQLQSILGKLNFARNFIPNFSELVKPLYNIIATAPGKYITWTTDNSQQLQNIISMLNSAENLEERNPEVRLIMKVNTSPSAGYIRFYNEFAKRPIMYLNYVYTKAEVKFTNTEKLLTTIHKGLIKALDLGMGQEILVYSPIVSMTKIQKTPLPERKALPIRWITWMSYLEDPRIQFHYDKTLPELQQVPTVTDDIIAKIKHPSEFSMVFYTDGSAIKHPNVNKSHNAGMGIAQVQFKPEFTVINTWSIPLGDHTAQLAEVAAVEFACKKALKIDGPVLIVTDSFYVAESVNKELPYWQSNGFFNNKKKPLKHVSKWKSIADCIQLKPDIIIIHEKGHQPTASTFHTEGNNLADKLATQGSYVVNAGKRTADGSEFEKRTADGSEFESPKKKAKVE

SEQ ID NO: 655 - protein, 2176 aa, synthetic construct
MPAAKRVKLDGGDKKYSIGLDIGTNSVGWAVITDEYKVPSKKFKVLGNTDRHSIKKNLIGALLFDSGETAEATRLKRTARRRYTRRKNRICYLQEIFSNEMAKVDDSFFHRLEESFLVEEDKKHERHPIFGNIVDEVAYHEKYPTIYHLRKKLVDSTDKADLRLIYLALAHMIKFRGHFLIEGDLNPDNSDVDKLFIQLVQTYNQLFEENPINASGVDAKAILSARLSKSRRLENLIAQLPGEKKNGLFGNLIALSLGLTPNFKSNFDLAEDAKLQLSKDTYDDDLDNLLAQIGDQYADLFLAAKNLSDAILLSDILRVNTEITKAPLSASMIKRYDEHHQDLTLLKALVRQQLPEKYKEIFFDQSKNGYAGYIDGGASQEEFYKFIKPILEKMDGTEELLVKLNREDLLRKQRTFDNGSIPHQIHLGELHAILRRQEDFYPFLKDNREKIEKILTFRIPYYVGPLARGNSRFAWMTRKSEETITPWNFEEVVDKGASAQSFIERMTNFDKNLPNEKVLPKHSLLYEYFTVYNELTKVKYVTEGMRKPAFLSGEQKKAIVDLLFKTNRKVTVKQLKEDYFKKIECFDSVEISGVEDRFNASLGTYHDLLKIIKDKDFLDNEENEDILEDIVLTLTLFEDREMIEERLKTYAHLFDDKVMKQLKRRRYTGWGRLSRKLINGIRDKQSGKTILDFLKSDGFANRNFMQLIHDDSLTFKEDIQKAQVSGQGDSLHEHIANLAGSPAIKKGILQTVKVVDELVKVMGRHKPENIVIEMARENQTTQKGQKNSRERMKRIEEGIKELGSQILKEHPVENTQLQNEKLYLYYLQNGRDMYVDQELDINRLSDYDVDHIVPQSFLKDDSIDNKVLTRSDKARGKSDNVPSEEVVKKMKNYWRQLLNAKLITQRKFDNLTKAERGGLSELDKAGFIKRQLVETRQITKHVAQILDSRMNTKYDENDKLIREVKVITLKSKLVSDFRKDFQFYKVREINNYHHAHDAYLNAVVGTALIKKYPKLESEFVYGDYKVYDVRKMIAKSEQEIGKATAKYFFYSNIMNFFKTEITLANGEIRKRPLIETNGETGEIVWDKGRDFATVRKVLSMPQVNIVKKTEVQTGGFSKESILPKRNSDKLIARKKDWDPKKYGGFDSPTVAYSVLVVAKVEKGKSKKLKSVKELLGITIMERSSFEKNPIDFLEAKGYKEVKKDLIIKLPKYSLFELENGRKRMLASAGELQKGNELALPSKYVNFLYLASHYEKLKGSPEDNEQKQLFVEQHKHYLDEIIEQISEFSKRVILADANLDKVLSAYNKHRDKPIREQAENIIHLFTLTNLGAPAAFKYFDTTIDRKRYTSTKEVLDATLIHQSITGLYETRIDLSQLGGDGGGGGGSSEAAAKGGMDPLQLLQPLEAEIKGTKLKAHWNSGATITCVPQAFLEEEVPIKNIWIKTIHGEKEQPVYYLTFKIQGRKVEAEVISSPYDYILVSPSDIPWLMKKPLQLTTLVPLQEYEERLLKQTMLTGSYKEKLQSLFLKYDALWQHWENQVGHRRIKPHHIATGTVNPRPQKQYPINPKAKASIQTVINDLLKQGVLIQQNSIMNTPVYPVPKPDGKWRMVLDYREVNKTIPLIAAQNQHSAGILSSIFRGKYKTTLDLSNGFWAHSITPESYWLTAFTWLGQQYCWTRLPQGFLNSPALFNADVVDLLKEVPNVQVYVDDIYISHDDPREHLEQLEKVFSLLLNAGYVVSLKKSEIAQHEVEFLGFNITKEGRGLTETFKQKLLNITPPRDLKQLQSILGKLNFARNFIPNFSELVKPLYNIIATAPGKYITWTTDNSQQLQNIISMLNSAENLEERNPEVRLIMKVNTSPSAGYIRFYNEFAKRPIMYLNYVYTKAEVKFTNTEKLLTTIHKGLIKALDLGMGQEILVYSPIVSMTKIQKTPLPERKALPIRWITWMSYLEDPRIQFHYDKTLPELQQVPTVTDDIIAKIKHPSEFSMVFYTDGSAIKHPNVNKSHNAGMGIAQVQFKPEFTVINTWSIPLGDHTAQLAEVAAVEFACKKALKIDGPVLIVTDSFYVAESVNKELPYWQSNGFFNNKKKPLKHVSKWKSIADCIQLKPDIIIIHEKGHQPTASTFHTEGNNLADKLATQGSYVVNAGKRTADGSEFEKRTADGSEFESPKKKAKVE

SEQ ID NO: 656 - protein, 2181 aa, synthetic construct
MPAAKRVKLDGGDKKYSIGLDIGTNSVGWAVITDEYKVPSKKFKVLGNTDRHSIKKNLIGALLFDSGETAEATRLKRTARRRYTRRKNRICYLQEIFSNEMAKVDDSFFHRLEESFLVEEDKKHERHPIFGNIVDEVAYHEKYPTIYHLRKKLVDSTDKADLRLIYLALAHMIKFRGHFLIEGDLNPDNSDVDKLFIQLVQTYNQLFEENPINASGVDAKAILSARLSKSRRLENLIAQLPGEKKNGLFGNLIALSLGLTPNFKSNFDLAEDAKLQLSKDTYDDDLDNLLAQIGDQYADLFLAAKNLSDAILLSDILRVNTEITKAPLSASMIKRYDEHHQDLTLLKALVRQQLPEKYKEIFFDQSKNGYAGYIDGGASQEEFYKFIKPILEKMDGTEELLVKLNREDLLRKQRTFDNGSIPHQIHLGELHAILRRQEDFYPFLKDNREKIEKILTFRIPYYVGPLARGNSRFAWMTRKSEETITPWNFEEVVDKGASAQSFIERMTNFDKNLPNEKVLPKHSLLYEYFTVYNELTKVKYVTEGMRKPAFLSGEQKKAIVDLLFKTNRKVTVKQLKEDYFKKIECFDSVEISGVEDRFNASLGTYHDLLKIIKDKDFLDNEENEDILEDIVLTLTLFEDREMIEERLKTYAHLFDDKVMKQLKRRRYTGWGRLSRKLINGIRDKQSGKTILDFLKSDGFANRNFMQLIHDDSLTFKEDIQKAQVSGQGDSLHEHIANLAGSPAIKKGILQTVKVVDELVKVMGRHKPENIVIEMARENQTTQKGQKNSRERMKRIEEGIKELGSQILKEHPVENTQLQNEKLYLYYLQNGRDMYVDQELDINRLSDYDVDHIVPQSFLKDDSIDNKVLTRSDKARGKSDNVPSEEVVKKMKNYWRQLLNAKLITQRKFDNLTKAERGGLSELDKAGFIKRQLVETRQITKHVAQILDSRMNTKYDENDKLIREVKVITLKSKLVSDFRKDFQFYKVREINNYHHAHDAYLNAVVGTALIKKYPKLESEFVYGDYKVYDVRKMIAKSEQEIGKATAKYFFYSNIMNFFKTEITLANGEIRKRPLIETNGETGEIVWDKGRDFATVRKVLSMPQVNIVKKTEVQTGGFSKESILPKRNSDKLIARKKDWDPKKYGGFDSPTVAYSVLVVAKVEKGKSKKLKSVKELLGITIMERSSFEKNPIDFLEAKGYKEVKKDLIIKLPKYSLFELENGRKRMLASAGELQKGNELALPSKYVNFLYLASHYEKLKGSPEDNEQKQLFVEQHKHYLDEIIEQISEFSKRVILADANLDKVLSAYNKHRDKPIREQAENIIHLFTLTNLGAPAAFKYFDTTIDRKRYTSTKEVLDATLIHQSITGLYETRIDLSQLGGDGGSGSETPGTSESATPESGGMDPLQLLQPLEAEIKGTKLKAHWNSGATITCVPQAFLEEEVPIKNIWIKTIHGEKEQPVYYLTFKIQGRKVEAEVISSPYDYILVSPSDIPWLMKKPLQLTTLVPLQEYEERLLKQTMLTGSYKEKLQSLFLKYDALWQHWENQVGHRRIKPHHIATGTVNPRPQKQYPINPKAKASIQTVINDLLKQGVLIQQNSIMNTPVYPVPKPDGKWRMVLDYREVNKTIPLIAAQNQHSAGILSSIFRGKYKTTLDLSNGFWAHSITPESYWLTAFTWLGQQYCWTRLPQGFLNSPALFNADVVDLLKEVPNVQVYVDDIYISHDDPREHLEQLEKVFSLLLNAGYVVSLKKSEIAQHEVEFLGFNITKEGRGLTETFKQKLLNITPPRDLKQLQSILGKLNFARNFIPNFSELVKPLYNIIATAPGKYITWTTDNSQQLQNIISMLNSAENLEERNPEVRLIMKVNTSPSAGYIRFYNEFAKRPIMYLNYVYTKAEVKFTNTEKLLTTIHKGLIKALDLGMGQEILVYSPIVSMTKIQKTPLPERKALPIRWITWMSYLEDPRIQFHYDKTLPELQQVPTVTDDIIAKIKHPSEFSMVFYTDGSAIKHPNVNKSHNAGMGIAQVQFKPEFTVINTWSIPLGDHTAQLAEVAAVEFACKKALKIDGPVLIVTDSFYVAESVNKELPYWQSNGFFNNKKKPLKHVSKWKSIADCIQLKPDIIIIHEKGHQPTASTFHTEGNNLADKLATQGSYVVNAGKRTADGSEFEKRTADGSEFESPKKKAKVE

SEQ ID NO: 657 - protein, 2177 aa, synthetic construct
MPAAKRVKLDGGDKKYSIGLDIGTNSVGWAVITDEYKVPSKKFKVLGNTDRHSIKKNLIGALLFDSGETAEATRLKRTARRRYTRRKNRICYLQEIFSNEMAKVDDSFFHRLEESFLVEEDKKHERHPIFGNIVDEVAYHEKYPTIYHLRKKLVDSTDKADLRLIYLALAHMIKFRGHFLIEGDLNPDNSDVDKLFIQLVQTYNQLFEENPINASGVDAKAILSARLSKSRRLENLIAQLPGEKKNGLFGNLIALSLGLTPNFKSNFDLAEDAKLQLSKDTYDDDLDNLLAQIGDQYADLFLAAKNLSDAILLSDILRVNTEITKAPLSASMIKRYDEHHQDLTLLKALVRQQLPEKYKEIFFDQSKNGYAGYIDGGASQEEFYKFIKPILEKMDGTEELLVKLNREDLLRKQRTFDNGSIPHQIHLGELHAILRRQEDFYPFLKDNREKIEKILTFRIPYYVGPLARGNSRFAWMTRKSEETITPWNFEEVVDKGASAQSFIERMTNFDKNLPNEKVLPKHSLLYEYFTVYNELTKVKYVTEGMRKPAFLSGEQKKAIVDLLFKTNRKVTVKQLKEDYFKKIECFDSVEISGVEDRFNASLGTYHDLLKIIKDKDFLDNEENEDILEDIVLTLTLFEDREMIEERLKTYAHLFDDKVMKQLKRRRYTGWGRLSRKLINGIRDKQSGKTILDFLKSDGFANRNFMQLIHDDSLTFKEDIQKAQVSGQGDSLHEHIANLAGSPAIKKGILQTVKVVDELVKVMGRHKPENIVIEMARENQTTQKGQKNSRERMKRIEEGIKELGSQILKEHPVENTQLQNEKLYLYYLQNGRDMYVDQELDINRLSDYDVDHIVPQSFLKDDSIDNKVLTRSDKARGKSDNVPSEEVVKKMKNYWRQLLNAKLITQRKFDNLTKAERGGLSELDKAGFIKRQLVETRQITKHVAQILDSRMNTKYDENDKLIREVKVITLKSKLVSDFRKDFQFYKVREINNYHHAHDAYLNAVVGTALIKKYPKLESEFVYGDYKVYDVRKMIAKSEQEIGKATAKYFFYSNIMNFFKTEITLANGEIRKRPLIETNGETGEIVWDKGRDFATVRKVLSMPQVNIVKKTEVQTGGFSKESILPKRNSDKLIARKKDWDPKKYGGFDSPTVAYSVLVVAKVEKGKSKKLKSVKELLGITIMERSSFEKNPIDFLEAKGYKEVKKDLIIKLPKYSLFELENGRKRMLASAGELQKGNELALPSKYVNFLYLASHYEKLKGSPEDNEQKQLFVEQHKHYLDEIIEQISEFSKRVILADANLDKVLSAYNKHRDKPIREQAENIIHLFTLTNLGAPAAFKYFDTTIDRKRYTSTKEVLDATLIHQSITGLYETRIDLSQLGGDGGGSAGSAAGSGEFGGMDPLQLLQPLEAEIKGTKLKAHWNSGATITCVPQAFLEEEVPIKNIWIKTIHGEKEQPVYYLTFKIQGRKVEAEVISSPYDYILVSPSDIPWLMKKPLQLTTLVPLQEYEERLLKQTMLTGSYKEKLQSLFLKYDALWQHWENQVGHRRIKPHHIATGTVNPRPQKQYPINPKAKASIQTVINDLLKQGVLIQQNSIMNTPVYPVPKPDGKWRMVLDYREVNKTIPLIAAQNQHSAGILSSIFRGKYKTTLDLSNGFWAHSITPESYWLTAFTWLGQQYCWTRLPQGFLNSPALFNADVVDLLKEVPNVQVYVDDIYISHDDPREHLEQLEKVFSLLLNAGYVVSLKKSEIAQHEVEFLGFNITKEGRGLTETFKQKLLNITPPRDLKQLQSILGKLNFARNFIPNFSELVKPLYNIIATAPGKYITWTTDNSQQLQNIISMLNSAENLEERNPEVRLIMKVNTSPSAGYIRFYNEFAKRPIMYLNYVYTKAEVKFTNTEKLLTTIHKGLIKALDLGMGQEILVYSPIVSMTKIQKTPLPERKALPIRWITWMSYLEDPRIQFHYDKTLPELQQVPTVTDDIIAKIKHPSEFSMVFYTDGSAIKHPNVNKSHNAGMGIAQVQFKPEFTVINTWSIPLGDHTAQLAEVAAVEFACKKALKIDGPVLIVTDSFYVAESVNKELPYWQSNGFFNNKKKPLKHVSKWKSIADCIQLKPDIIIIHEKGHQPTASTFHTEGNNLADKLATQGSYVVNAGKRTADGSEFEKRTADGSEFESPKKKAKVE

SEQ ID NO: 658 - protein, 2168 aa, synthetic construct
MPAAKRVKLDGGDKKYSIGLDIGTNSVGWAVITDEYKVPSKKFKVLGNTDRHSIKKNLIGALLFDSGETAEATRLKRTARRRYTRRKNRICYLQEIFSNEMAKVDDSFFHRLEESFLVEEDKKHERHPIFGNIVDEVAYHEKYPTIYHLRKKLVDSTDKADLRLIYLALAHMIKFRGHFLIEGDLNPDNSDVDKLFIQLVQTYNQLFEENPINASGVDAKAILSARLSKSRRLENLIAQLPGEKKNGLFGNLIALSLGLTPNFKSNFDLAEDAKLQLSKDTYDDDLDNLLAQIGDQYADLFLAAKNLSDAILLSDILRVNTEITKAPLSASMIKRYDEHHQDLTLLKALVRQQLPEKYKEIFFDQSKNGYAGYIDGGASQEEFYKFIKPILEKMDGTEELLVKLNREDLLRKQRTFDNGSIPHQIHLGELHAILRRQEDFYPFLKDNREKIEKILTFRIPYYVGPLARGNSRFAWMTRKSEETITPWNFEEVVDKGASAQSFIERMTNFDKNLPNEKVLPKHSLLYEYFTVYNELTKVKYVTEGMRKPAFLSGEQKKAIVDLLFKTNRKVTVKQLKEDYFKKIECFDSVEISGVEDRFNASLGTYHDLLKIIKDKDFLDNEENEDILEDIVLTLTLFEDREMIEERLKTYAHLFDDKVMKQLKRRRYTGWGRLSRKLINGIRDKQSGKTILDFLKSDGFANRNFMQLIHDDSLTFKEDIQKAQVSGQGDSLHEHIANLAGSPAIKKGILQTVKVVDELVKVMGRHKPENIVIEMARENQTTQKGQKNSRERMKRIEEGIKELGSQILKEHPVENTQLQNEKLYLYYLQNGRDMYVDQELDINRLSDYDVDHIVPQSFLKDDSIDNKVLTRSDKARGKSDNVPSEEVVKKMKNYWRQLLNAKLITQRKFDNLTKAERGGLSELDKAGFIKRQLVETRQITKHVAQILDSRMNTKYDENDKLIREVKVITLKSKLVSDFRKDFQFYKVREINNYHHAHDAYLNAVVGTALIKKYPKLESEFVYGDYKVYDVRKMIAKSEQEIGKATAKYFFYSNIMNFFKTEITLANGEIRKRPLIETNGETGEIVWDKGRDFATVRKVLSMPQVNIVKKTEVQTGGFSKESILPKRNSDKLIARKKDWDPKKYGGFDSPTVAYSVLVVAKVEKGKSKKLKSVKELLGITIMERSSFEKNPIDFLEAKGYKEVKKDLIIKLPKYSLFELENGRKRMLASAGELQKGNELALPSKYVNFLYLASHYEKLKGSPEDNEQKQLFVEQHKHYLDEIIEQISEFSKRVILADANLDKVLSAYNKHRDKPIREQAENIIHLFTLTNLGAPAAFKYFDTTIDRKRYTSTKEVLDATLIHQSITGLYETRIDLSQLGGDGGGGGGGMDPLQLLQPLEAEIKGTKLKAHWNSGATITCVPQAFLEEEVPIKNIWIKTIHGEKEQPVYYLTFKIQGRKVEAEVISSPYDYILVSPSDIPWLMKKPLQLTTLVPLQEYEERLLKQTMLTGSYKEKLQSLFLKYDALWQHWENQVGHRRIKPHHIATGTVNPRPQKQYPINPKAKASIQTVINDLLKQGVLIQQNSIMNTPVYPVPKPDGKWRMVLDYREVNKTIPLIAAQNQHSAGILSSIFRGKYKTTLDLSNGFWAHSITPESYWLTAFTWLGQQYCWTRLPQGFLNSPALFNADVVDLLKEVPNVQVYVDDIYISHDDPREHLEQLEKVFSLLLNAGYVVSLKKSEIAQHEVEFLGFNITKEGRGLTETFKQKLLNITPPRDLKQLQSILGKLNFARNFIPNFSELVKPLYNIIATAPGKYITWTTDNSQQLQNIISMLNSAENLEERNPEVRLIMKVNTSPSAGYIRFYNEFAKRPIMYLNYVYTKAEVKFTNTEKLLTTIHKGLIKALDLGMGQEILVYSPIVSMTKIQKTPLPERKALPIRWITWMSYLEDPRIQFHYDKTLPELQQVPTVTDDIIAKIKHPSEFSMVFYTDGSAIKHPNVNKSHNAGMGIAQVQFKPEFTVINTWSIPLGDHTAQLAEVAAVEFACKKALKIDGPVLIVTDSFYVAESVNKELPYWQSNGFFNNKKKPLKHVSKWKSIADCIQLKPDIIIIHEKGHQPTASTFHTEGNNLADKLATQGSYVVNAGKRTADGSEFEKRTADGSEFESPKKKAKVE

SEQ ID NO: 659 - protein, 2176 aa, synthetic construct
MPAAKRVKLDGGDKKYSIGLDIGTNSVGWAVITDEYKVPSKKFKVLGNTDRHSIKKNLIGALLFDSGETAEATRLKRTARRRYTRRKNRICYLQEIFSNEMAKVDDSFFHRLEESFLVEEDKKHERHPIFGNIVDEVAYHEKYPTIYHLRKKLVDSTDKADLRLIYLALAHMIKFRGHFLIEGDLNPDNSDVDKLFIQLVQTYNQLFEENPINASGVDAKAILSARLSKSRRLENLIAQLPGEKKNGLFGNLIALSLGLTPNFKSNFDLAEDAKLQLSKDTYDDDLDNLLAQIGDQYADLFLAAKNLSDAILLSDILRVNTEITKAPLSASMIKRYDEHHQDLTLLKALVRQQLPEKYKEIFFDQSKNGYAGYIDGGASQEEFYKFIKPILEKMDGTEELLVKLNREDLLRKQRTFDNGSIPHQIHLGELHAILRRQEDFYPFLKDNREKIEKILTFRIPYYVGPLARGNSRFAWMTRKSEETITPWNFEEVVDKGASAQSFIERMTNFDKNLPNEKVLPKHSLLYEYFTVYNELTKVKYVTEGMRKPAFLSGEQKKAIVDLLFKTNRKVTVKQLKEDYFKKIECFDSVEISGVEDRFNASLGTYHDLLKIIKDKDFLDNEENEDILEDIVLTLTLFEDREMIEERLKTYAHLFDDKVMKQLKRRRYTGWGRLSRKLINGIRDKQSGKTILDFLKSDGFANRNFMQLIHDDSLTFKEDIQKAQVSGQGDSLHEHIANLAGSPAIKKGILQTVKVVDELVKVMGRHKPENIVIEMARENQTTQKGQKNSRERMKRIEEGIKELGSQILKEHPVENTQLQNEKLYLYYLQNGRDMYVDQELDINRLSDYDVDHIVPQSFLKDDSIDNKVLTRSDKARGKSDNVPSEEVVKKMKNYWRQLLNAKLITQRKFDNLTKAERGGLSELDKAGFIKRQLVETRQITKHVAQILDSRMNTKYDENDKLIREVKVITLKSKLVSDFRKDFQFYKVREINNYHHAHDAYLNAVVGTALIKKYPKLESEFVYGDYKVYDVRKMIAKSEQEIGKATAKYFFYSNIMNFFKTEITLANGEIRKRPLIETNGETGEIVWDKGRDFATVRKVLSMPQVNIVKKTEVQTGGFSKESILPKRNSDKLIARKKDWDPKKYGGFDSPTVAYSVLVVAKVEKGKSKKLKSVKELLGITIMERSSFEKNPIDFLEAKGYKEVKKDLIIKLPKYSLFELENGRKRMLASAGELQKGNELALPSKYVNFLYLASHYEKLKGSPEDNEQKQLFVEQHKHYLDEIIEQISEFSKRVILADANLDKVLSAYNKHRDKPIREQAENIIHLFTLTNLGAPAAFKYFDTTIDRKRYTSTKEVLDATLIHQSITGLYETRIDLSQLGGDGGGGSGGGEAAAKGGMDPLQLLQPLEAEIKGTKLKAHWNSGATITCVPQAFLEEEVPIKNIWIKTIHGEKEQPVYYLTFKIQGRKVEAEVISSPYDYILVSPSDIPWLMKKPLQLTTLVPLQEYEERLLKQTMLTGSYKEKLQSLFLKYDALWQHWENQVGHRRIKPHHIATGTVNPRPQKQYPINPKAKASIQTVINDLLKQGVLIQQNSIMNTPVYPVPKPDGKWRMVLDYREVNKTIPLIAAQNQHSAGILSSIFRGKYKTTLDLSNGFWAHSITPESYWLTAFTWLGQQYCWTRLPQGFLNSPALFNADVVDLLKEVPNVQVYVDDIYISHDDPREHLEQLEKVFSLLLNAGYVVSLKKSEIAQHEVEFLGFNITKEGRGLTETFKQKLLNITPPRDLKQLQSILGKLNFARNFIPNFSELVKPLYNIIATAPGKYITWTTDNSQQLQNIISMLNSAENLEERNPEVRLIMKVNTSPSAGYIRFYNEFAKRPIMYLNYVYTKAEVKFTNTEKLLTTIHKGLIKALDLGMGQEILVYSPIVSMTKIQKTPLPERKALPIRWITWMSYLEDPRIQFHYDKTLPELQQVPTVTDDIIAKIKHPSEFSMVFYTDGSAIKHPNVNKSHNAGMGIAQVQFKPEFTVINTWSIPLGDHTAQLAEVAAVEFACKKALKIDGPVLIVTDSFYVAESVNKELPYWQSNGFFNNKKKPLKHVSKWKSIADCIQLKPDIIIIHEKGHQPTASTFHTEGNNLADKLATQGSYVVNAGKRTADGSEFEKRTADGSEFESPKKKAKVE

SEQ ID NO: 660 - protein, 2180 aa, synthetic construct
MPAAKRVKLDGGDKKYSIGLDIGTNSVGWAVITDEYKVPSKKFKVLGNTDRHSIKKNLIGALLFDSGETAEATRLKRTARRRYTRRKNRICYLQEIFSNEMAKVDDSFFHRLEESFLVEEDKKHERHPIFGNIVDEVAYHEKYPTIYHLRKKLVDSTDKADLRLIYLALAHMIKFRGHFLIEGDLNPDNSDVDKLFIQLVQTYNQLFEENPINASGVDAKAILSARLSKSRRLENLIAQLPGEKKNGLFGNLIALSLGLTPNFKSNFDLAEDAKLQLSKDTYDDDLDNLLAQIGDQYADLFLAAKNLSDAILLSDILRVNTEITKAPLSASMIKRYDEHHQDLTLLKALVRQQLPEKYKEIFFDQSKNGYAGYIDGGASQEEFYKFIKPILEKMDGTEELLVKLNREDLLRKQRTFDNGSIPHQIHLGELHAILRRQEDFYPFLKDNREKIEKILTFRIPYYVGPLARGNSRFAWMTRKSEETITPWNFEEVVDKGASAQSFIERMTNFDKNLPNEKVLPKHSLLYEYFTVYNELTKVKYVTEGMRKPAFLSGEQKKAIVDLLFKTNRKVTVKQLKEDYFKKIECFDSVEISGVEDRFNASLGTYHDLLKIIKDKDFLDNEENEDILEDIVLTLTLFEDREMIEERLKTYAHLFDDKVMKQLKRRRYTGWGRLSRKLINGIRDKQSGKTILDFLKSDGFANRNFMQLIHDDSLTFKEDIQKAQVSGQGDSLHEHIANLAGSPAIKKGILQTVKVVDELVKVMGRHKPENIVIEMARENQTTQKGQKNSRERMKRIEEGIKELGSQILKEHPVENTQLQNEKLYLYYLQNGRDMYVDQELDINRLSDYDVDHIVPQSFLKDDSIDNKVLTRSDKARGKSDNVPSEEVVKKMKNYWRQLLNAKLITQRKFDNLTKAERGGLSELDKAGFIKRQLVETRQITKHVAQILDSRMNTKYDENDKLIREVKVITLKSKLVSDFRKDFQFYKVREINNYHHAHDAYLNAVVGTALIKKYPKLESEFVYGDYKVYDVRKMIAKSEQEIGKATAKYFFYSNIMNFFKTEITLANGEIRKRPLIETNGETGEIVWDKGRDFATVRKVLSMPQVNIVKKTEVQTGGFSKESILPKRNSDKLIARKKDWDPKKYGGFDSPTVAYSVLVVAKVEKGKSKKLKSVKELLGITIMERSSFEKNPIDFLEAKGYKEVKKDLIIKLPKYSLFELENGRKRMLASAGELQKGNELALPSKYVNFLYLASHYEKLKGSPEDNEQKQLFVEQHKHYLDEIIEQISEFSKRVILADANLDKVLSAYNKHRDKPIREQAENIIHLFTLTNLGAPAAFKYFDTTIDRKRYTSTKEVLDATLIHQSITGLYETRIDLSQLGGDGGEAAAKGGGGSEAAAKGGMDPLQLLQPLEAEIKGTKLKAHWNSGATITCVPQAFLEEEVPIKNIWIKTIHGEKEQPVYYLTFKIQGRKVEAEVISSPYDYILVSPSDIPWLMKKPLQLTTLVPLQEYEERLLKQTMLTGSYKEKLQSLFLKYDALWQHWENQVGHRRIKPHHIATGTVNPRPQKQYPINPKAKASIQTVINDLLKQGVLIQQNSIMNTPVYPVPKPDGKWRMVLDYREVNKTIPLIAAQNQHSAGILSSIFRGKYKTTLDLSNGFWAHSITPESYWLTAFTWLGQQYCWTRLPQGFLNSPALFNADVVDLLKEVPNVQVYVDDIYISHDDPREHLEQLEKVFSLLLNAGYVVSLKKSEIAQHEVEFLGFNITKEGRGLTETFKQKLLNITPPRDLKQLQSILGKLNFARNFIPNFSELVKPLYNIIATAPGKYITWTTDNSQQLQNIISMLNSAENLEERNPEVRLIMKVNTSPSAGYIRFYNEFAKRPIMYLNYVYTKAEVKFTNTEKLLTTIHKGLIKALDLGMGQEILVYSPIVSMTKIQKTPLPERKALPIRWITWMSYLEDPRIQFHYDKTLPELQQVPTVTDDIIAKIKHPSEFSMVFYTDGSAIKHPNVNKSHNAGMGIAQVQFKPEFTVINTWSIPLGDHTAQLAEVAAVEFACKKALKIDGPVLIVTDSFYVAESVNKELPYWQSNGFFNNKKKPLKHVSKWKSIADCIQLKPDIIIIHEKGHQPTASTFHTEGNNLADKLATQGSYVVNAGKRTADGSEFEKRTADGSEFESPKKKAKVE

SEQ ID NO: 661 - protein, 2176 aa, synthetic construct
MPAAKRVKLDGGDKKYSIGLDIGTNSVGWAVITDEYKVPSKKFKVLGNTDRHSIKKNLIGALLFDSGETAEATRLKRTARRRYTRRKNRICYLQEIFSNEMAKVDDSFFHRLEESFLVEEDKKHERHPIFGNIVDEVAYHEKYPTIYHLRKKLVDSTDKADLRLIYLALAHMIKFRGHFLIEGDLNPDNSDVDKLFIQLVQTYNQLFEENPINASGVDAKAILSARLSKSRRLENLIAQLPGEKKNGLFGNLIALSLGLTPNFKSNFDLAEDAKLQLSKDTYDDDLDNLLAQIGDQYADLFLAAKNLSDAILLSDILRVNTEITKAPLSASMIKRYDEHHQDLTLLKALVRQQLPEKYKEIFFDQSKNGYAGYIDGGASQEEFYKFIKPILEKMDGTEELLVKLNREDLLRKQRTFDNGSIPHQIHLGELHAILRRQEDFYPFLKDNREKIEKILTFRIPYYVGPLARGNSRFAWMTRKSEETITPWNFEEVVDKGASAQSFIERMTNFDKNLPNEKVLPKHSLLYEYFTVYNELTKVKYVTEGMRKPAFLSGEQKKAIVDLLFKTNRKVTVKQLKEDYFKKIECFDSVEISGVEDRFNASLGTYHDLLKIIKDKDFLDNEENEDILEDIVLTLTLFEDREMIEERLKTYAHLFDDKVMKQLKRRRYTGWGRLSRKLINGIRDKQSGKTILDFLKSDGFANRNFMQLIHDDSLTFKEDIQKAQVSGQGDSLHEHIANLAGSPAIKKGILQTVKVVDELVKVMGRHKPENIVIEMARENQTTQKGQKNSRERMKRIEEGIKELGSQILKEHPVENTQLQNEKLYLYYLQNGRDMYVDQELDINRLSDYDVDHIVPQSFLKDDSIDNKVLTRSDKARGKSDNVPSEEVVKKMKNYWRQLLNAKLITQRKFDNLTKAERGGLSELDKAGFIKRQLVETRQITKHVAQILDSRMNTKYDENDKLIREVKVITLKSKLVSDFRKDFQFYKVREINNYHHAHDAYLNAVVGTALIKKYPKLESEFVYGDYKVYDVRKMIAKSEQEIGKATAKYFFYSNIMNFFKTEITLANGEIRKRPLIETNGETGEIVWDKGRDFATVRKVLSMPQVNIVKKTEVQTGGFSKESILPKRNSDKLIARKKDWDPKKYGGFDSPTVAYSVLVVAKVEKGKSKKLKSVKELLGITIMERSSFEKNPIDFLEAKGYKEVKKDLIIKLPKYSLFELENGRKRMLASAGELQKGNELALPSKYVNFLYLASHYEKLKGSPEDNEQKQLFVEQHKHYLDEIIEQISEFSKRVILADANLDKVLSAYNKHRDKPIREQAENIIHLFTLTNLGAPAAFKYFDTTIDRKRYTSTKEVLDATLIHQSITGLYETRIDLSQLGGDGGGGSEAAAKGGGGGMDPLQLLQPLEAEIKGTKLKAHWNSGATITCVPQAFLEEEVPIKNIWIKTIHGEKEQPVYYLTFKIQGRKVEAEVISSPYDYILVSPSDIPWLMKKPLQLTTLVPLQEYEERLLKQTMLTGSYKEKLQSLFLKYDALWQHWENQVGHRRIKPHHIATGTVNPRPQKQYPINPKAKASIQTVINDLLKQGVLIQQNSIMNTPVYPVPKPDGKWRMVLDYREVNKTIPLIAAQNQHSAGILSSIFRGKYKTTLDLSNGFWAHSITPESYWLTAFTWLGQQYCWTRLPQGFLNSPALFNADVVDLLKEVPNVQVYVDDIYISHDDPREHLEQLEKVFSLLLNAGYVVSLKKSEIAQHEVEFLGFNITKEGRGLTETFKQKLLNITPPRDLKQLQSILGKLNFARNFIPNFSELVKPLYNIIATAPGKYITWTTDNSQQLQNIISMLNSAENLEERNPEVRLIMKVNTSPSAGYIRFYNEFAKRPIMYLNYVYTKAEVKFTNTEKLLTTIHKGLIKALDLGMGQEILVYSPIVSMTKIQKTPLPERKALPIRWITWMSYLEDPRIQFHYDKTLPELQQVPTVTDDIIAKIKHPSEFSMVFYTDGSAIKHPNVNKSHNAGMGIAQVQFKPEFTVINTWSIPLGDHTAQLAEVAAVEFACKKALKIDGPVLIVTDSFYVAESVNKELPYWQSNGFFNNKKKPLKHVSKWKSIADCIQLKPDIIIIHEKGHQPTASTFHTEGNNLADKLATQGSYVVNAGKRTADGSEFEKRTADGSEFESPKKKAKVE

SEQ ID NO: 662 - protein, 2183 aa, synthetic construct
MPAAKRVKLDGGDKKYSIGLDIGTNSVGWAVITDEYKVPSKKFKVLGNTDRHSIKKNLIGALLFDSGETAEATRLKRTARRRYTRRKNRICYLQEIFSNEMAKVDDSFFHRLEESFLVEEDKKHERHPIFGNIVDEVAYHEKYPTIYHLRKKLVDSTDKADLRLIYLALAHMIKFRGHFLIEGDLNPDNSDVDKLFIQLVQTYNQLFEENPINASGVDAKAILSARLSKSRRLENLIAQLPGEKKNGLFGNLIALSLGLTPNFKSNFDLAEDAKLQLSKDTYDDDLDNLLAQIGDQYADLFLAAKNLSDAILLSDILRVNTEITKAPLSASMIKRYDEHHQDLTLLKALVRQQLPEKYKEIFFDQSKNGYAGYIDGGASQEEFYKFIKPILEKMDGTEELLVKLNREDLLRKQRTFDNGSIPHQIHLGELHAILRRQEDFYPFLKDNREKIEKILTFRIPYYVGPLARGNSRFAWMTRKSEETITPWNFEEVVDKGASAQSFIERMTNFDKNLPNEKVLPKHSLLYEYFTVYNELTKVKYVTEGMRKPAFLSGEQKKAIVDLLFKTNRKVTVKQLKEDYFKKIECFDSVEISGVEDRFNASLGTYHDLLKIIKDKDFLDNEENEDILEDIVLTLTLFEDREMIEERLKTYAHLFDDKVMKQLKRRRYTGWGRLSRKLINGIRDKQSGKTILDFLKSDGFANRNFMQLIHDDSLTFKEDIQKAQVSGQGDSLHEHIANLAGSPAIKKGILQTVKVVDELVKVMGRHKPENIVIEMARENQTTQKGQKNSRERMKRIEEGIKELGSQILKEHPVENTQLQNEKLYLYYLQNGRDMYVDQELDINRLSDYDVDHIVPQSFLKDDSIDNKVLTRSDKARGKSDNVPSEEVVKKMKNYWRQLLNAKLITQRKFDNLTKAERGGLSELDKAGFIKRQLVETRQITKHVAQILDSRMNTKYDENDKLIREVKVITLKSKLVSDFRKDFQFYKVREINNYHHAHDAYLNAVVGTALIKKYPKLESEFVYGDYKVYDVRKMIAKSEQEIGKATAKYFFYSNIMNFFKTEITLANGEIRKRPLIETNGETGEIVWDKGRDFATVRKVLSMPQVNIVKKTEVQTGGFSKESILPKRNSDKLIARKKDWDPKKYGGFDSPTVAYSVLVVAKVEKGKSKKLKSVKELLGITIMERSSFEKNPIDFLEAKGYKEVKKDLIIKLPKYSLFELENGRKRMLASAGELQKGNELALPSKYVNFLYLASHYEKLKGSPEDNEQKQLFVEQHKHYLDEIIEQISEFSKRVILADANLDKVLSAYNKHRDKPIREQAENIIHLFTLTNLGAPAAFKYFDTTIDRKRYTSTKEVLDATLIHQSITGLYETRIDLSQLGGDGGGSSGSSGSSGSSGSSGSSGGMDPLQLLQPLEAEIKGTKLKAHWNSGATITCVPQAFLEEEVPIKNIWIKTIHGEKEQPVYYLTFKIQGRKVEAEVISSPYDYILVSPSDIPWLMKKPLQLTTLVPLQEYEERLLKQTMLTGSYKEKLQSLFLKYDALWQHWENQVGHRRIKPHHIATGTVNPRPQKQYPINPKAKASIQTVINDLLKQGVLIQQNSIMNTPVYPVPKPDGKWRMVLDYREVNKTIPLIAAQNQHSAGILSSIFRGKYKTTLDLSNGFWAHSITPESYWLTAFTWLGQQYCWTRLPQGFLNSPALFNADVVDLLKEVPNVQVYVDDIYISHDDPREHLEQLEKVFSLLLNAGYVVSLKKSEIAQHEVEFLGFNITKEGRGLTETFKQKLLNITPPRDLKQLQSILGKLNFARNFIPNFSELVKPLYNIIATAPGKYITWTTDNSQQLQNIISMLNSAENLEERNPEVRLIMKVNTSPSAGYIRFYNEFAKRPIMYLNYVYTKAEVKFTNTEKLLTTIHKGLIKALDLGMGQEILVYSPIVSMTKIQKTPLPERKALPIRWITWMSYLEDPRIQFHYDKTLPELQQVPTVTDDIIAKIKHPSEFSMVFYTDGSAIKHPNVNKSHNAGMGIAQVQFKPEFTVINTWSIPLGDHTAQLAEVAAVEFACKKALKIDGPVLIVTDSFYVAESVNKELPYWQSNGFFNNKKKPLKHVSKWKSIADCIQLKPDIIIIHEKGHQPTASTFHTEGNNLADKLATQGSYVVNAGKRTADGSEFEKRTADGSEFESPKKKAKVE

SEQ ID NO: 663 - protein, 2176 aa, synthetic construct
MPAAKRVKLDGGDKKYSIGLDIGTNSVGWAVITDEYKVPSKKFKVLGNTDRHSIKKNLIGALLFDSGETAEATRLKRTARRRYTRRKNRICYLQEIFSNEMAKVDDSFFHRLEESFLVEEDKKHERHPIFGNIVDEVAYHEKYPTIYHLRKKLVDSTDKADLRLIYLALAHMIKFRGHFLIEGDLNPDNSDVDKLFIQLVQTYNQLFEENPINASGVDAKAILSARLSKSRRLENLIAQLPGEKKNGLFGNLIALSLGLTPNFKSNFDLAEDAKLQLSKDTYDDDLDNLLAQIGDQYADLFLAAKNLSDAILLSDILRVNTEITKAPLSASMIKRYDEHHQDLTLLKALVRQQLPEKYKEIFFDQSKNGYAGYIDGGASQEEFYKFIKPILEKMDGTEELLVKLNREDLLRKQRTFDNGSIPHQIHLGELHAILRRQEDFYPFLKDNREKIEKILTFRIPYYVGPLARGNSRFAWMTRKSEETITPWNFEEVVDKGASAQSFIERMTNFDKNLPNEKVLPKHSLLYEYFTVYNELTKVKYVTEGMRKPAFLSGEQKKAIVDLLFKTNRKVTVKQLKEDYFKKIECFDSVEISGVEDRFNASLGTYHDLLKIIKDKDFLDNEENEDILEDIVLTLTLFEDREMIEERLKTYAHLFDDKVMKQLKRRRYTGWGRLSRKLINGIRDKQSGKTILDFLKSDGFANRNFMQLIHDDSLTFKEDIQKAQVSGQGDSLHEHIANLAGSPAIKKGILQTVKVVDELVKVMGRHKPENIVIEMARENQTTQKGQKNSRERMKRIEEGIKELGSQILKEHPVENTQLQNEKLYLYYLQNGRDMYVDQELDINRLSDYDVDHIVPQSFLKDDSIDNKVLTRSDKARGKSDNVPSEEVVKKMKNYWRQLLNAKLITQRKFDNLTKAERGGLSELDKAGFIKRQLVETRQITKHVAQILDSRMNTKYDENDKLIREVKVITLKSKLVSDFRKDFQFYKVREINNYHHAHDAYLNAVVGTALIKKYPKLESEFVYGDYKVYDVRKMIAKSEQEIGKATAKYFFYSNIMNFFKTEITLANGEIRKRPLIETNGETGEIVWDKGRDFATVRKVLSMPQVNIVKKTEVQTGGFSKESILPKRNSDKLIARKKDWDPKKYGGFDSPTVAYSVLVVAKVEKGKSKKLKSVKELLGITIMERSSFEKNPIDFLEAKGYKEVKKDLIIKLPKYSLFELENGRKRMLASAGELQKGNELALPSKYVNFLYLASHYEKLKGSPEDNEQKQLFVEQHKHYLDEIIEQISEFSKRVILADANLDKVLSAYNKHRDKPIREQAENIIHLFTLTNLGAPAAFKYFDTTIDRKRYTSTKEVLDATLIHQSITGLYETRIDLSQLGGDGGGGGPAPEAAAKGGMDPLQLLQPLEAEIKGTKLKAHWNSGATITCVPQAFLEEEVPIKNIWIKTIHGEKEQPVYYLTFKIQGRKVEAEVISSPYDYILVSPSDIPWLMKKPLQLTTLVPLQEYEERLLKQTMLTGSYKEKLQSLFLKYDALWQHWENQVGHRRIKPHHIATGTVNPRPQKQYPINPKAKASIQTVINDLLKQGVLIQQNSIMNTPVYPVPKPDGKWRMVLDYREVNKTIPLIAAQNQHSAGILSSIFRGKYKTTLDLSNGFWAHSITPESYWLTAFTWLGQQYCWTRLPQGFLNSPALFNADVVDLLKEVPNVQVYVDDIYISHDDPREHLEQLEKVFSLLLNAGYVVSLKKSEIAQHEVEFLGFNITKEGRGLTETFKQKLLNITPPRDLKQLQSILGKLNFARNFIPNFSELVKPLYNIIATAPGKYITWTTDNSQQLQNIISMLNSAENLEERNPEVRLIMKVNTSPSAGYIRFYNEFAKRPIMYLNYVYTKAEVKFTNTEKLLTTIHKGLIKALDLGMGQEILVYSPIVSMTKIQKTPLPERKALPIRWITWMSYLEDPRIQFHYDKTLPELQQVPTVTDDIIAKIKHPSEFSMVFYTDGSAIKHPNVNKSHNAGMGIAQVQFKPEFTVINTWSIPLGDHTAQLAEVAAVEFACKKALKIDGPVLIVTDSFYVAESVNKELPYWQSNGFFNNKKKPLKHVSKWKSIADCIQLKPDIIIIHEKGHQPTASTFHTEGNNLADKLATQGSYVVNAGKRTADGSEFEKRTADGSEFESPKKKAKVE

SEQ ID NO: 664 - protein, 2176 aa, synthetic construct
MPAAKRVKLDGGDKKYSIGLDIGTNSVGWAVITDEYKVPSKKFKVLGNTDRHSIKKNLIGALLFDSGETAEATRLKRTARRRYTRRKNRICYLQEIFSNEMAKVDDSFFHRLEESFLVEEDKKHERHPIFGNIVDEVAYHEKYPTIYHLRKKLVDSTDKADLRLIYLALAHMIKFRGHFLIEGDLNPDNSDVDKLFIQLVQTYNQLFEENPINASGVDAKAILSARLSKSRRLENLIAQLPGEKKNGLFGNLIALSLGLTPNFKSNFDLAEDAKLQLSKDTYDDDLDNLLAQIGDQYADLFLAAKNLSDAILLSDILRVNTEITKAPLSASMIKRYDEHHQDLTLLKALVRQQLPEKYKEIFFDQSKNGYAGYIDGGASQEEFYKFIKPILEKMDGTEELLVKLNREDLLRKQRTFDNGSIPHQIHLGELHAILRRQEDFYPFLKDNREKIEKILTFRIPYYVGPLARGNSRFAWMTRKSEETITPWNFEEVVDKGASAQSFIERMTNFDKNLPNEKVLPKHSLLYEYFTVYNELTKVKYVTEGMRKPAFLSGEQKKAIVDLLFKTNRKVTVKQLKEDYFKKIECFDSVEISGVEDRFNASLGTYHDLLKIIKDKDFLDNEENEDILEDIVLTLTLFEDREMIEERLKTYAHLFDDKVMKQLKRRRYTGWGRLSRKLINGIRDKQSGKTILDFLKSDGFANRNFMQLIHDDSLTFKEDIQKAQVSGQGDSLHEHIANLAGSPAIKKGILQTVKVVDELVKVMGRHKPENIVIEMARENQTTQKGQKNSRERMKRIEEGIKELGSQILKEHPVENTQLQNEKLYLYYLQNGRDMYVDQELDINRLSDYDVDHIVPQSFLKDDSIDNKVLTRSDKARGKSDNVPSEEVVKKMKNYWRQLLNAKLITQRKFDNLTKAERGGLSELDKAGFIKRQLVETRQITKHVAQILDSRMNTKYDENDKLIREVKVITLKSKLVSDFRKDFQFYKVREINNYHHAHDAYLNAVVGTALIKKYPKLESEFVYGDYKVYDVRKMIAKSEQEIGKATAKYFFYSNIMNFFKTEITLANGEIRKRPLIETNGETGEIVWDKGRDFATVRKVLSMPQVNIVKKTEVQTGGFSKESILPKRNSDKLIARKKDWDPKKYGGFDSPTVAYSVLVVAKVEKGKSKKLKSVKELLGITIMERSSFEKNPIDFLEAKGYKEVKKDLIIKLPKYSLFELENGRKRMLASAGELQKGNELALPSKYVNFLYLASHYEKLKGSPEDNEQKQLFVEQHKHYLDEIIEQISEFSKRVILADANLDKVLSAYNKHRDKPIREQAENIIHLFTLTNLGAPAAFKYFDTTIDRKRYTSTKEVLDATLIHQSITGLYETRIDLSQLGGDGGEAAAKPAPGGGGGMDPLQLLQPLEAEIKGTKLKAHWNSGATITCVPQAFLEEEVPIKNIWIKTIHGEKEQPVYYLTFKIQGRKVEAEVISSPYDYILVSPSDIPWLMKKPLQLTTLVPLQEYEERLLKQTMLTGSYKEKLQSLFLKYDALWQHWENQVGHRRIKPHHIATGTVNPRPQKQYPINPKAKASIQTVINDLLKQGVLIQQNSIMNTPVYPVPKPDGKWRMVLDYREVNKTIPLIAAQNQHSAGILSSIFRGKYKTTLDLSNGFWAHSITPESYWLTAFTWLGQQYCWTRLPQGFLNSPALFNADVVDLLKEVPNVQVYVDDIYISHDDPREHLEQLEKVFSLLLNAGYVVSLKKSEIAQHEVEFLGFNITKEGRGLTETFKQKLLNITPPRDLKQLQSILGKLNFARNFIPNFSELVKPLYNIIATAPGKYITWTTDNSQQLQNIISMLNSAENLEERNPEVRLIMKVNTSPSAGYIRFYNEFAKRPIMYLNYVYTKAEVKFTNTEKLLTTIHKGLIKALDLGMGQEILVYSPIVSMTKIQKTPLPERKALPIRWITWMSYLEDPRIQFHYDKTLPELQQVPTVTDDIIAKIKHPSEFSMVFYTDGSAIKHPNVNKSHNAGMGIAQVQFKPEFTVINTWSIPLGDHTAQLAEVAAVEFACKKALKIDGPVLIVTDSFYVAESVNKELPYWQSNGFFNNKKKPLKHVSKWKSIADCIQLKPDIIIIHEKGHQPTASTFHTEGNNLADKLATQGSYVVNAGKRTADGSEFEKRTADGSEFESPKKKAKVE

SEQ ID NO: 665 - protein, 2176 aa, synthetic construct
MPAAKRVKLDGGDKKYSIGLDIGTNSVGWAVITDEYKVPSKKFKVLGNTDRHSIKKNLIGALLFDSGETAEATRLKRTARRRYTRRKNRICYLQEIFSNEMAKVDDSFFHRLEESFLVEEDKKHERHPIFGNIVDEVAYHEKYPTIYHLRKKLVDSTDKADLRLIYLALAHMIKFRGHFLIEGDLNPDNSDVDKLFIQLVQTYNQLFEENPINASGVDAKAILSARLSKSRRLENLIAQLPGEKKNGLFGNLIALSLGLTPNFKSNFDLAEDAKLQLSKDTYDDDLDNLLAQIGDQYADLFLAAKNLSDAILLSDILRVNTEITKAPLSASMIKRYDEHHQDLTLLKALVRQQLPEKYKEIFFDQSKNGYAGYIDGGASQEEFYKFIKPILEKMDGTEELLVKLNREDLLRKQRTFDNGSIPHQIHLGELHAILRRQEDFYPFLKDNREKIEKILTFRIPYYVGPLARGNSRFAWMTRKSEETITPWNFEEVVDKGASAQSFIERMTNFDKNLPNEKVLPKHSLLYEYFTVYNELTKVKYVTEGMRKPAFLSGEQKKAIVDLLFKTNRKVTVKQLKEDYFKKIECFDSVEISGVEDRFNASLGTYHDLLKIIKDKDFLDNEENEDILEDIVLTLTLFEDREMIEERLKTYAHLFDDKVMKQLKRRRYTGWGRLSRKLINGIRDKQSGKTILDFLKSDGFANRNFMQLIHDDSLTFKEDIQKAQVSGQGDSLHEHIANLAGSPAIKKGILQTVKVVDELVKVMGRHKPENIVIEMARENQTTQKGQKNSRERMKRIEEGIKELGSQILKEHPVENTQLQNEKLYLYYLQNGRDMYVDQELDINRLSDYDVDHIVPQSFLKDDSIDNKVLTRSDKARGKSDNVPSEEVVKKMKNYWRQLLNAKLITQRKFDNLTKAERGGLSELDKAGFIKRQLVETRQITKHVAQILDSRMNTKYDENDKLIREVKVITLKSKLVSDFRKDFQFYKVREINNYHHAHDAYLNAVVGTALIKKYPKLESEFVYGDYKVYDVRKMIAKSEQEIGKATAKYFFYSNIMNFFKTEITLANGEIRKRPLIETNGETGEIVWDKGRDFATVRKVLSMPQVNIVKKTEVQTGGFSKESILPKRNSDKLIARKKDWDPKKYGGFDSPTVAYSVLVVAKVEKGKSKKLKSVKELLGITIMERSSFEKNPIDFLEAKGYKEVKKDLIIKLPKYSLFELENGRKRMLASAGELQKGNELALPSKYVNFLYLASHYEKLKGSPEDNEQKQLFVEQHKHYLDEIIEQISEFSKRVILADANLDKVLSAYNKHRDKPIREQAENIIHLFTLTNLGAPAAFKYFDTTIDRKRYTSTKEVLDATLIHQSITGLYETRIDLSQLGGDGGEAAAKGGSGSSGGMDPLQLLQPLEAEIKGTKLKAHWNSGATITCVPQAFLEEEVPIKNIWIKTIHGEKEQPVYYLTFKIQGRKVEAEVISSPYDYILVSPSDIPWLMKKPLQLTTLVPLQEYEERLLKQTMLTGSYKEKLQSLFLKYDALWQHWENQVGHRRIKPHHIATGTVNPRPQKQYPINPKAKASIQTVINDLLKQGVLIQQNSIMNTPVYPVPKPDGKWRMVLDYREVNKTIPLIAAQNQHSAGILSSIFRGKYKTTLDLSNGFWAHSITPESYWLTAFTWLGQQYCWTRLPQGFLNSPALFNADVVDLLKEVPNVQVYVDDIYISHDDPREHLEQLEKVFSLLLNAGYVVSLKKSEIAQHEVEFLGFNITKEGRGLTETFKQKLLNITPPRDLKQLQSILGKLNFARNFIPNFSELVKPLYNIIATAPGKYITWTTDNSQQLQNIISMLNSAENLEERNPEVRLIMKVNTSPSAGYIRFYNEFAKRPIMYLNYVYTKAEVKFTNTEKLLTTIHKGLIKALDLGMGQEILVYSPIVSMTKIQKTPLPERKALPIRWITWMSYLEDPRIQFHYDKTLPELQQVPTVTDDIIAKIKHPSEFSMVFYTDGSAIKHPNVNKSHNAGMGIAQVQFKPEFTVINTWSIPLGDHTAQLAEVAAVEFACKKALKIDGPVLIVTDSFYVAESVNKELPYWQSNGFFNNKKKPLKHVSKWKSIADCIQLKPDIIIIHEKGHQPTASTFHTEGNNLADKLATQGSYVVNAGKRTADGSEFEKRTADGSEFESPKKKAKVE

SEQ ID NO: 666 - protein, 2174 aa, synthetic construct
MPAAKRVKLDGGDKKYSIGLDIGTNSVGWAVITDEYKVPSKKFKVLGNTDRHSIKKNLIGALLFDSGETAEATRLKRTARRRYTRRKNRICYLQEIFSNEMAKVDDSFFHRLEESFLVEEDKKHERHPIFGNIVDEVAYHEKYPTIYHLRKKLVDSTDKADLRLIYLALAHMIKFRGHFLIEGDLNPDNSDVDKLFIQLVQTYNQLFEENPINASGVDAKAILSARLSKSRRLENLIAQLPGEKKNGLFGNLIALSLGLTPNFKSNFDLAEDAKLQLSKDTYDDDLDNLLAQIGDQYADLFLAAKNLSDAILLSDILRVNTEITKAPLSASMIKRYDEHHQDLTLLKALVRQQLPEKYKEIFFDQSKNGYAGYIDGGASQEEFYKFIKPILEKMDGTEELLVKLNREDLLRKQRTFDNGSIPHQIHLGELHAILRRQEDFYPFLKDNREKIEKILTFRIPYYVGPLARGNSRFAWMTRKSEETITPWNFEEVVDKGASAQSFIERMTNFDKNLPNEKVLPKHSLLYEYFTVYNELTKVKYVTEGMRKPAFLSGEQKKAIVDLLFKTNRKVTVKQLKEDYFKKIECFDSVEISGVEDRFNASLGTYHDLLKIIKDKDFLDNEENEDILEDIVLTLTLFEDREMIEERLKTYAHLFDDKVMKQLKRRRYTGWGRLSRKLINGIRDKQSGKTILDFLKSDGFANRNFMQLIHDDSLTFKEDIQKAQVSGQGDSLHEHIANLAGSPAIKKGILQTVKVVDELVKVMGRHKPENIVIEMARENQTTQKGQKNSRERMKRIEEGIKELGSQILKEHPVENTQLQNEKLYLYYLQNGRDMYVDQELDINRLSDYDVDHIVPQSFLKDDSIDNKVLTRSDKARGKSDNVPSEEVVKKMKNYWRQLLNAKLITQRKFDNLTKAERGGLSELDKAGFIKRQLVETRQITKHVAQILDSRMNTKYDENDKLIREVKVITLKSKLVSDFRKDFQFYKVREINNYHHAHDAYLNAVVGTALIKKYPKLESEFVYGDYKVYDVRKMIAKSEQEIGKATAKYFFYSNIMNFFKTEITLANGEIRKRPLIETNGETGEIVWDKGRDFATVRKVLSMPQVNIVKKTEVQTGGFSKESILPKRNSDKLIARKKDWDPKKYGGFDSPTVAYSVLVVAKVEKGKSKKLKSVKELLGITIMERSSFEKNPIDFLEAKGYKEVKKDLIIKLPKYSLFELENGRKRMLASAGELQKGNELALPSKYVNFLYLASHYEKLKGSPEDNEQKQLFVEQHKHYLDEIIEQISEFSKRVILADANLDKVLSAYNKHRDKPIREQAENIIHLFTLTNLGAPAAFKYFDTTIDRKRYTSTKEVLDATLIHQSITGLYETRIDLSQLGGDGGPAPAPAPAPGGMDPLQLLQPLEAEIKGTKLKAHWNSGATITCVPQAFLEEEVPIKNIWIKTIHGEKEQPVYYLTFKIQGRKVEAEVISSPYDYILVSPSDIPWLMKKPLQLTTLVPLQEYEERLLKQTMLTGSYKEKLQSLFLKYDALWQHWENQVGHRRIKPHHIATGTVNPRPQKQYPINPKAKASIQTVINDLLKQGVLIQQNSIMNTPVYPVPKPDGKWRMVLDYREVNKTIPLIAAQNQHSAGILSSIFRGKYKTTLDLSNGFWAHSITPESYWLTAFTWLGQQYCWTRLPQGFLNSPALFNADVVDLLKEVPNVQVYVDDIYISHDDPREHLEQLEKVFSLLLNAGYVVSLKKSEIAQHEVEFLGFNITKEGRGLTETFKQKLLNITPPRDLKQLQSILGKLNFARNFIPNFSELVKPLYNIIATAPGKYITWTTDNSQQLQNIISMLNSAENLEERNPEVRLIMKVNTSPSAGYIRFYNEFAKRPIMYLNYVYTKAEVKFTNTEKLLTTIHKGLIKALDLGMGQEILVYSPIVSMTKIQKTPLPERKALPIRWITWMSYLEDPRIQFHYDKTLPELQQVPTVTDDIIAKIKHPSEFSMVFYTDGSAIKHPNVNKSHNAGMGIAQVQFKPEFTVINTWSIPLGDHTAQLAEVAAVEFACKKALKIDGPVLIVTDSFYVAESVNKELPYWQSNGFFNNKKKPLKHVSKWKSIADCIQLKPDIIIIHEKGHQPTASTFHTEGNNLADKLATQGSYVVNAGKRTADGSEFEKRTADGSEFESPKKKAKVE

SEQ ID NO: 667 - protein, 2176 aa, synthetic construct
MPAAKRVKLDGGDKKYSIGLDIGTNSVGWAVITDEYKVPSKKFKVLGNTDRHSIKKNLIGALLFDSGETAEATRLKRTARRRYTRRKNRICYLQEIFSNEMAKVDDSFFHRLEESFLVEEDKKHERHPIFGNIVDEVAYHEKYPTIYHLRKKLVDSTDKADLRLIYLALAHMIKFRGHFLIEGDLNPDNSDVDKLFIQLVQTYNQLFEENPINASGVDAKAILSARLSKSRRLENLIAQLPGEKKNGLFGNLIALSLGLTPNFKSNFDLAEDAKLQLSKDTYDDDLDNLLAQIGDQYADLFLAAKNLSDAILLSDILRVNTEITKAPLSASMIKRYDEHHQDLTLLKALVRQQLPEKYKEIFFDQSKNGYAGYIDGGASQEEFYKFIKPILEKMDGTEELLVKLNREDLLRKQRTFDNGSIPHQIHLGELHAILRRQEDFYPFLKDNREKIEKILTFRIPYYVGPLARGNSRFAWMTRKSEETITPWNFEEVVDKGASAQSFIERMTNFDKNLPNEKVLPKHSLLYEYFTVYNELTKVKYVTEGMRKPAFLSGEQKKAIVDLLFKTNRKVTVKQLKEDYFKKIECFDSVEISGVEDRFNASLGTYHDLLKIIKDKDFLDNEENEDILEDIVLTLTLFEDREMIEERLKTYAHLFDDKVMKQLKRRRYTGWGRLSRKLINGIRDKQSGKTILDFLKSDGFANRNFMQLIHDDSLTFKEDIQKAQVSGQGDSLHEHIANLAGSPAIKKGILQTVKVVDELVKVMGRHKPENIVIEMARENQTTQKGQKNSRERMKRIEEGIKELGSQILKEHPVENTQLQNEKLYLYYLQNGRDMYVDQELDINRLSDYDVDHIVPQSFLKDDSIDNKVLTRSDKARGKSDNVPSEEVVKKMKNYWRQLLNAKLITQRKFDNLTKAERGGLSELDKAGFIKRQLVETRQITKHVAQILDSRMNTKYDENDKLIREVKVITLKSKLVSDFRKDFQFYKVREINNYHHAHDAYLNAVVGTALIKKYPKLESEFVYGDYKVYDVRKMIAKSEQEIGKATAKYFFYSNIMNFFKTEITLANGEIRKRPLIETNGETGEIVWDKGRDFATVRKVLSMPQVNIVKKTEVQTGGFSKESILPKRNSDKLIARKKDWDPKKYGGFDSPTVAYSVLVVAKVEKGKSKKLKSVKELLGITIMERSSFEKNPIDFLEAKGYKEVKKDLIIKLPKYSLFELENGRKRMLASAGELQKGNELALPSKYVNFLYLASHYEKLKGSPEDNEQKQLFVEQHKHYLDEIIEQISEFSKRVILADANLDKVLSAYNKHRDKPIREQAENIIHLFTLTNLGAPAAFKYFDTTIDRKRYTSTKEVLDATLIHQSITGLYETRIDLSQLGGDGGGSSGGGEAAAKGGMDPLQLLQPLEAEIKGTKLKAHWNSGATITCVPQAFLEEEVPIKNIWIKTIHGEKEQPVYYLTFKIQGRKVEAEVISSPYDYILVSPSDIPWLMKKPLQLTTLVPLQEYEERLLKQTMLTGSYKEKLQSLFLKYDALWQHWENQVGHRRIKPHHIATGTVNPRPQKQYPINPKAKASIQTVINDLLKQGVLIQQNSIMNTPVYPVPKPDGKWRMVLDYREVNKTIPLIAAQNQHSAGILSSIFRGKYKTTLDLSNGFWAHSITPESYWLTAFTWLGQQYCWTRLPQGFLNSPALFNADVVDLLKEVPNVQVYVDDIYISHDDPREHLEQLEKVFSLLLNAGYVVSLKKSEIAQHEVEFLGFNITKEGRGLTETFKQKLLNITPPRDLKQLQSILGKLNFARNFIPNFSELVKPLYNIIATAPGKYITWTTDNSQQLQNIISMLNSAENLEERNPEVRLIMKVNTSPSAGYIRFYNEFAKRPIMYLNYVYTKAEVKFTNTEKLLTTIHKGLIKALDLGMGQEILVYSPIVSMTKIQKTPLPERKALPIRWITWMSYLEDPRIQFHYDKTLPELQQVPTVTDDIIAKIKHPSEFSMVFYTDGSAIKHPNVNKSHNAGMGIAQVQFKPEFTVINTWSIPLGDHTAQLAEVAAVEFACKKALKIDGPVLIVTDSFYVAESVNKELPYWQSNGFFNNKKKPLKHVSKWKSIADCIQLKPDIIIIHEKGHQPTASTFHTEGNNLADKLATQGSYVVNAGKRTADGSEFEKRTADGSEFESPKKKAKVE

SEQ ID NO: 668 - protein, 2176 aa, synthetic construct
MPAAKRVKLDGGDKKYSIGLDIGTNSVGWAVITDEYKVPSKKFKVLGNTDRHSIKKNLIGALLFDSGETAEATRLKRTARRRYTRRKNRICYLQEIFSNEMAKVDDSFFHRLEESFLVEEDKKHERHPIFGNIVDEVAYHEKYPTIYHLRKKLVDSTDKADLRLIYLALAHMIKFRGHFLIEGDLNPDNSDVDKLFIQLVQTYNQLFEENPINASGVDAKAILSARLSKSRRLENLIAQLPGEKKNGLFGNLIALSLGLTPNFKSNFDLAEDAKLQLSKDTYDDDLDNLLAQIGDQYADLFLAAKNLSDAILLSDILRVNTEITKAPLSASMIKRYDEHHQDLTLLKALVRQQLPEKYKEIFFDQSKNGYAGYIDGGASQEEFYKFIKPILEKMDGTEELLVKLNREDLLRKQRTFDNGSIPHQIHLGELHAILRRQEDFYPFLKDNREKIEKILTFRIPYYVGPLARGNSRFAWMTRKSEETITPWNFEEVVDKGASAQSFIERMTNFDKNLPNEKVLPKHSLLYEYFTVYNELTKVKYVTEGMRKPAFLSGEQKKAIVDLLFKTNRKVTVKQLKEDYFKKIECFDSVEISGVEDRFNASLGTYHDLLKIIKDKDFLDNEENEDILEDIVLTLTLFEDREMIEERLKTYAHLFDDKVMKQLKRRRYTGWGRLSRKLINGIRDKQSGKTILDFLKSDGFANRNFMQLIHDDSLTFKEDIQKAQVSGQGDSLHEHIANLAGSPAIKKGILQTVKVVDELVKVMGRHKPENIVIEMARENQTTQKGQKNSRERMKRIEEGIKELGSQILKEHPVENTQLQNEKLYLYYLQNGRDMYVDQELDINRLSDYDVDHIVPQSFLKDDSIDNKVLTRSDKARGKSDNVPSEEVVKKMKNYWRQLLNAKLITQRKFDNLTKAERGGLSELDKAGFIKRQLVETRQITKHVAQILDSRMNTKYDENDKLIREVKVITLKSKLVSDFRKDFQFYKVREINNYHHAHDAYLNAVVGTALIKKYPKLESEFVYGDYKVYDVRKMIAKSEQEIGKATAKYFFYSNIMNFFKTEITLANGEIRKRPLIETNGETGEIVWDKGRDFATVRKVLSMPQVNIVKKTEVQTGGFSKESILPKRNSDKLIARKKDWDPKKYGGFDSPTVAYSVLVVAKVEKGKSKKLKSVKELLGITIMERSSFEKNPIDFLEAKGYKEVKKDLIIKLPKYSLFELENGRKRMLASAGELQKGNELALPSKYVNFLYLASHYEKLKGSPEDNEQKQLFVEQHKHYLDEIIEQISEFSKRVILADANLDKVLSAYNKHRDKPIREQAENIIHLFTLTNLGAPAAFKYFDTTIDRKRYTSTKEVLDATLIHQSITGLYETRIDLSQLGGDGGGGSEAAAKPAPGGMDPLQLLQPLEAEIKGTKLKAHWNSGATITCVPQAFLEEEVPIKNIWIKTIHGEKEQPVYYLTFKIQGRKVEAEVISSPYDYILVSPSDIPWLMKKPLQLTTLVPLQEYEERLLKQTMLTGSYKEKLQSLFLKYDALWQHWENQVGHRRIKPHHIATGTVNPRPQKQYPINPKAKASIQTVINDLLKQGVLIQQNSIMNTPVYPVPKPDGKWRMVLDYREVNKTIPLIAAQNQHSAGILSSIFRGKYKTTLDLSNGFWAHSITPESYWLTAFTWLGQQYCWTRLPQGFLNSPALFNADVVDLLKEVPNVQVYVDDIYISHDDPREHLEQLEKVFSLLLNAGYVVSLKKSEIAQHEVEFLGFNITKEGRGLTETFKQKLLNITPPRDLKQLQSILGKLNFARNFIPNFSELVKPLYNIIATAPGKYITWTTDNSQQLQNIISMLNSAENLEERNPEVRLIMKVNTSPSAGYIRFYNEFAKRPIMYLNYVYTKAEVKFTNTEKLLTTIHKGLIKALDLGMGQEILVYSPIVSMTKIQKTPLPERKALPIRWITWMSYLEDPRIQFHYDKTLPELQQVPTVTDDIIAKIKHPSEFSMVFYTDGSAIKHPNVNKSHNAGMGIAQVQFKPEFTVINTWSIPLGDHTAQLAEVAAVEFACKKALKIDGPVLIVTDSFYVAESVNKELPYWQSNGFFNNKKKPLKHVSKWKSIADCIQLKPDIIIIHEKGHQPTASTFHTEGNNLADKLATQGSYVVNAGKRTADGSEFEKRTADGSEFESPKKKAKVE

SEQ ID NO: 669 - protein, 2174 aa, synthetic construct
MPAAKRVKLDGGDKKYSIGLDIGTNSVGWAVITDEYKVPSKKFKVLGNTDRHSIKKNLIGALLFDSGETAEATRLKRTARRRYTRRKNRICYLQEIFSNEMAKVDDSFFHRLEESFLVEEDKKHERHPIFGNIVDEVAYHEKYPTIYHLRKKLVDSTDKADLRLIYLALAHMIKFRGHFLIEGDLNPDNSDVDKLFIQLVQTYNQLFEENPINASGVDAKAILSARLSKSRRLENLIAQLPGEKKNGLFGNLIALSLGLTPNFKSNFDLAEDAKLQLSKDTYDDDLDNLLAQIGDQYADLFLAAKNLSDAILLSDILRVNTEITKAPLSASMIKRYDEHHQDLTLLKALVRQQLPEKYKEIFFDQSKNGYAGYIDGGASQEEFYKFIKPILEKMDGTEELLVKLNREDLLRKQRTFDNGSIPHQIHLGELHAILRRQEDFYPFLKDNREKIEKILTFRIPYYVGPLARGNSRFAWMTRKSEETITPWNFEEVVDKGASAQSFIERMTNFDKNLPNEKVLPKHSLLYEYFTVYNELTKVKYVTEGMRKPAFLSGEQKKAIVDLLFKTNRKVTVKQLKEDYFKKIECFDSVEISGVEDRFNASLGTYHDLLKIIKDKDFLDNEENEDILEDIVLTLTLFEDREMIEERLKTYAHLFDDKVMKQLKRRRYTGWGRLSRKLINGIRDKQSGKTILDFLKSDGFANRNFMQLIHDDSLTFKEDIQKAQVSGQGDSLHEHIANLAGSPAIKKGILQTVKVVDELVKVMGRHKPENIVIEMARENQTTQKGQKNSRERMKRIEEGIKELGSQILKEHPVENTQLQNEKLYLYYLQNGRDMYVDQELDINRLSDYDVDHIVPQSFLKDDSIDNKVLTRSDKARGKSDNVPSEEVVKKMKNYWRQLLNAKLITQRKFDNLTKAERGGLSELDKAGFIKRQLVETRQITKHVAQILDSRMNTKYDENDKLIREVKVITLKSKLVSDFRKDFQFYKVREINNYHHAHDAYLNAVVGTALIKKYPKLESEFVYGDYKVYDVRKMIAKSEQEIGKATAKYFFYSNIMNFFKTEITLANGEIRKRPLIETNGETGEIVWDKGRDFATVRKVLSMPQVNIVKKTEVQTGGFSKESILPKRNSDKLIARKKDWDPKKYGGFDSPTVAYSVLVVAKVEKGKSKKLKSVKELLGITIMERSSFEKNPIDFLEAKGYKEVKKDLIIKLPKYSLFELENGRKRMLASAGELQKGNELALPSKYVNFLYLASHYEKLKGSPEDNEQKQLFVEQHKHYLDEIIEQISEFSKRVILADANLDKVLSAYNKHRDKPIREQAENIIHLFTLTNLGAPAAFKYFDTTIDRKRYTSTKEVLDATLIHQSITGLYETRIDLSQLGGDGGGGGGSSPAPGGMDPLQLLQPLEAEIKGTKLKAHWNSGATITCVPQAFLEEEVPIKNIWIKTIHGEKEQPVYYLTFKIQGRKVEAEVISSPYDYILVSPSDIPWLMKKPLQLTTLVPLQEYEERLLKQTMLTGSYKEKLQSLFLKYDALWQHWENQVGHRRIKPHHIATGTVNPRPQKQYPINPKAKASIQTVINDLLKQGVLIQQNSIMNTPVYPVPKPDGKWRMVLDYREVNKTIPLIAAQNQHSAGILSSIFRGKYKTTLDLSNGFWAHSITPESYWLTAFTWLGQQYCWTRLPQGFLNSPALFNADVVDLLKEVPNVQVYVDDIYISHDDPREHLEQLEKVFSLLLNAGYVVSLKKSEIAQHEVEFLGFNITKEGRGLTETFKQKLLNITPPRDLKQLQSILGKLNFARNFIPNFSELVKPLYNIIATAPGKYITWTTDNSQQLQNIISMLNSAENLEERNPEVRLIMKVNTSPSAGYIRFYNEFAKRPIMYLNYVYTKAEVKFTNTEKLLTTIHKGLIKALDLGMGQEILVYSPIVSMTKIQKTPLPERKALPIRWITWMSYLEDPRIQFHYDKTLPELQQVPTVTDDIIAKIKHPSEFSMVFYTDGSAIKHPNVNKSHNAGMGIAQVQFKPEFTVINTWSIPLGDHTAQLAEVAAVEFACKKALKIDGPVLIVTDSFYVAESVNKELPYWQSNGFFNNKKKPLKHVSKWKSIADCIQLKPDIIIIHEKGHQPTASTFHTEGNNLADKLATQGSYVVNAGKRTADGSEFEKRTADGSEFESPKKKAKVE

SEQ ID NO: 670 - protein, 2176 aa, synthetic construct
MPAAKRVKLDGGDKKYSIGLDIGTNSVGWAVITDEYKVPSKKFKVLGNTDRHSIKKNLIGALLFDSGETAEATRLKRTARRRYTRRKNRICYLQEIFSNEMAKVDDSFFHRLEESFLVEEDKKHERHPIFGNIVDEVAYHEKYPTIYHLRKKLVDSTDKADLRLIYLALAHMIKFRGHFLIEGDLNPDNSDVDKLFIQLVQTYNQLFEENPINASGVDAKAILSARLSKSRRLENLIAQLPGEKKNGLFGNLIALSLGLTPNFKSNFDLAEDAKLQLSKDTYDDDLDNLLAQIGDQYADLFLAAKNLSDAILLSDILRVNTEITKAPLSASMIKRYDEHHQDLTLLKALVRQQLPEKYKEIFFDQSKNGYAGYIDGGASQEEFYKFIKPILEKMDGTEELLVKLNREDLLRKQRTFDNGSIPHQIHLGELHAILRRQEDFYPFLKDNREKIEKILTFRIPYYVGPLARGNSRFAWMTRKSEETITPWNFEEVVDKGASAQSFIERMTNFDKNLPNEKVLPKHSLLYEYFTVYNELTKVKYVTEGMRKPAFLSGEQKKAIVDLLFKTNRKVTVKQLKEDYFKKIECFDSVEISGVEDRFNASLGTYHDLLKIIKDKDFLDNEENEDILEDIVLTLTLFEDREMIEERLKTYAHLFDDKVMKQLKRRRYTGWGRLSRKLINGIRDKQSGKTILDFLKSDGFANRNFMQLIHDDSLTFKEDIQKAQVSGQGDSLHEHIANLAGSPAIKKGILQTVKVVDELVKVMGRHKPENIVIEMARENQTTQKGQKNSRERMKRIEEGIKELGSQILKEHPVENTQLQNEKLYLYYLQNGRDMYVDQELDINRLSDYDVDHIVPQSFLKDDSIDNKVLTRSDKARGKSDNVPSEEVVKKMKNYWRQLLNAKLITQRKFDNLTKAERGGLSELDKAGFIKRQLVETRQITKHVAQILDSRMNTKYDENDKLIREVKVITLKSKLVSDFRKDFQFYKVREINNYHHAHDAYLNAVVGTALIKKYPKLESEFVYGDYKVYDVRKMIAKSEQEIGKATAKYFFYSNIMNFFKTEITLANGEIRKRPLIETNGETGEIVWDKGRDFATVRKVLSMPQVNIVKKTEVQTGGFSKESILPKRNSDKLIARKKDWDPKKYGGFDSPTVAYSVLVVAKVEKGKSKKLKSVKELLGITIMERSSFEKNPIDFLEAKGYKEVKKDLIIKLPKYSLFELENGRKRMLASAGELQKGNELALPSKYVNFLYLASHYEKLKGSPEDNEQKQLFVEQHKHYLDEIIEQISEFSKRVILADANLDKVLSAYNKHRDKPIREQAENIIHLFTLTNLGAPAAFKYFDTTIDRKRYTSTKEVLDATLIHQSITGLYETRIDLSQLGGDGGGSSGGSEAAAKGGMDPLQLLQPLEAEIKGTKLKAHWNSGATITCVPQAFLEEEVPIKNIWIKTIHGEKEQPVYYLTFKIQGRKVEAEVISSPYDYILVSPSDIPWLMKKPLQLTTLVPLQEYEERLLKQTMLTGSYKEKLQSLFLKYDALWQHWENQVGHRRIKPHHIATGTVNPRPQKQYPINPKAKASIQTVINDLLKQGVLIQQNSIMNTPVYPVPKPDGKWRMVLDYREVNKTIPLIAAQNQHSAGILSSIFRGKYKTTLDLSNGFWAHSITPESYWLTAFTWLGQQYCWTRLPQGFLNSPALFNADVVDLLKEVPNVQVYVDDIYISHDDPREHLEQLEKVFSLLLNAGYVVSLKKSEIAQHEVEFLGFNITKEGRGLTETFKQKLLNITPPRDLKQLQSILGKLNFARNFIPNFSELVKPLYNIIATAPGKYITWTTDNSQQLQNIISMLNSAENLEERNPEVRLIMKVNTSPSAGYIRFYNEFAKRPIMYLNYVYTKAEVKFTNTEKLLTTIHKGLIKALDLGMGQEILVYSPIVSMTKIQKTPLPERKALPIRWITWMSYLEDPRIQFHYDKTLPELQQVPTVTDDIIAKIKHPSEFSMVFYTDGSAIKHPNVNKSHNAGMGIAQVQFKPEFTVINTWSIPLGDHTAQLAEVAAVEFACKKALKIDGPVLIVTDSFYVAESVNKELPYWQSNGFFNNKKKPLKHVSKWKSIADCIQLKPDIIIIHEKGHQPTASTFHTEGNNLADKLATQGSYVVNAGKRTADGSEFEKRTADGSEFESPKKKAKVE

SEQ ID NO: 671 - protein, 2176 aa, synthetic construct
MPAAKRVKLDGGDKKYSIGLDIGTNSVGWAVITDEYKVPSKKFKVLGNTDRHSIKKNLIGALLFDSGETAEATRLKRTARRRYTRRKNRICYLQEIFSNEMAKVDDSFFHRLEESFLVEEDKKHERHPIFGNIVDEVAYHEKYPTIYHLRKKLVDSTDKADLRLIYLALAHMIKFRGHFLIEGDLNPDNSDVDKLFIQLVQTYNQLFEENPINASGVDAKAILSARLSKSRRLENLIAQLPGEKKNGLFGNLIALSLGLTPNFKSNFDLAEDAKLQLSKDTYDDDLDNLLAQIGDQYADLFLAAKNLSDAILLSDILRVNTEITKAPLSASMIKRYDEHHQDLTLLKALVRQQLPEKYKEIFFDQSKNGYAGYIDGGASQEEFYKFIKPILEKMDGTEELLVKLNREDLLRKQRTFDNGSIPHQIHLGELHAILRRQEDFYPFLKDNREKIEKILTFRIPYYVGPLARGNSRFAWMTRKSEETITPWNFEEVVDKGASAQSFIERMTNFDKNLPNEKVLPKHSLLYEYFTVYNELTKVKYVTEGMRKPAFLSGEQKKAIVDLLFKTNRKVTVKQLKEDYFKKIECFDSVEISGVEDRFNASLGTYHDLLKIIKDKDFLDNEENEDILEDIVLTLTLFEDREMIEERLKTYAHLFDDKVMKQLKRRRYTGWGRLSRKLINGIRDKQSGKTILDFLKSDGFANRNFMQLIHDDSLTFKEDIQKAQVSGQGDSLHEHIANLAGSPAIKKGILQTVKVVDELVKVMGRHKPENIVIEMARENQTTQKGQKNSRERMKRIEEGIKELGSQILKEHPVENTQLQNEKLYLYYLQNGRDMYVDQELDINRLSDYDVDHIVPQSFLKDDSIDNKVLTRSDKARGKSDNVPSEEVVKKMKNYWRQLLNAKLITQRKFDNLTKAERGGLSELDKAGFIKRQLVETRQITKHVAQILDSRMNTKYDENDKLIREVKVITLKSKLVSDFRKDFQFYKVREINNYHHAHDAYLNAVVGTALIKKYPKLESEFVYGDYKVYDVRKMIAKSEQEIGKATAKYFFYSNIMNFFKTEITLANGEIRKRPLIETNGETGEIVWDKGRDFATVRKVLSMPQVNIVKKTEVQTGGFSKESILPKRNSDKLIARKKDWDPKKYGGFDSPTVAYSVLVVAKVEKGKSKKLKSVKELLGITIMERSSFEKNPIDFLEAKGYKEVKKDLIIKLPKYSLFELENGRKRMLASAGELQKGNELALPSKYVNFLYLASHYEKLKGSPEDNEQKQLFVEQHKHYLDEIIEQISEFSKRVILADANLDKVLSAYNKHRDKPIREQAENIIHLFTLTNLGAPAAFKYFDTTIDRKRYTSTKEVLDATLIHQSITGLYETRIDLSQLGGDGGEAAAKGSSGGGGGMDPLQLLQPLEAEIKGTKLKAHWNSGATITCVPQAFLEEEVPIKNIWIKTIHGEKEQPVYYLTFKIQGRKVEAEVISSPYDYILVSPSDIPWLMKKPLQLTTLVPLQEYEERLLKQTMLTGSYKEKLQSLFLKYDALWQHWENQVGHRRIKPHHIATGTVNPRPQKQYPINPKAKASIQTVINDLLKQGVLIQQNSIMNTPVYPVPKPDGKWRMVLDYREVNKTIPLIAAQNQHSAGILSSIFRGKYKTTLDLSNGFWAHSITPESYWLTAFTWLGQQYCWTRLPQGFLNSPALFNADVVDLLKEVPNVQVYVDDIYISHDDPREHLEQLEKVFSLLLNAGYVVSLKKSEIAQHEVEFLGFNITKEGRGLTETFKQKLLNITPPRDLKQLQSILGKLNFARNFIPNFSELVKPLYNIIATAPGKYITWTTDNSQQLQNIISMLNSAENLEERNPEVRLIMKVNTSPSAGYIRFYNEFAKRPIMYLNYVYTKAEVKFTNTEKLLTTIHKGLIKALDLGMGQEILVYSPIVSMTKIQKTPLPERKALPIRWITWMSYLEDPRIQFHYDKTLPELQQVPTVTDDIIAKIKHPSEFSMVFYTDGSAIKHPNVNKSHNAGMGIAQVQFKPEFTVINTWSIPLGDHTAQLAEVAAVEFACKKALKIDGPVLIVTDSFYVAESVNKELPYWQSNGFFNNKKKPLKHVSKWKSIADCIQLKPDIIIIHEKGHQPTASTFHTEGNNLADKLATQGSYVVNAGKRTADGSEFEKRTADGSEFESPKKKAKVE

SEQ ID NO: 672 - protein, 2171 aa, synthetic construct
MPAAKRVKLDGGDKKYSIGLDIGTNSVGWAVITDEYKVPSKKFKVLGNTDRHSIKKNLIGALLFDSGETAEATRLKRTARRRYTRRKNRICYLQEIFSNEMAKVDDSFFHRLEESFLVEEDKKHERHPIFGNIVDEVAYHEKYPTIYHLRKKLVDSTDKADLRLIYLALAHMIKFRGHFLIEGDLNPDNSDVDKLFIQLVQTYNQLFEENPINASGVDAKAILSARLSKSRRLENLIAQLPGEKKNGLFGNLIALSLGLTPNFKSNFDLAEDAKLQLSKDTYDDDLDNLLAQIGDQYADLFLAAKNLSDAILLSDILRVNTEITKAPLSASMIKRYDEHHQDLTLLKALVRQQLPEKYKEIFFDQSKNGYAGYIDGGASQEEFYKFIKPILEKMDGTEELLVKLNREDLLRKQRTFDNGSIPHQIHLGELHAILRRQEDFYPFLKDNREKIEKILTFRIPYYVGPLARGNSRFAWMTRKSEETITPWNFEEVVDKGASAQSFIERMTNFDKNLPNEKVLPKHSLLYEYFTVYNELTKVKYVTEGMRKPAFLSGEQKKAIVDLLFKTNRKVTVKQLKEDYFKKIECFDSVEISGVEDRFNASLGTYHDLLKIIKDKDFLDNEENEDILEDIVLTLTLFEDREMIEERLKTYAHLFDDKVMKQLKRRRYTGWGRLSRKLINGIRDKQSGKTILDFLKSDGFANRNFMQLIHDDSLTFKEDIQKAQVSGQGDSLHEHIANLAGSPAIKKGILQTVKVVDELVKVMGRHKPENIVIEMARENQTTQKGQKNSRERMKRIEEGIKELGSQILKEHPVENTQLQNEKLYLYYLQNGRDMYVDQELDINRLSDYDVDHIVPQSFLKDDSIDNKVLTRSDKARGKSDNVPSEEVVKKMKNYWRQLLNAKLITQRKFDNLTKAERGGLSELDKAGFIKRQLVETRQITKHVAQILDSRMNTKYDENDKLIREVKVITLKSKLVSDFRKDFQFYKVREINNYHHAHDAYLNAVVGTALIKKYPKLESEFVYGDYKVYDVRKMIAKSEQEIGKATAKYFFYSNIMNFFKTEITLANGEIRKRPLIETNGETGEIVWDKGRDFATVRKVLSMPQVNIVKKTEVQTGGFSKESILPKRNSDKLIARKKDWDPKKYGGFDSPTVAYSVLVVAKVEKGKSKKLKSVKELLGITIMERSSFEKNPIDFLEAKGYKEVKKDLIIKLPKYSLFELENGRKRMLASAGELQKGNELALPSKYVNFLYLASHYEKLKGSPEDNEQKQLFVEQHKHYLDEIIEQISEFSKRVILADANLDKVLSAYNKHRDKPIREQAENIIHLFTLTNLGAPAAFKYFDTTIDRKRYTSTKEVLDATLIHQSITGLYETRIDLSQLGGDGGGGSPAPGGMDPLQLLQPLEAEIKGTKLKAHWNSGATITCVPQAFLEEEVPIKNIWIKTIHGEKEQPVYYLTFKIQGRKVEAEVISSPYDYILVSPSDIPWLMKKPLQLTTLVPLQEYEERLLKQTMLTGSYKEKLQSLFLKYDALWQHWENQVGHRRIKPHHIATGTVNPRPQKQYPINPKAKASIQTVINDLLKQGVLIQQNSIMNTPVYPVPKPDGKWRMVLDYREVNKTIPLIAAQNQHSAGILSSIFRGKYKTTLDLSNGFWAHSITPESYWLTAFTWLGQQYCWTRLPQGFLNSPALFNADVVDLLKEVPNVQVYVDDIYISHDDPREHLEQLEKVFSLLLNAGYVVSLKKSEIAQHEVEFLGFNITKEGRGLTETFKQKLLNITPPRDLKQLQSILGKLNFARNFIPNFSELVKPLYNIIATAPGKYITWTTDNSQQLQNIISMLNSAENLEERNPEVRLIMKVNTSPSAGYIRFYNEFAKRPIMYLNYVYTKAEVKFTNTEKLLTTIHKGLIKALDLGMGQEILVYSPIVSMTKIQKTPLPERKALPIRWITWMSYLEDPRIQFHYDKTLPELQQVPTVTDDIIAKIKHPSEFSMVFYTDGSAIKHPNVNKSHNAGMGIAQVQFKPEFTVINTWSIPLGDHTAQLAEVAAVEFACKKALKIDGPVLIVTDSFYVAESVNKELPYWQSNGFFNNKKKPLKHVSKWKSIADCIQLKPDIIIIHEKGHQPTASTFHTEGNNLADKLATQGSYVVNAGKRTADGSEFEKRTADGSEFESPKKKAKVE

SEQ ID NO: 673 - protein, 2185 aa, synthetic construct
MPAAKRVKLDGGDKKYSIGLDIGTNSVGWAVITDEYKVPSKKFKVLGNTDRHSIKKNLIGALLFDSGETAEATRLKRTARRRYTRRKNRICYLQEIFSNEMAKVDDSFFHRLEESFLVEEDKKHERHPIFGNIVDEVAYHEKYPTIYHLRKKLVDSTDKADLRLIYLALAHMIKFRGHFLIEGDLNPDNSDVDKLFIQLVQTYNQLFEENPINASGVDAKAILSARLSKSRRLENLIAQLPGEKKNGLFGNLIALSLGLTPNFKSNFDLAEDAKLQLSKDTYDDDLDNLLAQIGDQYADLFLAAKNLSDAILLSDILRVNTEITKAPLSASMIKRYDEHHQDLTLLKALVRQQLPEKYKEIFFDQSKNGYAGYIDGGASQEEFYKFIKPILEKMDGTEELLVKLNREDLLRKQRTFDNGSIPHQIHLGELHAILRRQEDFYPFLKDNREKIEKILTFRIPYYVGPLARGNSRFAWMTRKSEETITPWNFEEVVDKGASAQSFIERMTNFDKNLPNEKVLPKHSLLYEYFTVYNELTKVKYVTEGMRKPAFLSGEQKKAIVDLLFKTNRKVTVKQLKEDYFKKIECFDSVEISGVEDRFNASLGTYHDLLKIIKDKDFLDNEENEDILEDIVLTLTLFEDREMIEERLKTYAHLFDDKVMKQLKRRRYTGWGRLSRKLINGIRDKQSGKTILDFLKSDGFANRNFMQLIHDDSLTFKEDIQKAQVSGQGDSLHEHIANLAGSPAIKKGILQTVKVVDELVKVMGRHKPENIVIEMARENQTTQKGQKNSRERMKRIEEGIKELGSQILKEHPVENTQLQNEKLYLYYLQNGRDMYVDQELDINRLSDYDVDHIVPQSFLKDDSIDNKVLTRSDKARGKSDNVPSEEVVKKMKNYWRQLLNAKLITQRKFDNLTKAERGGLSELDKAGFIKRQLVETRQITKHVAQILDSRMNTKYDENDKLIREVKVITLKSKLVSDFRKDFQFYKVREINNYHHAHDAYLNAVVGTALIKKYPKLESEFVYGDYKVYDVRKMIAKSEQEIGKATAKYFFYSNIMNFFKTEITLANGEIRKRPLIETNGETGEIVWDKGRDFATVRKVLSMPQVNIVKKTEVQTGGFSKESILPKRNSDKLIARKKDWDPKKYGGFDSPTVAYSVLVVAKVEKGKSKKLKSVKELLGITIMERSSFEKNPIDFLEAKGYKEVKKDLIIKLPKYSLFELENGRKRMLASAGELQKGNELALPSKYVNFLYLASHYEKLKGSPEDNEQKQLFVEQHKHYLDEIIEQISEFSKRVILADANLDKVLSAYNKHRDKPIREQAENIIHLFTLTNLGAPAAFKYFDTTIDRKRYTSTKEVLDATLIHQSITGLYETRIDLSQLGGDGGGGGGSGGGGSGGGGSGGGGSGGMDPLQLLQPLEAEIKGTKLKAHWNSGATITCVPQAFLEEEVPIKNIWIKTIHGEKEQPVYYLTFKIQGRKVEAEVISSPYDYILVSPSDIPWLMKKPLQLTTLVPLQEYEERLLKQTMLTGSYKEKLQSLFLKYDALWQHWENQVGHRRIKPHHIATGTVNPRPQKQYPINPKAKASIQTVINDLLKQGVLIQQNSIMNTPVYPVPKPDGKWRMVLDYREVNKTIPLIAAQNQHSAGILSSIFRGKYKTTLDLSNGFWAHSITPESYWLTAFTWLGQQYCWTRLPQGFLNSPALFNADVVDLLKEVPNVQVYVDDIYISHDDPREHLEQLEKVFSLLLNAGYVVSLKKSEIAQHEVEFLGFNITKEGRGLTETFKQKLLNITPPRDLKQLQSILGKLNFARNFIPNFSELVKPLYNIIATAPGKYITWTTDNSQQLQNIISMLNSAENLEERNPEVRLIMKVNTSPSAGYIRFYNEFAKRPIMYLNYVYTKAEVKFTNTEKLLTTIHKGLIKALDLGMGQEILVYSPIVSMTKIQKTPLPERKALPIRWITWMSYLEDPRIQFHYDKTLPELQQVPTVTDDIIAKIKHPSEFSMVFYTDGSAIKHPNVNKSHNAGMGIAQVQFKPEFTVINTWSIPLGDHTAQLAEVAAVEFACKKALKIDGPVLIVTDSFYVAESVNKELPYWQSNGFFNNKKKPLKHVSKWKSIADCIQLKPDIIIIHEKGHQPTASTFHTEGNNLADKLATQGSYVVNAGKRTADGSEFEKRTADGSEFESPKKKAKVE

SEQ ID NO: 674 - protein, 2176 aa, synthetic construct
MPAAKRVKLDGGDKKYSIGLDIGTNSVGWAVITDEYKVPSKKFKVLGNTDRHSIKKNLIGALLFDSGETAEATRLKRTARRRYTRRKNRICYLQEIFSNEMAKVDDSFFHRLEESFLVEEDKKHERHPIFGNIVDEVAYHEKYPTIYHLRKKLVDSTDKADLRLIYLALAHMIKFRGHFLIEGDLNPDNSDVDKLFIQLVQTYNQLFEENPINASGVDAKAILSARLSKSRRLENLIAQLPGEKKNGLFGNLIALSLGLTPNFKSNFDLAEDAKLQLSKDTYDDDLDNLLAQIGDQYADLFLAAKNLSDAILLSDILRVNTEITKAPLSASMIKRYDEHHQDLTLLKALVRQQLPEKYKEIFFDQSKNGYAGYIDGGASQEEFYKFIKPILEKMDGTEELLVKLNREDLLRKQRTFDNGSIPHQIHLGELHAILRRQEDFYPFLKDNREKIEKILTFRIPYYVGPLARGNSRFAWMTRKSEETITPWNFEEVVDKGASAQSFIERMTNFDKNLPNEKVLPKHSLLYEYFTVYNELTKVKYVTEGMRKPAFLSGEQKKAIVDLLFKTNRKVTVKQLKEDYFKKIECFDSVEISGVEDRFNASLGTYHDLLKIIKDKDFLDNEENEDILEDIVLTLTLFEDREMIEERLKTYAHLFDDKVMKQLKRRRYTGWGRLSRKLINGIRDKQSGKTILDFLKSDGFANRNFMQLIHDDSLTFKEDIQKAQVSGQGDSLHEHIANLAGSPAIKKGILQTVKVVDELVKVMGRHKPENIVIEMARENQTTQKGQKNSRERMKRIEEGIKELGSQILKEHPVENTQLQNEKLYLYYLQNGRDMYVDQELDINRLSDYDVDHIVPQSFLKDDSIDNKVLTRSDKARGKSDNVPSEEVVKKMKNYWRQLLNAKLITQRKFDNLTKAERGGLSELDKAGFIKRQLVETRQITKHVAQILDSRMNTKYDENDKLIREVKVITLKSKLVSDFRKDFQFYKVREINNYHHAHDAYLNAVVGTALIKKYPKLESEFVYGDYKVYDVRKMIAKSEQEIGKATAKYFFYSNIMNFFKTEITLANGEIRKRPLIETNGETGEIVWDKGRDFATVRKVLSMPQVNIVKKTEVQTGGFSKESILPKRNSDKLIARKKDWDPKKYGGFDSPTVAYSVLVVAKVEKGKSKKLKSVKELLGITIMERSSFEKNPIDFLEAKGYKEVKKDLIIKLPKYSLFELENGRKRMLASAGELQKGNELALPSKYVNFLYLASHYEKLKGSPEDNEQKQLFVEQHKHYLDEIIEQISEFSKRVILADANLDKVLSAYNKHRDKPIREQAENIIHLFTLTNLGAPAAFKYFDTTIDRKRYTSTKEVLDATLIHQSITGLYETRIDLSQLGGDGGGSSEAAAKGGGGGMDPLQLLQPLEAEIKGTKLKAHWNSGATITCVPQAFLEEEVPIKNIWIKTIHGEKEQPVYYLTFKIQGRKVEAEVISSPYDYILVSPSDIPWLMKKPLQLTTLVPLQEYEERLLKQTMLTGSYKEKLQSLFLKYDALWQHWENQVGHRRIKPHHIATGTVNPRPQKQYPINPKAKASIQTVINDLLKQGVLIQQNSIMNTPVYPVPKPDGKWRMVLDYREVNKTIPLIAAQNQHSAGILSSIFRGKYKTTLDLSNGFWAHSITPESYWLTAFTWLGQQYCWTRLPQGFLNSPALFNADVVDLLKEVPNVQVYVDDIYISHDDPREHLEQLEKVFSLLLNAGYVVSLKKSEIAQHEVEFLGFNITKEGRGLTETFKQKLLNITPPRDLKQLQSILGKLNFARNFIPNFSELVKPLYNIIATAPGKYITWTTDNSQQLQNIISMLNSAENLEERNPEVRLIMKVNTSPSAGYIRFYNEFAKRPIMYLNYVYTKAEVKFTNTEKLLTTIHKGLIKALDLGMGQEILVYSPIVSMTKIQKTPLPERKALPIRWITWMSYLEDPRIQFHYDKTLPELQQVPTVTDDIIAKIKHPSEFSMVFYTDGSAIKHPNVNKSHNAGMGIAQVQFKPEFTVINTWSIPLGDHTAQLAEVAAVEFACKKALKIDGPVLIVTDSFYVAESVNKELPYWQSNGFFNNKKKPLKHVSKWKSIADCIQLKPDIIIIHEKGHQPTASTFHTEGNNLADKLATQGSYVVNAGKRTADGSEFEKRTADGSEFESPKKKAKVE

SEQ ID NO: 675 - protein, 2176 aa, synthetic construct
MPAAKRVKLDGGDKKYSIGLDIGTNSVGWAVITDEYKVPSKKFKVLGNTDRHSIKKNLIGALLFDSGETAEATRLKRTARRRYTRRKNRICYLQEIFSNEMAKVDDSFFHRLEESFLVEEDKKHERHPIFGNIVDEVAYHEKYPTIYHLRKKLVDSTDKADLRLIYLALAHMIKFRGHFLIEGDLNPDNSDVDKLFIQLVQTYNQLFEENPINASGVDAKAILSARLSKSRRLENLIAQLPGEKKNGLFGNLIALSLGLTPNFKSNFDLAEDAKLQLSKDTYDDDLDNLLAQIGDQYADLFLAAKNLSDAILLSDILRVNTEITKAPLSASMIKRYDEHHQDLTLLKALVRQQLPEKYKEIFFDQSKNGYAGYIDGGASQEEFYKFIKPILEKMDGTEELLVKLNREDLLRKQRTFDNGSIPHQIHLGELHAILRRQEDFYPFLKDNREKIEKILTFRIPYYVGPLARGNSRFAWMTRKSEETITPWNFEEVVDKGASAQSFIERMTNFDKNLPNEKVLPKHSLLYEYFTVYNELTKVKYVTEGMRKPAFLSGEQKKAIVDLLFKTNRKVTVKQLKEDYFKKIECFDSVEISGVEDRFNASLGTYHDLLKIIKDKDFLDNEENEDILEDIVLTLTLFEDREMIEERLKTYAHLFDDKVMKQLKRRRYTGWGRLSRKLINGIRDKQSGKTILDFLKSDGFANRNFMQLIHDDSLTFKEDIQKAQVSGQGDSLHEHIANLAGSPAIKKGILQTVKVVDELVKVMGRHKPENIVIEMARENQTTQKGQKNSRERMKRIEEGIKELGSQILKEHPVENTQLQNEKLYLYYLQNGRDMYVDQELDINRLSDYDVDHIVPQSFLKDDSIDNKVLTRSDKARGKSDNVPSEEVVKKMKNYWRQLLNAKLITQRKFDNLTKAERGGLSELDKAGFIKRQLVETRQITKHVAQILDSRMNTKYDENDKLIREVKVITLKSKLVSDFRKDFQFYKVREINNYHHAHDAYLNAVVGTALIKKYPKLESEFVYGDYKVYDVRKMIAKSEQEIGKATAKYFFYSNIMNFFKTEITLANGEIRKRPLIETNGETGEIVWDKGRDFATVRKVLSMPQVNIVKKTEVQTGGFSKESILPKRNSDKLIARKKDWDPKKYGGFDSPTVAYSVLVVAKVEKGKSKKLKSVKELLGITIMERSSFEKNPIDFLEAKGYKEVKKDLIIKLPKYSLFELENGRKRMLASAGELQKGNELALPSKYVNFLYLASHYEKLKGSPEDNEQKQLFVEQHKHYLDEIIEQISEFSKRVILADANLDKVLSAYNKHRDKPIREQAENIIHLFTLTNLGAPAAFKYFDTTIDRKRYTSTKEVLDATLIHQSITGLYETRIDLSQLGGDGGGSSPAPEAAAKGGMDPLQLLQPLEAEIKGTKLKAHWNSGATITCVPQAFLEEEVPIKNIWIKTIHGEKEQPVYYLTFKIQGRKVEAEVISSPYDYILVSPSDIPWLMKKPLQLTTLVPLQEYEERLLKQTMLTGSYKEKLQSLFLKYDALWQHWENQVGHRRIKPHHIATGTVNPRPQKQYPINPKAKASIQTVINDLLKQGVLIQQNSIMNTPVYPVPKPDGKWRMVLDYREVNKTIPLIAAQNQHSAGILSSIFRGKYKTTLDLSNGFWAHSITPESYWLTAFTWLGQQYCWTRLPQGFLNSPALFNADVVDLLKEVPNVQVYVDDIYISHDDPREHLEQLEKVFSLLLNAGYVVSLKKSEIAQHEVEFLGFNITKEGRGLTETFKQKLLNITPPRDLKQLQSILGKLNFARNFIPNFSELVKPLYNIIATAPGKYITWTTDNSQQLQNIISMLNSAENLEERNPEVRLIMKVNTSPSAGYIRFYNEFAKRPIMYLNYVYTKAEVKFTNTEKLLTTIHKGLIKALDLGMGQEILVYSPIVSMTKIQKTPLPERKALPIRWITWMSYLEDPRIQFHYDKTLPELQQVPTVTDDIIAKIKHPSEFSMVFYTDGSAIKHPNVNKSHNAGMGIAQVQFKPEFTVINTWSIPLGDHTAQLAEVAAVEFACKKALKIDGPVLIVTDSFYVAESVNKELPYWQSNGFFNNKKKPLKHVSKWKSIADCIQLKPDIIIIHEKGHQPTASTFHTEGNNLADKLATQGSYVVNAGKRTADGSEFEKRTADGSEFESPKKKAKVE

SEQ ID NO: 676 - protein, 2171 aa, synthetic construct
MPAAKRVKLDGGDKKYSIGLDIGTNSVGWAVITDEYKVPSKKFKVLGNTDRHSIKKNLIGALLFDSGETAEATRLKRTARRRYTRRKNRICYLQEIFSNEMAKVDDSFFHRLEESFLVEEDKKHERHPIFGNIVDEVAYHEKYPTIYHLRKKLVDSTDKADLRLIYLALAHMIKFRGHFLIEGDLNPDNSDVDKLFIQLVQTYNQLFEENPINASGVDAKAILSARLSKSRRLENLIAQLPGEKKNGLFGNLIALSLGLTPNFKSNFDLAEDAKLQLSKDTYDDDLDNLLAQIGDQYADLFLAAKNLSDAILLSDILRVNTEITKAPLSASMIKRYDEHHQDLTLLKALVRQQLPEKYKEIFFDQSKNGYAGYIDGGASQEEFYKFIKPILEKMDGTEELLVKLNREDLLRKQRTFDNGSIPHQIHLGELHAILRRQEDFYPFLKDNREKIEKILTFRIPYYVGPLARGNSRFAWMTRKSEETITPWNFEEVVDKGASAQSFIERMTNFDKNLPNEKVLPKHSLLYEYFTVYNELTKVKYVTEGMRKPAFLSGEQKKAIVDLLFKTNRKVTVKQLKEDYFKKIECFDSVEISGVEDRFNASLGTYHDLLKIIKDKDFLDNEENEDILEDIVLTLTLFEDREMIEERLKTYAHLFDDKVMKQLKRRRYTGWGRLSRKLINGIRDKQSGKTILDFLKSDGFANRNFMQLIHDDSLTFKEDIQKAQVSGQGDSLHEHIANLAGSPAIKKGILQTVKVVDELVKVMGRHKPENIVIEMARENQTTQKGQKNSRERMKRIEEGIKELGSQILKEHPVENTQLQNEKLYLYYLQNGRDMYVDQELDINRLSDYDVDHIVPQSFLKDDSIDNKVLTRSDKARGKSDNVPSEEVVKKMKNYWRQLLNAKLITQRKFDNLTKAERGGLSELDKAGFIKRQLVETRQITKHVAQILDSRMNTKYDENDKLIREVKVITLKSKLVSDFRKDFQFYKVREINNYHHAHDAYLNAVVGTALIKKYPKLESEFVYGDYKVYDVRKMIAKSEQEIGKATAKYFFYSNIMNFFKTEITLANGEIRKRPLIETNGETGEIVWDKGRDFATVRKVLSMPQVNIVKKTEVQTGGFSKESILPKRNSDKLIARKKDWDPKKYGGFDSPTVAYSVLVVAKVEKGKSKKLKSVKELLGITIMERSSFEKNPIDFLEAKGYKEVKKDLIIKLPKYSLFELENGRKRMLASAGELQKGNELALPSKYVNFLYLASHYEKLKGSPEDNEQKQLFVEQHKHYLDEIIEQISEFSKRVILADANLDKVLSAYNKHRDKPIREQAENIIHLFTLTNLGAPAAFKYFDTTIDRKRYTSTKEVLDATLIHQSITGLYETRIDLSQLGGDGGPAPGGGGGMDPLQLLQPLEAEIKGTKLKAHWNSGATITCVPQAFLEEEVPIKNIWIKTIHGEKEQPVYYLTFKIQGRKVEAEVISSPYDYILVSPSDIPWLMKKPLQLTTLVPLQEYEERLLKQTMLTGSYKEKLQSLFLKYDALWQHWENQVGHRRIKPHHIATGTVNPRPQKQYPINPKAKASIQTVINDLLKQGVLIQQNSIMNTPVYPVPKPDGKWRMVLDYREVNKTIPLIAAQNQHSAGILSSIFRGKYKTTLDLSNGFWAHSITPESYWLTAFTWLGQQYCWTRLPQGFLNSPALFNADVVDLLKEVPNVQVYVDDIYISHDDPREHLEQLEKVFSLLLNAGYVVSLKKSEIAQHEVEFLGFNITKEGRGLTETFKQKLLNITPPRDLKQLQSILGKLNFARNFIPNFSELVKPLYNIIATAPGKYITWTTDNSQQLQNIISMLNSAENLEERNPEVRLIMKVNTSPSAGYIRFYNEFAKRPIMYLNYVYTKAEVKFTNTEKLLTTIHKGLIKALDLGMGQEILVYSPIVSMTKIQKTPLPERKALPIRWITWMSYLEDPRIQFHYDKTLPELQQVPTVTDDIIAKIKHPSEFSMVFYTDGSAIKHPNVNKSHNAGMGIAQVQFKPEFTVINTWSIPLGDHTAQLAEVAAVEFACKKALKIDGPVLIVTDSFYVAESVNKELPYWQSNGFFNNKKKPLKHVSKWKSIADCIQLKPDIIIIHEKGHQPTASTFHTEGNNLADKLATQGSYVVNAGKRTADGSEFEKRTADGSEFESPKKKAKVE

SEQ ID NO: 677 - protein, 2180 aa, synthetic construct
MPAAKRVKLDGGDKKYSIGLDIGTNSVGWAVITDEYKVPSKKFKVLGNTDRHSIKKNLIGALLFDSGETAEATRLKRTARRRYTRRKNRICYLQEIFSNEMAKVDDSFFHRLEESFLVEEDKKHERHPIFGNIVDEVAYHEKYPTIYHLRKKLVDSTDKADLRLIYLALAHMIKFRGHFLIEGDLNPDNSDVDKLFIQLVQTYNQLFEENPINASGVDAKAILSARLSKSRRLENLIAQLPGEKKNGLFGNLIALSLGLTPNFKSNFDLAEDAKLQLSKDTYDDDLDNLLAQIGDQYADLFLAAKNLSDAILLSDILRVNTEITKAPLSASMIKRYDEHHQDLTLLKALVRQQLPEKYKEIFFDQSKNGYAGYIDGGASQEEFYKFIKPILEKMDGTEELLVKLNREDLLRKQRTFDNGSIPHQIHLGELHAILRRQEDFYPFLKDNREKIEKILTFRIPYYVGPLARGNSRFAWMTRKSEETITPWNFEEVVDKGASAQSFIERMTNFDKNLPNEKVLPKHSLLYEYFTVYNELTKVKYVTEGMRKPAFLSGEQKKAIVDLLFKTNRKVTVKQLKEDYFKKIECFDSVEISGVEDRFNASLGTYHDLLKIIKDKDFLDNEENEDILEDIVLTLTLFEDREMIEERLKTYAHLFDDKVMKQLKRRRYTGWGRLSRKLINGIRDKQSGKTILDFLKSDGFANRNFMQLIHDDSLTFKEDIQKAQVSGQGDSLHEHIANLAGSPAIKKGILQTVKVVDELVKVMGRHKPENIVIEMARENQTTQKGQKNSRERMKRIEEGIKELGSQILKEHPVENTQLQNEKLYLYYLQNGRDMYVDQELDINRLSDYDVDHIVPQSFLKDDSIDNKVLTRSDKARGKSDNVPSEEVVKKMKNYWRQLLNAKLITQRKFDNLTKAERGGLSELDKAGFIKRQLVETRQITKHVAQILDSRMNTKYDENDKLIREVKVITLKSKLVSDFRKDFQFYKVREINNYHHAHDAYLNAVVGTALIKKYPKLESEFVYGDYKVYDVRKMIAKSEQEIGKATAKYFFYSNIMNFFKTEITLANGEIRKRPLIETNGETGEIVWDKGRDFATVRKVLSMPQVNIVKKTEVQTGGFSKESILPKRNSDKLIARKKDWDPKKYGGFDSPTVAYSVLVVAKVEKGKSKKLKSVKELLGITIMERSSFEKNPIDFLEAKGYKEVKKDLIIKLPKYSLFELENGRKRMLASAGELQKGNELALPSKYVNFLYLASHYEKLKGSPEDNEQKQLFVEQHKHYLDEIIEQISEFSKRVILADANLDKVLSAYNKHRDKPIREQAENIIHLFTLTNLGAPAAFKYFDTTIDRKRYTSTKEVLDATLIHQSITGLYETRIDLSQLGGDGGGSSGSSGSSGSSGSSGGMDPLQLLQPLEAEIKGTKLKAHWNSGATITCVPQAFLEEEVPIKNIWIKTIHGEKEQPVYYLTFKIQGRKVEAEVISSPYDYILVSPSDIPWLMKKPLQLTTLVPLQEYEERLLKQTMLTGSYKEKLQSLFLKYDALWQHWENQVGHRRIKPHHIATGTVNPRPQKQYPINPKAKASIQTVINDLLKQGVLIQQNSIMNTPVYPVPKPDGKWRMVLDYREVNKTIPLIAAQNQHSAGILSSIFRGKYKTTLDLSNGFWAHSITPESYWLTAFTWLGQQYCWTRLPQGFLNSPALFNADVVDLLKEVPNVQVYVDDIYISHDDPREHLEQLEKVFSLLLNAGYVVSLKKSEIAQHEVEFLGFNITKEGRGLTETFKQKLLNITPPRDLKQLQSILGKLNFARNFIPNFSELVKPLYNIIATAPGKYITWTTDNSQQLQNIISMLNSAENLEERNPEVRLIMKVNTSPSAGYIRFYNEFAKRPIMYLNYVYTKAEVKFTNTEKLLTTIHKGLIKALDLGMGQEILVYSPIVSMTKIQKTPLPERKALPIRWITWMSYLEDPRIQFHYDKTLPELQQVPTVTDDIIAKIKHPSEFSMVFYTDGSAIKHPNVNKSHNAGMGIAQVQFKPEFTVINTWSIPLGDHTAQLAEVAAVEFACKKALKIDGPVLIVTDSFYVAESVNKELPYWQSNGFFNNKKKPLKHVSKWKSIADCIQLKPDIIIIHEKGHQPTASTFHTEGNNLADKLATQGSYVVNAGKRTADGSEFEKRTADGSEFESPKKKAKVE

SEQ ID NO: 678 - protein, 2174 aa, synthetic construct
MPAAKRVKLDGGDKKYSIGLDIGTNSVGWAVITDEYKVPSKKFKVLGNTDRHSIKKNLIGALLFDSGETAEATRLKRTARRRYTRRKNRICYLQEIFSNEMAKVDDSFFHRLEESFLVEEDKKHERHPIFGNIVDEVAYHEKYPTIYHLRKKLVDSTDKADLRLIYLALAHMIKFRGHFLIEGDLNPDNSDVDKLFIQLVQTYNQLFEENPINASGVDAKAILSARLSKSRRLENLIAQLPGEKKNGLFGNLIALSLGLTPNFKSNFDLAEDAKLQLSKDTYDDDLDNLLAQIGDQYADLFLAAKNLSDAILLSDILRVNTEITKAPLSASMIKRYDEHHQDLTLLKALVRQQLPEKYKEIFFDQSKNGYAGYIDGGASQEEFYKFIKPILEKMDGTEELLVKLNREDLLRKQRTFDNGSIPHQIHLGELHAILRRQEDFYPFLKDNREKIEKILTFRIPYYVGPLARGNSRFAWMTRKSEETITPWNFEEVVDKGASAQSFIERMTNFDKNLPNEKVLPKHSLLYEYFTVYNELTKVKYVTEGMRKPAFLSGEQKKAIVDLLFKTNRKVTVKQLKEDYFKKIECFDSVEISGVEDRFNASLGTYHDLLKIIKDKDFLDNEENEDILEDIVLTLTLFEDREMIEERLKTYAHLFDDKVMKQLKRRRYTGWGRLSRKLINGIRDKQSGKTILDFLKSDGFANRNFMQLIHDDSLTFKEDIQKAQVSGQGDSLHEHIANLAGSPAIKKGILQTVKVVDELVKVMGRHKPENIVIEMARENQTTQKGQKNSRERMKRIEEGIKELGSQILKEHPVENTQLQNEKLYLYYLQNGRDMYVDQELDINRLSDYDVDHIVPQSFLKDDSIDNKVLTRSDKARGKSDNVPSEEVVKKMKNYWRQLLNAKLITQRKFDNLTKAERGGLSELDKAGFIKRQLVETRQITKHVAQILDSRMNTKYDENDKLIREVKVITLKSKLVSDFRKDFQFYKVREINNYHHAHDAYLNAVVGTALIKKYPKLESEFVYGDYKVYDVRKMIAKSEQEIGKATAKYFFYSNIMNFFKTEITLANGEIRKRPLIETNGETGEIVWDKGRDFATVRKVLSMPQVNIVKKTEVQTGGFSKESILPKRNSDKLIARKKDWDPKKYGGFDSPTVAYSVLVVAKVEKGKSKKLKSVKELLGITIMERSSFEKNPIDFLEAKGYKEVKKDLIIKLPKYSLFELENGRKRMLASAGELQKGNELALPSKYVNFLYLASHYEKLKGSPEDNEQKQLFVEQHKHYLDEIIEQISEFSKRVILADANLDKVLSAYNKHRDKPIREQAENIIHLFTLTNLGAPAAFKYFDTTIDRKRYTSTKEVLDATLIHQSITGLYETRIDLSQLGGDGGGGGPAPGGSGGMDPLQLLQPLEAEIKGTKLKAHWNSGATITCVPQAFLEEEVPIKNIWIKTIHGEKEQPVYYLTFKIQGRKVEAEVISSPYDYILVSPSDIPWLMKKPLQLTTLVPLQEYEERLLKQTMLTGSYKEKLQSLFLKYDALWQHWENQVGHRRIKPHHIATGTVNPRPQKQYPINPKAKASIQTVINDLLKQGVLIQQNSIMNTPVYPVPKPDGKWRMVLDYREVNKTIPLIAAQNQHSAGILSSIFRGKYKTTLDLSNGFWAHSITPESYWLTAFTWLGQQYCWTRLPQGFLNSPALFNADVVDLLKEVPNVQVYVDDIYISHDDPREHLEQLEKVFSLLLNAGYVVSLKKSEIAQHEVEFLGFNITKEGRGLTETFKQKLLNITPPRDLKQLQSILGKLNFARNFIPNFSELVKPLYNIIATAPGKYITWTTDNSQQLQNIISMLNSAENLEERNPEVRLIMKVNTSPSAGYIRFYNEFAKRPIMYLNYVYTKAEVKFTNTEKLLTTIHKGLIKALDLGMGQEILVYSPIVSMTKIQKTPLPERKALPIRWITWMSYLEDPRIQFHYDKTLPELQQVPTVTDDIIAKIKHPSEFSMVFYTDGSAIKHPNVNKSHNAGMGIAQVQFKPEFTVINTWSIPLGDHTAQLAEVAAVEFACKKALKIDGPVLIVTDSFYVAESVNKELPYWQSNGFFNNKKKPLKHVSKWKSIADCIQLKPDIIIIHEKGHQPTASTFHTEGNNLADKLATQGSYVVNAGKRTADGSEFEKRTADGSEFESPKKKAKVE

SEQ ID NO: 679 - protein, 2176 aa, synthetic construct
MPAAKRVKLDGGDKKYSIGLDIGTNSVGWAVITDEYKVPSKKFKVLGNTDRHSIKKNLIGALLFDSGETAEATRLKRTARRRYTRRKNRICYLQEIFSNEMAKVDDSFFHRLEESFLVEEDKKHERHPIFGNIVDEVAYHEKYPTIYHLRKKLVDSTDKADLRLIYLALAHMIKFRGHFLIEGDLNPDNSDVDKLFIQLVQTYNQLFEENPINASGVDAKAILSARLSKSRRLENLIAQLPGEKKNGLFGNLIALSLGLTPNFKSNFDLAEDAKLQLSKDTYDDDLDNLLAQIGDQYADLFLAAKNLSDAILLSDILRVNTEITKAPLSASMIKRYDEHHQDLTLLKALVRQQLPEKYKEIFFDQSKNGYAGYIDGGASQEEFYKFIKPILEKMDGTEELLVKLNREDLLRKQRTFDNGSIPHQIHLGELHAILRRQEDFYPFLKDNREKIEKILTFRIPYYVGPLARGNSRFAWMTRKSEETITPWNFEEVVDKGASAQSFIERMTNFDKNLPNEKVLPKHSLLYEYFTVYNELTKVKYVTEGMRKPAFLSGEQKKAIVDLLFKTNRKVTVKQLKEDYFKKIECFDSVEISGVEDRFNASLGTYHDLLKIIKDKDFLDNEENEDILEDIVLTLTLFEDREMIEERLKTYAHLFDDKVMKQLKRRRYTGWGRLSRKLINGIRDKQSGKTILDFLKSDGFANRNFMQLIHDDSLTFKEDIQKAQVSGQGDSLHEHIANLAGSPAIKKGILQTVKVVDELVKVMGRHKPENIVIEMARENQTTQKGQKNSRERMKRIEEGIKELGSQILKEHPVENTQLQNEKLYLYYLQNGRDMYVDQELDINRLSDYDVDHIVPQSFLKDDSIDNKVLTRSDKARGKSDNVPSEEVVKKMKNYWRQLLNAKLITQRKFDNLTKAERGGLSELDKAGFIKRQLVETRQITKHVAQILDSRMNTKYDENDKLIREVKVITLKSKLVSDFRKDFQFYKVREINNYHHAHDAYLNAVVGTALIKKYPKLESEFVYGDYKVYDVRKMIAKSEQEIGKATAKYFFYSNIMNFFKTEITLANGEIRKRPLIETNGETGEIVWDKGRDFATVRKVLSMPQVNIVKKTEVQTGGFSKESILPKRNSDKLIARKKDWDPKKYGGFDSPTVAYSVLVVAKVEKGKSKKLKSVKELLGITIMERSSFEKNPIDFLEAKGYKEVKKDLIIKLPKYSLFELENGRKRMLASAGELQKGNELALPSKYVNFLYLASHYEKLKGSPEDNEQKQLFVEQHKHYLDEIIEQISEFSKRVILADANLDKVLSAYNKHRDKPIREQAENIIHLFTLTNLGAPAAFKYFDTTIDRKRYTSTKEVLDATLIHQSITGLYETRIDLSQLGGDGGGGSGSSEAAAKGGMDPLQLLQPLEAEIKGTKLKAHWNSGATITCVPQAFLEEEVPIKNIWIKTIHGEKEQPVYYLTFKIQGRKVEAEVISSPYDYILVSPSDIPWLMKKPLQLTTLVPLQEYEERLLKQTMLTGSYKEKLQSLFLKYDALWQHWENQVGHRRIKPHHIATGTVNPRPQKQYPINPKAKASIQTVINDLLKQGVLIQQNSIMNTPVYPVPKPDGKWRMVLDYREVNKTIPLIAAQNQHSAGILSSIFRGKYKTTLDLSNGFWAHSITPESYWLTAFTWLGQQYCWTRLPQGFLNSPALFNADVVDLLKEVPNVQVYVDDIYISHDDPREHLEQLEKVFSLLLNAGYVVSLKKSEIAQHEVEFLGFNITKEGRGLTETFKQKLLNITPPRDLKQLQSILGKLNFARNFIPNFSELVKPLYNIIATAPGKYITWTTDNSQQLQNIISMLNSAENLEERNPEVRLIMKVNTSPSAGYIRFYNEFAKRPIMYLNYVYTKAEVKFTNTEKLLTTIHKGLIKALDLGMGQEILVYSPIVSMTKIQKTPLPERKALPIRWITWMSYLEDPRIQFHYDKTLPELQQVPTVTDDIIAKIKHPSEFSMVFYTDGSAIKHPNVNKSHNAGMGIAQVQFKPEFTVINTWSIPLGDHTAQLAEVAAVEFACKKALKIDGPVLIVTDSFYVAESVNKELPYWQSNGFFNNKKKPLKHVSKWKSIADCIQLKPDIIIIHEKGHQPTASTFHTEGNNLADKLATQGSYVVNAGKRTADGSEFEKRTADGSEFESPKKKAKVE

SEQ ID NO: 680 - protein, 2176 aa, synthetic construct
MPAAKRVKLDGGDKKYSIGLDIGTNSVGWAVITDEYKVPSKKFKVLGNTDRHSIKKNLIGALLFDSGETAEATRLKRTARRRYTRRKNRICYLQEIFSNEMAKVDDSFFHRLEESFLVEEDKKHERHPIFGNIVDEVAYHEKYPTIYHLRKKLVDSTDKADLRLIYLALAHMIKFRGHFLIEGDLNPDNSDVDKLFIQLVQTYNQLFEENPINASGVDAKAILSARLSKSRRLENLIAQLPGEKKNGLFGNLIALSLGLTPNFKSNFDLAEDAKLQLSKDTYDDDLDNLLAQIGDQYADLFLAAKNLSDAILLSDILRVNTEITKAPLSASMIKRYDEHHQDLTLLKALVRQQLPEKYKEIFFDQSKNGYAGYIDGGASQEEFYKFIKPILEKMDGTEELLVKLNREDLLRKQRTFDNGSIPHQIHLGELHAILRRQEDFYPFLKDNREKIEKILTFRIPYYVGPLARGNSRFAWMTRKSEETITPWNFEEVVDKGASAQSFIERMTNFDKNLPNEKVLPKHSLLYEYFTVYNELTKVKYVTEGMRKPAFLSGEQKKAIVDLLFKTNRKVTVKQLKEDYFKKIECFDSVEISGVEDRFNASLGTYHDLLKIIKDKDFLDNEENEDILEDIVLTLTLFEDREMIEERLKTYAHLFDDKVMKQLKRRRYTGWGRLSRKLINGIRDKQSGKTILDFLKSDGFANRNFMQLIHDDSLTFKEDIQKAQVSGQGDSLHEHIANLAGSPAIKKGILQTVKVVDELVKVMGRHKPENIVIEMARENQTTQKGQKNSRERMKRIEEGIKELGSQILKEHPVENTQLQNEKLYLYYLQNGRDMYVDQELDINRLSDYDVDHIVPQSFLKDDSIDNKVLTRSDKARGKSDNVPSEEVVKKMKNYWRQLLNAKLITQRKFDNLTKAERGGLSELDKAGFIKRQLVETRQITKHVAQILDSRMNTKYDENDKLIREVKVITLKSKLVSDFRKDFQFYKVREINNYHHAHDAYLNAVVGTALIKKYPKLESEFVYGDYKVYDVRKMIAKSEQEIGKATAKYFFYSNIMNFFKTEITLANGEIRKRPLIETNGETGEIVWDKGRDFATVRKVLSMPQVNIVKKTEVQTGGFSKESILPKRNSDKLIARKKDWDPKKYGGFDSPTVAYSVLVVAKVEKGKSKKLKSVKELLGITIMERSSFEKNPIDFLEAKGYKEVKKDLIIKLPKYSLFELENGRKRMLASAGELQKGNELALPSKYVNFLYLASHYEKLKGSPEDNEQKQLFVEQHKHYLDEIIEQISEFSKRVILADANLDKVLSAYNKHRDKPIREQAENIIHLFTLTNLGAPAAFKYFDTTIDRKRYTSTKEVLDATLIHQSITGLYETRIDLSQLGGDGGEAAAKGGSPAPGGMDPLQLLQPLEAEIKGTKLKAHWNSGATITCVPQAFLEEEVPIKNIWIKTIHGEKEQPVYYLTFKIQGRKVEAEVISSPYDYILVSPSDIPWLMKKPLQLTTLVPLQEYEERLLKQTMLTGSYKEKLQSLFLKYDALWQHWENQVGHRRIKPHHIATGTVNPRPQKQYPINPKAKASIQTVINDLLKQGVLIQQNSIMNTPVYPVPKPDGKWRMVLDYREVNKTIPLIAAQNQHSAGILSSIFRGKYKTTLDLSNGFWAHSITPESYWLTAFTWLGQQYCWTRLPQGFLNSPALFNADVVDLLKEVPNVQVYVDDIYISHDDPREHLEQLEKVFSLLLNAGYVVSLKKSEIAQHEVEFLGFNITKEGRGLTETFKQKLLNITPPRDLKQLQSILGKLNFARNFIPNFSELVKPLYNIIATAPGKYITWTTDNSQQLQNIISMLNSAENLEERNPEVRLIMKVNTSPSAGYIRFYNEFAKRPIMYLNYVYTKAEVKFTNTEKLLTTIHKGLIKALDLGMGQEILVYSPIVSMTKIQKTPLPERKALPIRWITWMSYLEDPRIQFHYDKTLPELQQVPTVTDDIIAKIKHPSEFSMVFYTDGSAIKHPNVNKSHNAGMGIAQVQFKPEFTVINTWSIPLGDHTAQLAEVAAVEFACKKALKIDGPVLIVTDSFYVAESVNKELPYWQSNGFFNNKKKPLKHVSKWKSIADCIQLKPDIIIIHEKGHQPTASTFHTEGNNLADKLATQGSYVVNAGKRTADGSEFEKRTADGSEFESPKKKAKVE

SEQ ID NO: 681 - protein, 2175 aa, synthetic construct
MPAAKRVKLDGGDKKYSIGLDIGTNSVGWAVITDEYKVPSKKFKVLGNTDRHSIKKNLIGALLFDSGETAEATRLKRTARRRYTRRKNRICYLQEIFSNEMAKVDDSFFHRLEESFLVEEDKKHERHPIFGNIVDEVAYHEKYPTIYHLRKKLVDSTDKADLRLIYLALAHMIKFRGHFLIEGDLNPDNSDVDKLFIQLVQTYNQLFEENPINASGVDAKAILSARLSKSRRLENLIAQLPGEKKNGLFGNLIALSLGLTPNFKSNFDLAEDAKLQLSKDTYDDDLDNLLAQIGDQYADLFLAAKNLSDAILLSDILRVNTEITKAPLSASMIKRYDEHHQDLTLLKALVRQQLPEKYKEIFFDQSKNGYAGYIDGGASQEEFYKFIKPILEKMDGTEELLVKLNREDLLRKQRTFDNGSIPHQIHLGELHAILRRQEDFYPFLKDNREKIEKILTFRIPYYVGPLARGNSRFAWMTRKSEETITPWNFEEVVDKGASAQSFIERMTNFDKNLPNEKVLPKHSLLYEYFTVYNELTKVKYVTEGMRKPAFLSGEQKKAIVDLLFKTNRKVTVKQLKEDYFKKIECFDSVEISGVEDRFNASLGTYHDLLKIIKDKDFLDNEENEDILEDIVLTLTLFEDREMIEERLKTYAHLFDDKVMKQLKRRRYTGWGRLSRKLINGIRDKQSGKTILDFLKSDGFANRNFMQLIHDDSLTFKEDIQKAQVSGQGDSLHEHIANLAGSPAIKKGILQTVKVVDELVKVMGRHKPENIVIEMARENQTTQKGQKNSRERMKRIEEGIKELGSQILKEHPVENTQLQNEKLYLYYLQNGRDMYVDQELDINRLSDYDVDHIVPQSFLKDDSIDNKVLTRSDKARGKSDNVPSEEVVKKMKNYWRQLLNAKLITQRKFDNLTKAERGGLSELDKAGFIKRQLVETRQITKHVAQILDSRMNTKYDENDKLIREVKVITLKSKLVSDFRKDFQFYKVREINNYHHAHDAYLNAVVGTALIKKYPKLESEFVYGDYKVYDVRKMIAKSEQEIGKATAKYFFYSNIMNFFKTEITLANGEIRKRPLIETNGETGEIVWDKGRDFATVRKVLSMPQVNIVKKTEVQTGGFSKESILPKRNSDKLIARKKDWDPKKYGGFDSPTVAYSVLVVAKVEKGKSKKLKSVKELLGITIMERSSFEKNPIDFLEAKGYKEVKKDLIIKLPKYSLFELENGRKRMLASAGELQKGNELALPSKYVNFLYLASHYEKLKGSPEDNEQKQLFVEQHKHYLDEIIEQISEFSKRVILADANLDKVLSAYNKHRDKPIREQAENIIHLFTLTNLGAPAAFKYFDTTIDRKRYTSTKEVLDATLIHQSITGLYETRIDLSQLGGDGGGGGGSGGGGSGGMDPLQLLQPLEAEIKGTKLKAHWNSGATITCVPQAFLEEEVPIKNIWIKTIHGEKEQPVYYLTFKIQGRKVEAEVISSPYDYILVSPSDIPWLMKKPLQLTTLVPLQEYEERLLKQTMLTGSYKEKLQSLFLKYDALWQHWENQVGHRRIKPHHIATGTVNPRPQKQYPINPKAKASIQTVINDLLKQGVLIQQNSIMNTPVYPVPKPDGKWRMVLDYREVNKTIPLIAAQNQHSAGILSSIFRGKYKTTLDLSNGFWAHSITPESYWLTAFTWLGQQYCWTRLPQGFLNSPALFNADVVDLLKEVPNVQVYVDDIYISHDDPREHLEQLEKVFSLLLNAGYVVSLKKSEIAQHEVEFLGFNITKEGRGLTETFKQKLLNITPPRDLKQLQSILGKLNFARNFIPNFSELVKPLYNIIATAPGKYITWTTDNSQQLQNIISMLNSAENLEERNPEVRLIMKVNTSPSAGYIRFYNEFAKRPIMYLNYVYTKAEVKFTNTEKLLTTIHKGLIKALDLGMGQEILVYSPIVSMTKIQKTPLPERKALPIRWITWMSYLEDPRIQFHYDKTLPELQQVPTVTDDIIAKIKHPSEFSMVFYTDGSAIKHPNVNKSHNAGMGIAQVQFKPEFTVINTWSIPLGDHTAQLAEVAAVEFACKKALKIDGPVLIVTDSFYVAESVNKELPYWQSNGFFNNKKKPLKHVSKWKSIADCIQLKPDIIIIHEKGHQPTASTFHTEGNNLADKLATQGSYVVNAGKRTADGSEFEKRTADGSEFESPKKKAKVE

SEQ ID NO: 682 - protein, 2171 aa, synthetic construct
MPAAKRVKLDGGDKKYSIGLDIGTNSVGWAVITDEYKVPSKKFKVLGNTDRHSIKKNLIGALLFDSGETAEATRLKRTARRRYTRRKNRICYLQEIFSNEMAKVDDSFFHRLEESFLVEEDKKHERHPIFGNIVDEVAYHEKYPTIYHLRKKLVDSTDKADLRLIYLALAHMIKFRGHFLIEGDLNPDNSDVDKLFIQLVQTYNQLFEENPINASGVDAKAILSARLSKSRRLENLIAQLPGEKKNGLFGNLIALSLGLTPNFKSNFDLAEDAKLQLSKDTYDDDLDNLLAQIGDQYADLFLAAKNLSDAILLSDILRVNTEITKAPLSASMIKRYDEHHQDLTLLKALVRQQLPEKYKEIFFDQSKNGYAGYIDGGASQEEFYKFIKPILEKMDGTEELLVKLNREDLLRKQRTFDNGSIPHQIHLGELHAILRRQEDFYPFLKDNREKIEKILTFRIPYYVGPLARGNSRFAWMTRKSEETITPWNFEEVVDKGASAQSFIERMTNFDKNLPNEKVLPKHSLLYEYFTVYNELTKVKYVTEGMRKPAFLSGEQKKAIVDLLFKTNRKVTVKQLKEDYFKKIECFDSVEISGVEDRFNASLGTYHDLLKIIKDKDFLDNEENEDILEDIVLTLTLFEDREMIEERLKTYAHLFDDKVMKQLKRRRYTGWGRLSRKLINGIRDKQSGKTILDFLKSDGFANRNFMQLIHDDSLTFKEDIQKAQVSGQGDSLHEHIANLAGSPAIKKGILQTVKVVDELVKVMGRHKPENIVIEMARENQTTQKGQKNSRERMKRIEEGIKELGSQILKEHPVENTQLQNEKLYLYYLQNGRDMYVDQELDINRLSDYDVDHIVPQSFLKDDSIDNKVLTRSDKARGKSDNVPSEEVVKKMKNYWRQLLNAKLITQRKFDNLTKAERGGLSELDKAGFIKRQLVETRQITKHVAQILDSRMNTKYDENDKLIREVKVITLKSKLVSDFRKDFQFYKVREINNYHHAHDAYLNAVVGTALIKKYPKLESEFVYGDYKVYDVRKMIAKSEQEIGKATAKYFFYSNIMNFFKTEITLANGEIRKRPLIETNGETGEIVWDKGRDFATVRKVLSMPQVNIVKKTEVQTGGFSKESILPKRNSDKLIARKKDWDPKKYGGFDSPTVAYSVLVVAKVEKGKSKKLKSVKELLGITIMERSSFEKNPIDFLEAKGYKEVKKDLIIKLPKYSLFELENGRKRMLASAGELQKGNELALPSKYVNFLYLASHYEKLKGSPEDNEQKQLFVEQHKHYLDEIIEQISEFSKRVILADANLDKVLSAYNKHRDKPIREQAENIIHLFTLTNLGAPAAFKYFDTTIDRKRYTSTKEVLDATLIHQSITGLYETRIDLSQLGGDGGGGSGGSGGMDPLQLLQPLEAEIKGTKLKAHWNSGATITCVPQAFLEEEVPIKNIWIKTIHGEKEQPVYYLTFKIQGRKVEAEVISSPYDYILVSPSDIPWLMKKPLQLTTLVPLQEYEERLLKQTMLTGSYKEKLQSLFLKYDALWQHWENQVGHRRIKPHHIATGTVNPRPQKQYPINPKAKASIQTVINDLLKQGVLIQQNSIMNTPVYPVPKPDGKWRMVLDYREVNKTIPLIAAQNQHSAGILSSIFRGKYKTTLDLSNGFWAHSITPESYWLTAFTWLGQQYCWTRLPQGFLNSPALFNADVVDLLKEVPNVQVYVDDIYISHDDPREHLEQLEKVFSLLLNAGYVVSLKKSEIAQHEVEFLGFNITKEGRGLTETFKQKLLNITPPRDLKQLQSILGKLNFARNFIPNFSELVKPLYNIIATAPGKYITWTTDNSQQLQNIISMLNSAENLEERNPEVRLIMKVNTSPSAGYIRFYNEFAKRPIMYLNYVYTKAEVKFTNTEKLLTTIHKGLIKALDLGMGQEILVYSPIVSMTKIQKTPLPERKALPIRWITWMSYLEDPRIQFHYDKTLPELQQVPTVTDDIIAKIKHPSEFSMVFYTDGSAIKHPNVNKSHNAGMGIAQVQFKPEFTVINTWSIPLGDHTAQLAEVAAVEFACKKALKIDGPVLIVTDSFYVAESVNKELPYWQSNGFFNNKKKPLKHVSKWKSIADCIQLKPDIIIIHEKGHQPTASTFHTEGNNLADKLATQGSYVVNAGKRTADGSEFEKRTADGSEFESPKKKAKVE

SEQ ID NO: 683 - protein, 2174 aa, synthetic construct
MPAAKRVKLDGGDKKYSIGLDIGTNSVGWAVITDEYKVPSKKFKVLGNTDRHSIKKNLIGALLFDSGETAEATRLKRTARRRYTRRKNRICYLQEIFSNEMAKVDDSFFHRLEESFLVEEDKKHERHPIFGNIVDEVAYHEKYPTIYHLRKKLVDSTDKADLRLIYLALAHMIKFRGHFLIEGDLNPDNSDVDKLFIQLVQTYNQLFEENPINASGVDAKAILSARLSKSRRLENLIAQLPGEKKNGLFGNLIALSLGLTPNFKSNFDLAEDAKLQLSKDTYDDDLDNLLAQIGDQYADLFLAAKNLSDAILLSDILRVNTEITKAPLSASMIKRYDEHHQDLTLLKALVRQQLPEKYKEIFFDQSKNGYAGYIDGGASQEEFYKFIKPILEKMDGTEELLVKLNREDLLRKQRTFDNGSIPHQIHLGELHAILRRQEDFYPFLKDNREKIEKILTFRIPYYVGPLARGNSRFAWMTRKSEETITPWNFEEVVDKGASAQSFIERMTNFDKNLPNEKVLPKHSLLYEYFTVYNELTKVKYVTEGMRKPAFLSGEQKKAIVDLLFKTNRKVTVKQLKEDYFKKIECFDSVEISGVEDRFNASLGTYHDLLKIIKDKDFLDNEENEDILEDIVLTLTLFEDREMIEERLKTYAHLFDDKVMKQLKRRRYTGWGRLSRKLINGIRDKQSGKTILDFLKSDGFANRNFMQLIHDDSLTFKEDIQKAQVSGQGDSLHEHIANLAGSPAIKKGILQTVKVVDELVKVMGRHKPENIVIEMARENQTTQKGQKNSRERMKRIEEGIKELGSQILKEHPVENTQLQNEKLYLYYLQNGRDMYVDQELDINRLSDYDVDHIVPQSFLKDDSIDNKVLTRSDKARGKSDNVPSEEVVKKMKNYWRQLLNAKLITQRKFDNLTKAERGGLSELDKAGFIKRQLVETRQITKHVAQILDSRMNTKYDENDKLIREVKVITLKSKLVSDFRKDFQFYKVREINNYHHAHDAYLNAVVGTALIKKYPKLESEFVYGDYKVYDVRKMIAKSEQEIGKATAKYFFYSNIMNFFKTEITLANGEIRKRPLIETNGETGEIVWDKGRDFATVRKVLSMPQVNIVKKTEVQTGGFSKESILPKRNSDKLIARKKDWDPKKYGGFDSPTVAYSVLVVAKVEKGKSKKLKSVKELLGITIMERSSFEKNPIDFLEAKGYKEVKKDLIIKLPKYSLFELENGRKRMLASAGELQKGNELALPSKYVNFLYLASHYEKLKGSPEDNEQKQLFVEQHKHYLDEIIEQISEFSKRVILADANLDKVLSAYNKHRDKPIREQAENIIHLFTLTNLGAPAAFKYFDTTIDRKRYTSTKEVLDATLIHQSITGLYETRIDLSQLGGDGGGSSGGSPAPGGMDPLQLLQPLEAEIKGTKLKAHWNSGATITCVPQAFLEEEVPIKNIWIKTIHGEKEQPVYYLTFKIQGRKVEAEVISSPYDYILVSPSDIPWLMKKPLQLTTLVPLQEYEERLLKQTMLTGSYKEKLQSLFLKYDALWQHWENQVGHRRIKPHHIATGTVNPRPQKQYPINPKAKASIQTVINDLLKQGVLIQQNSIMNTPVYPVPKPDGKWRMVLDYREVNKTIPLIAAQNQHSAGILSSIFRGKYKTTLDLSNGFWAHSITPESYWLTAFTWLGQQYCWTRLPQGFLNSPALFNADVVDLLKEVPNVQVYVDDIYISHDDPREHLEQLEKVFSLLLNAGYVVSLKKSEIAQHEVEFLGFNITKEGRGLTETFKQKLLNITPPRDLKQLQSILGKLNFARNFIPNFSELVKPLYNIIATAPGKYITWTTDNSQQLQNIISMLNSAENLEERNPEVRLIMKVNTSPSAGYIRFYNEFAKRPIMYLNYVYTKAEVKFTNTEKLLTTIHKGLIKALDLGMGQEILVYSPIVSMTKIQKTPLPERKALPIRWITWMSYLEDPRIQFHYDKTLPELQQVPTVTDDIIAKIKHPSEFSMVFYTDGSAIKHPNVNKSHNAGMGIAQVQFKPEFTVINTWSIPLGDHTAQLAEVAAVEFACKKALKIDGPVLIVTDSFYVAESVNKELPYWQSNGFFNNKKKPLKHVSKWKSIADCIQLKPDIIIIHEKGHQPTASTFHTEGNNLADKLATQGSYVVNAGKRTADGSEFEKRTADGSEFESPKKKAKVE

SEQ ID NO: 684 - protein, 2176 aa, synthetic construct
MPAAKRVKLDGGDKKYSIGLDIGTNSVGWAVITDEYKVPSKKFKVLGNTDRHSIKKNLIGALLFDSGETAEATRLKRTARRRYTRRKNRICYLQEIFSNEMAKVDDSFFHRLEESFLVEEDKKHERHPIFGNIVDEVAYHEKYPTIYHLRKKLVDSTDKADLRLIYLALAHMIKFRGHFLIEGDLNPDNSDVDKLFIQLVQTYNQLFEENPINASGVDAKAILSARLSKSRRLENLIAQLPGEKKNGLFGNLIALSLGLTPNFKSNFDLAEDAKLQLSKDTYDDDLDNLLAQIGDQYADLFLAAKNLSDAILLSDILRVNTEITKAPLSASMIKRYDEHHQDLTLLKALVRQQLPEKYKEIFFDQSKNGYAGYIDGGASQEEFYKFIKPILEKMDGTEELLVKLNREDLLRKQRTFDNGSIPHQIHLGELHAILRRQEDFYPFLKDNREKIEKILTFRIPYYVGPLARGNSRFAWMTRKSEETITPWNFEEVVDKGASAQSFIERMTNFDKNLPNEKVLPKHSLLYEYFTVYNELTKVKYVTEGMRKPAFLSGEQKKAIVDLLFKTNRKVTVKQLKEDYFKKIECFDSVEISGVEDRFNASLGTYHDLLKIIKDKDFLDNEENEDILEDIVLTLTLFEDREMIEERLKTYAHLFDDKVMKQLKRRRYTGWGRLSRKLINGIRDKQSGKTILDFLKSDGFANRNFMQLIHDDSLTFKEDIQKAQVSGQGDSLHEHIANLAGSPAIKKGILQTVKVVDELVKVMGRHKPENIVIEMARENQTTQKGQKNSRERMKRIEEGIKELGSQILKEHPVENTQLQNEKLYLYYLQNGRDMYVDQELDINRLSDYDVDHIVPQSFLKDDSIDNKVLTRSDKARGKSDNVPSEEVVKKMKNYWRQLLNAKLITQRKFDNLTKAERGGLSELDKAGFIKRQLVETRQITKHVAQILDSRMNTKYDENDKLIREVKVITLKSKLVSDFRKDFQFYKVREINNYHHAHDAYLNAVVGTALIKKYPKLESEFVYGDYKVYDVRKMIAKSEQEIGKATAKYFFYSNIMNFFKTEITLANGEIRKRPLIETNGETGEIVWDKGRDFATVRKVLSMPQVNIVKKTEVQTGGFSKESILPKRNSDKLIARKKDWDPKKYGGFDSPTVAYSVLVVAKVEKGKSKKLKSVKELLGITIMERSSFEKNPIDFLEAKGYKEVKKDLIIKLPKYSLFELENGRKRMLASAGELQKGNELALPSKYVNFLYLASHYEKLKGSPEDNEQKQLFVEQHKHYLDEIIEQISEFSKRVILADANLDKVLSAYNKHRDKPIREQAENIIHLFTLTNLGAPAAFKYFDTTIDRKRYTSTKEVLDATLIHQSITGLYETRIDLSQLGGDGGGGSEAAAKGSSGGMDPLQLLQPLEAEIKGTKLKAHWNSGATITCVPQAFLEEEVPIKNIWIKTIHGEKEQPVYYLTFKIQGRKVEAEVISSPYDYILVSPSDIPWLMKKPLQLTTLVPLQEYEERLLKQTMLTGSYKEKLQSLFLKYDALWQHWENQVGHRRIKPHHIATGTVNPRPQKQYPINPKAKASIQTVINDLLKQGVLIQQNSIMNTPVYPVPKPDGKWRMVLDYREVNKTIPLIAAQNQHSAGILSSIFRGKYKTTLDLSNGFWAHSITPESYWLTAFTWLGQQYCWTRLPQGFLNSPALFNADVVDLLKEVPNVQVYVDDIYISHDDPREHLEQLEKVFSLLLNAGYVVSLKKSEIAQHEVEFLGFNITKEGRGLTETFKQKLLNITPPRDLKQLQSILGKLNFARNFIPNFSELVKPLYNIIATAPGKYITWTTDNSQQLQNIISMLNSAENLEERNPEVRLIMKVNTSPSAGYIRFYNEFAKRPIMYLNYVYTKAEVKFTNTEKLLTTIHKGLIKALDLGMGQEILVYSPIVSMTKIQKTPLPERKALPIRWITWMSYLEDPRIQFHYDKTLPELQQVPTVTDDIIAKIKHPSEFSMVFYTDGSAIKHPNVNKSHNAGMGIAQVQFKPEFTVINTWSIPLGDHTAQLAEVAAVEFACKKALKIDGPVLIVTDSFYVAESVNKELPYWQSNGFFNNKKKPLKHVSKWKSIADCIQLKPDIIIIHEKGHQPTASTFHTEGNNLADKLATQGSYVVNAGKRTADGSEFEKRTADGSEFESPKKKAKVE

SEQ ID NO: 685 - protein, 2176 aa, synthetic construct
MPAAKRVKLDGGDKKYSIGLDIGTNSVGWAVITDEYKVPSKKFKVLGNTDRHSIKKNLIGALLFDSGETAEATRLKRTARRRYTRRKNRICYLQEIFSNEMAKVDDSFFHRLEESFLVEEDKKHERHPIFGNIVDEVAYHEKYPTIYHLRKKLVDSTDKADLRLIYLALAHMIKFRGHFLIEGDLNPDNSDVDKLFIQLVQTYNQLFEENPINASGVDAKAILSARLSKSRRLENLIAQLPGEKKNGLFGNLIALSLGLTPNFKSNFDLAEDAKLQLSKDTYDDDLDNLLAQIGDQYADLFLAAKNLSDAILLSDILRVNTEITKAPLSASMIKRYDEHHQDLTLLKALVRQQLPEKYKEIFFDQSKNGYAGYIDGGASQEEFYKFIKPILEKMDGTEELLVKLNREDLLRKQRTFDNGSIPHQIHLGELHAILRRQEDFYPFLKDNREKIEKILTFRIPYYVGPLARGNSRFAWMTRKSEETITPWNFEEVVDKGASAQSFIERMTNFDKNLPNEKVLPKHSLLYEYFTVYNELTKVKYVTEGMRKPAFLSGEQKKAIVDLLFKTNRKVTVKQLKEDYFKKIECFDSVEISGVEDRFNASLGTYHDLLKIIKDKDFLDNEENEDILEDIVLTLTLFEDREMIEERLKTYAHLFDDKVMKQLKRRRYTGWGRLSRKLINGIRDKQSGKTILDFLKSDGFANRNFMQLIHDDSLTFKEDIQKAQVSGQGDSLHEHIANLAGSPAIKKGILQTVKVVDELVKVMGRHKPENIVIEMARENQTTQKGQKNSRERMKRIEEGIKELGSQILKEHPVENTQLQNEKLYLYYLQNGRDMYVDQELDINRLSDYDVDHIVPQSFLKDDSIDNKVLTRSDKARGKSDNVPSEEVVKKMKNYWRQLLNAKLITQRKFDNLTKAERGGLSELDKAGFIKRQLVETRQITKHVAQILDSRMNTKYDENDKLIREVKVITLKSKLVSDFRKDFQFYKVREINNYHHAHDAYLNAVVGTALIKKYPKLESEFVYGDYKVYDVRKMIAKSEQEIGKATAKYFFYSNIMNFFKTEITLANGEIRKRPLIETNGETGEIVWDKGRDFATVRKVLSMPQVNIVKKTEVQTGGFSKESILPKRNSDKLIARKKDWDPKKYGGFDSPTVAYSVLVVAKVEKGKSKKLKSVKELLGITIMERSSFEKNPIDFLEAKGYKEVKKDLIIKLPKYSLFELENGRKRMLASAGELQKGNELALPSKYVNFLYLASHYEKLKGSPEDNEQKQLFVEQHKHYLDEIIEQISEFSKRVILADANLDKVLSAYNKHRDKPIREQAENIIHLFTLTNLGAPAAFKYFDTTIDRKRYTSTKEVLDATLIHQSITGLYETRIDLSQLGGDGGGGGEAAAKGSSGGMDPLQLLQPLEAEIKGTKLKAHWNSGATITCVPQAFLEEEVPIKNIWIKTIHGEKEQPVYYLTFKIQGRKVEAEVISSPYDYILVSPSDIPWLMKKPLQLTTLVPLQEYEERLLKQTMLTGSYKEKLQSLFLKYDALWQHWENQVGHRRIKPHHIATGTVNPRPQKQYPINPKAKASIQTVINDLLKQGVLIQQNSIMNTPVYPVPKPDGKWRMVLDYREVNKTIPLIAAQNQHSAGILSSIFRGKYKTTLDLSNGFWAHSITPESYWLTAFTWLGQQYCWTRLPQGFLNSPALFNADVVDLLKEVPNVQVYVDDIYISHDDPREHLEQLEKVFSLLLNAGYVVSLKKSEIAQHEVEFLGFNITKEGRGLTETFKQKLLNITPPRDLKQLQSILGKLNFARNFIPNFSELVKPLYNIIATAPGKYITWTTDNSQQLQNIISMLNSAENLEERNPEVRLIMKVNTSPSAGYIRFYNEFAKRPIMYLNYVYTKAEVKFTNTEKLLTTIHKGLIKALDLGMGQEILVYSPIVSMTKIQKTPLPERKALPIRWITWMSYLEDPRIQFHYDKTLPELQQVPTVTDDIIAKIKHPSEFSMVFYTDGSAIKHPNVNKSHNAGMGIAQVQFKPEFTVINTWSIPLGDHTAQLAEVAAVEFACKKALKIDGPVLIVTDSFYVAESVNKELPYWQSNGFFNNKKKPLKHVSKWKSIADCIQLKPDIIIIHEKGHQPTASTFHTEGNNLADKLATQGSYVVNAGKRTADGSEFEKRTADGSEFESPKKKAKVE

SEQ ID NO: 686 - protein, 2176 aa, synthetic construct
MPAAKRVKLDGGDKKYSIGLDIGTNSVGWAVITDEYKVPSKKFKVLGNTDRHSIKKNLIGALLFDSGETAEATRLKRTARRRYTRRKNRICYLQEIFSNEMAKVDDSFFHRLEESFLVEEDKKHERHPIFGNIVDEVAYHEKYPTIYHLRKKLVDSTDKADLRLIYLALAHMIKFRGHFLIEGDLNPDNSDVDKLFIQLVQTYNQLFEENPINASGVDAKAILSARLSKSRRLENLIAQLPGEKKNGLFGNLIALSLGLTPNFKSNFDLAEDAKLQLSKDTYDDDLDNLLAQIGDQYADLFLAAKNLSDAILLSDILRVNTEITKAPLSASMIKRYDEHHQDLTLLKALVRQQLPEKYKEIFFDQSKNGYAGYIDGGASQEEFYKFIKPILEKMDGTEELLVKLNREDLLRKQRTFDNGSIPHQIHLGELHAILRRQEDFYPFLKDNREKIEKILTFRIPYYVGPLARGNSRFAWMTRKSEETITPWNFEEVVDKGASAQSFIERMTNFDKNLPNEKVLPKHSLLYEYFTVYNELTKVKYVTEGMRKPAFLSGEQKKAIVDLLFKTNRKVTVKQLKEDYFKKIECFDSVEISGVEDRFNASLGTYHDLLKIIKDKDFLDNEENEDILEDIVLTLTLFEDREMIEERLKTYAHLFDDKVMKQLKRRRYTGWGRLSRKLINGIRDKQSGKTILDFLKSDGFANRNFMQLIHDDSLTFKEDIQKAQVSGQGDSLHEHIANLAGSPAIKKGILQTVKVVDELVKVMGRHKPENIVIEMARENQTTQKGQKNSRERMKRIEEGIKELGSQILKEHPVENTQLQNEKLYLYYLQNGRDMYVDQELDINRLSDYDVDHIVPQSFLKDDSIDNKVLTRSDKARGKSDNVPSEEVVKKMKNYWRQLLNAKLITQRKFDNLTKAERGGLSELDKAGFIKRQLVETRQITKHVAQILDSRMNTKYDENDKLIREVKVITLKSKLVSDFRKDFQFYKVREINNYHHAHDAYLNAVVGTALIKKYPKLESEFVYGDYKVYDVRKMIAKSEQEIGKATAKYFFYSNIMNFFKTEITLANGEIRKRPLIETNGETGEIVWDKGRDFATVRKVLSMPQVNIVKKTEVQTGGFSKESILPKRNSDKLIARKKDWDPKKYGGFDSPTVAYSVLVVAKVEKGKSKKLKSVKELLGITIMERSSFEKNPIDFLEAKGYKEVKKDLIIKLPKYSLFELENGRKRMLASAGELQKGNELALPSKYVNFLYLASHYEKLKGSPEDNEQKQLFVEQHKHYLDEIIEQISEFSKRVILADANLDKVLSAYNKHRDKPIREQAENIIHLFTLTNLGAPAAFKYFDTTIDRKRYTSTKEVLDATLIHQSITGLYETRIDLSQLGGDGGEAAAKPAPGSSGGMDPLQLLQPLEAEIKGTKLKAHWNSGATITCVPQAFLEEEVPIKNIWIKTIHGEKEQPVYYLTFKIQGRKVEAEVISSPYDYILVSPSDIPWLMKKPLQLTTLVPLQEYEERLLKQTMLTGSYKEKLQSLFLKYDALWQHWENQVGHRRIKPHHIATGTVNPRPQKQYPINPKAKASIQTVINDLLKQGVLIQQNSIMNTPVYPVPKPDGKWRMVLDYREVNKTIPLIAAQNQHSAGILSSIFRGKYKTTLDLSNGFWAHSITPESYWLTAFTWLGQQYCWTRLPQGFLNSPALFNADVVDLLKEVPNVQVYVDDIYISHDDPREHLEQLEKVFSLLLNAGYVVSLKKSEIAQHEVEFLGFNITKEGRGLTETFKQKLLNITPPRDLKQLQSILGKLNFARNFIPNFSELVKPLYNIIATAPGKYITWTTDNSQQLQNIISMLNSAENLEERNPEVRLIMKVNTSPSAGYIRFYNEFAKRPIMYLNYVYTKAEVKFTNTEKLLTTIHKGLIKALDLGMGQEILVYSPIVSMTKIQKTPLPERKALPIRWITWMSYLEDPRIQFHYDKTLPELQQVPTVTDDIIAKIKHPSEFSMVFYTDGSAIKHPNVNKSHNAGMGIAQVQFKPEFTVINTWSIPLGDHTAQLAEVAAVEFACKKALKIDGPVLIVTDSFYVAESVNKELPYWQSNGFFNNKKKPLKHVSKWKSIADCIQLKPDIIIIHEKGHQPTASTFHTEGNNLADKLATQGSYVVNAGKRTADGSEFEKRTADGSEFESPKKKAKVE

SEQ ID NO: 687 - protein, 2174 aa, synthetic construct
MPAAKRVKLDGGDKKYSIGLDIGTNSVGWAVITDEYKVPSKKFKVLGNTDRHSIKKNLIGALLFDSGETAEATRLKRTARRRYTRRKNRICYLQEIFSNEMAKVDDSFFHRLEESFLVEEDKKHERHPIFGNIVDEVAYHEKYPTIYHLRKKLVDSTDKADLRLIYLALAHMIKFRGHFLIEGDLNPDNSDVDKLFIQLVQTYNQLFEENPINASGVDAKAILSARLSKSRRLENLIAQLPGEKKNGLFGNLIALSLGLTPNFKSNFDLAEDAKLQLSKDTYDDDLDNLLAQIGDQYADLFLAAKNLSDAILLSDILRVNTEITKAPLSASMIKRYDEHHQDLTLLKALVRQQLPEKYKEIFFDQSKNGYAGYIDGGASQEEFYKFIKPILEKMDGTEELLVKLNREDLLRKQRTFDNGSIPHQIHLGELHAILRRQEDFYPFLKDNREKIEKILTFRIPYYVGPLARGNSRFAWMTRKSEETITPWNFEEVVDKGASAQSFIERMTNFDKNLPNEKVLPKHSLLYEYFTVYNELTKVKYVTEGMRKPAFLSGEQKKAIVDLLFKTNRKVTVKQLKEDYFKKIECFDSVEISGVEDRFNASLGTYHDLLKIIKDKDFLDNEENEDILEDIVLTLTLFEDREMIEERLKTYAHLFDDKVMKQLKRRRYTGWGRLSRKLINGIRDKQSGKTILDFLKSDGFANRNFMQLIHDDSLTFKEDIQKAQVSGQGDSLHEHIANLAGSPAIKKGILQTVKVVDELVKVMGRHKPENIVIEMARENQTTQKGQKNSRERMKRIEEGIKELGSQILKEHPVENTQLQNEKLYLYYLQNGRDMYVDQELDINRLSDYDVDHIVPQSFLKDDSIDNKVLTRSDKARGKSDNVPSEEVVKKMKNYWRQLLNAKLITQRKFDNLTKAERGGLSELDKAGFIKRQLVETRQITKHVAQILDSRMNTKYDENDKLIREVKVITLKSKLVSDFRKDFQFYKVREINNYHHAHDAYLNAVVGTALIKKYPKLESEFVYGDYKVYDVRKMIAKSEQEIGKATAKYFFYSNIMNFFKTEITLANGEIRKRPLIETNGETGEIVWDKGRDFATVRKVLSMPQVNIVKKTEVQTGGFSKESILPKRNSDKLIARKKDWDPKKYGGFDSPTVAYSVLVVAKVEKGKSKKLKSVKELLGITIMERSSFEKNPIDFLEAKGYKEVKKDLIIKLPKYSLFELENGRKRMLASAGELQKGNELALPSKYVNFLYLASHYEKLKGSPEDNEQKQLFVEQHKHYLDEIIEQISEFSKRVILADANLDKVLSAYNKHRDKPIREQAENIIHLFTLTNLGAPAAFKYFDTTIDRKRYTSTKEVLDATLIHQSITGLYETRIDLSQLGGDGGGGGPAPGSSGGMDPLQLLQPLEAEIKGTKLKAHWNSGATITCVPQAFLEEEVPIKNIWIKTIHGEKEQPVYYLTFKIQGRKVEAEVISSPYDYILVSPSDIPWLMKKPLQLTTLVPLQEYEERLLKQTMLTGSYKEKLQSLFLKYDALWQHWENQVGHRRIKPHHIATGTVNPRPQKQYPINPKAKASIQTVINDLLKQGVLIQQNSIMNTPVYPVPKPDGKWRMVLDYREVNKTIPLIAAQNQHSAGILSSIFRGKYKTTLDLSNGFWAHSITPESYWLTAFTWLGQQYCWTRLPQGFLNSPALFNADVVDLLKEVPNVQVYVDDIYISHDDPREHLEQLEKVFSLLLNAGYVVSLKKSEIAQHEVEFLGFNITKEGRGLTETFKQKLLNITPPRDLKQLQSILGKLNFARNFIPNFSELVKPLYNIIATAPGKYITWTTDNSQQLQNIISMLNSAENLEERNPEVRLIMKVNTSPSAGYIRFYNEFAKRPIMYLNYVYTKAEVKFTNTEKLLTTIHKGLIKALDLGMGQEILVYSPIVSMTKIQKTPLPERKALPIRWITWMSYLEDPRIQFHYDKTLPELQQVPTVTDDIIAKIKHPSEFSMVFYTDGSAIKHPNVNKSHNAGMGIAQVQFKPEFTVINTWSIPLGDHTAQLAEVAAVEFACKKALKIDGPVLIVTDSFYVAESVNKELPYWQSNGFFNNKKKPLKHVSKWKSIADCIQLKPDIIIIHEKGHQPTASTFHTEGNNLADKLATQGSYVVNAGKRTADGSEFEKRTADGSEFESPKKKAKVE

SEQ ID NO: 688 - protein, 2173 aa, synthetic construct
MPAAKRVKLDGGDKKYSIGLDIGTNSVGWAVITDEYKVPSKKFKVLGNTDRHSIKKNLIGALLFDSGETAEATRLKRTARRRYTRRKNRICYLQEIFSNEMAKVDDSFFHRLEESFLVEEDKKHERHPIFGNIVDEVAYHEKYPTIYHLRKKLVDSTDKADLRLIYLALAHMIKFRGHFLIEGDLNPDNSDVDKLFIQLVQTYNQLFEENPINASGVDAKAILSARLSKSRRLENLIAQLPGEKKNGLFGNLIALSLGLTPNFKSNFDLAEDAKLQLSKDTYDDDLDNLLAQIGDQYADLFLAAKNLSDAILLSDILRVNTEITKAPLSASMIKRYDEHHQDLTLLKALVRQQLPEKYKEIFFDQSKNGYAGYIDGGASQEEFYKFIKPILEKMDGTEELLVKLNREDLLRKQRTFDNGSIPHQIHLGELHAILRRQEDFYPFLKDNREKIEKILTFRIPYYVGPLARGNSRFAWMTRKSEETITPWNFEEVVDKGASAQSFIERMTNFDKNLPNEKVLPKHSLLYEYFTVYNELTKVKYVTEGMRKPAFLSGEQKKAIVDLLFKTNRKVTVKQLKEDYFKKIECFDSVEISGVEDRFNASLGTYHDLLKIIKDKDFLDNEENEDILEDIVLTLTLFEDREMIEERLKTYAHLFDDKVMKQLKRRRYTGWGRLSRKLINGIRDKQSGKTILDFLKSDGFANRNFMQLIHDDSLTFKEDIQKAQVSGQGDSLHEHIANLAGSPAIKKGILQTVKVVDELVKVMGRHKPENIVIEMARENQTTQKGQKNSRERMKRIEEGIKELGSQILKEHPVENTQLQNEKLYLYYLQNGRDMYVDQELDINRLSDYDVDHIVPQSFLKDDSIDNKVLTRSDKARGKSDNVPSEEVVKKMKNYWRQLLNAKLITQRKFDNLTKAERGGLSELDKAGFIKRQLVETRQITKHVAQILDSRMNTKYDENDKLIREVKVITLKSKLVSDFRKDFQFYKVREINNYHHAHDAYLNAVVGTALIKKYPKLESEFVYGDYKVYDVRKMIAKSEQEIGKATAKYFFYSNIMNFFKTEITLANGEIRKRPLIETNGETGEIVWDKGRDFATVRKVLSMPQVNIVKKTEVQTGGFSKESILPKRNSDKLIARKKDWDPKKYGGFDSPTVAYSVLVVAKVEKGKSKKLKSVKELLGITIMERSSFEKNPIDFLEAKGYKEVKKDLIIKLPKYSLFELENGRKRMLASAGELQKGNELALPSKYVNFLYLASHYEKLKGSPEDNEQKQLFVEQHKHYLDEIIEQISEFSKRVILADANLDKVLSAYNKHRDKPIREQAENIIHLFTLTNLGAPAAFKYFDTTIDRKRYTSTKEVLDATLIHQSITGLYETRIDLSQLGGDGGEAAAKGSSGGMDPLQLLQPLEAEIKGTKLKAHWNSGATITCVPQAFLEEEVPIKNIWIKTIHGEKEQPVYYLTFKIQGRKVEAEVISSPYDYILVSPSDIPWLMKKPLQLTTLVPLQEYEERLLKQTMLTGSYKEKLQSLFLKYDALWQHWENQVGHRRIKPHHIATGTVNPRPQKQYPINPKAKASIQTVINDLLKQGVLIQQNSIMNTPVYPVPKPDGKWRMVLDYREVNKTIPLIAAQNQHSAGILSSIFRGKYKTTLDLSNGFWAHSITPESYWLTAFTWLGQQYCWTRLPQGFLNSPALFNADVVDLLKEVPNVQVYVDDIYISHDDPREHLEQLEKVFSLLLNAGYVVSLKKSEIAQHEVEFLGFNITKEGRGLTETFKQKLLNITPPRDLKQLQSILGKLNFARNFIPNFSELVKPLYNIIATAPGKYITWTTDNSQQLQNIISMLNSAENLEERNPEVRLIMKVNTSPSAGYIRFYNEFAKRPIMYLNYVYTKAEVKFTNTEKLLTTIHKGLIKALDLGMGQEILVYSPIVSMTKIQKTPLPERKALPIRWITWMSYLEDPRIQFHYDKTLPELQQVPTVTDDIIAKIKHPSEFSMVFYTDGSAIKHPNVNKSHNAGMGIAQVQFKPEFTVINTWSIPLGDHTAQLAEVAAVEFACKKALKIDGPVLIVTDSFYVAESVNKELPYWQSNGFFNNKKKPLKHVSKWKSIADCIQLKPDIIIIHEKGHQPTASTFHTEGNNLADKLATQGSYVVNAGKRTADGSEFEKRTADGSEFESPKKKAKVE

SEQ ID NO: 689 - protein, 2176 aa, synthetic construct
MPAAKRVKLDGGDKKYSIGLDIGTNSVGWAVITDEYKVPSKKFKVLGNTDRHSIKKNLIGALLFDSGETAEATRLKRTARRRYTRRKNRICYLQEIFSNEMAKVDDSFFHRLEESFLVEEDKKHERHPIFGNIVDEVAYHEKYPTIYHLRKKLVDSTDKADLRLIYLALAHMIKFRGHFLIEGDLNPDNSDVDKLFIQLVQTYNQLFEENPINASGVDAKAILSARLSKSRRLENLIAQLPGEKKNGLFGNLIALSLGLTPNFKSNFDLAEDAKLQLSKDTYDDDLDNLLAQIGDQYADLFLAAKNLSDAILLSDILRVNTEITKAPLSASMIKRYDEHHQDLTLLKALVRQQLPEKYKEIFFDQSKNGYAGYIDGGASQEEFYKFIKPILEKMDGTEELLVKLNREDLLRKQRTFDNGSIPHQIHLGELHAILRRQEDFYPFLKDNREKIEKILTFRIPYYVGPLARGNSRFAWMTRKSEETITPWNFEEVVDKGASAQSFIERMTNFDKNLPNEKVLPKHSLLYEYFTVYNELTKVKYVTEGMRKPAFLSGEQKKAIVDLLFKTNRKVTVKQLKEDYFKKIECFDSVEISGVEDRFNASLGTYHDLLKIIKDKDFLDNEENEDILEDIVLTLTLFEDREMIEERLKTYAHLFDDKVMKQLKRRRYTGWGRLSRKLINGIRDKQSGKTILDFLKSDGFANRNFMQLIHDDSLTFKEDIQKAQVSGQGDSLHEHIANLAGSPAIKKGILQTVKVVDELVKVMGRHKPENIVIEMARENQTTQKGQKNSRERMKRIEEGIKELGSQILKEHPVENTQLQNEKLYLYYLQNGRDMYVDQELDINRLSDYDVDHIVPQSFLKDDSIDNKVLTRSDKARGKSDNVPSEEVVKKMKNYWRQLLNAKLITQRKFDNLTKAERGGLSELDKAGFIKRQLVETRQITKHVAQILDSRMNTKYDENDKLIREVKVITLKSKLVSDFRKDFQFYKVREINNYHHAHDAYLNAVVGTALIKKYPKLESEFVYGDYKVYDVRKMIAKSEQEIGKATAKYFFYSNIMNFFKTEITLANGEIRKRPLIETNGETGEIVWDKGRDFATVRKVLSMPQVNIVKKTEVQTGGFSKESILPKRNSDKLIARKKDWDPKKYGGFDSPTVAYSVLVVAKVEKGKSKKLKSVKELLGITIMERSSFEKNPIDFLEAKGYKEVKKDLIIKLPKYSLFELENGRKRMLASAGELQKGNELALPSKYVNFLYLASHYEKLKGSPEDNEQKQLFVEQHKHYLDEIIEQISEFSKRVILADANLDKVLSAYNKHRDKPIREQAENIIHLFTLTNLGAPAAFKYFDTTIDRKRYTSTKEVLDATLIHQSITGLYETRIDLSQLGGDGGEAAAKPAPGGSGGMNPLQLLQPLPAEVKGTKLLAHWNSGATITCIPESFLEDEQPIKQTLIKTIHGEKQQNVYYLTFKVKGRKVEAEVIASPYEYILLSPTDVPWLTQQPLQLTILVPLQEYQDRILNKTALPEEQKQQLKALFTKYDNLWQHWENQVGHRKIRPHNIATGDYPPRPQKQYPINPKAKPSIQIVIDDLLKQGVLTPQNSTMNTPVYPVPKPDGRWRMVLDYREVNKTIPLTAAQNQHSAGILATIVRQKYKTTLDLANGFWAHPITPDSYWLTAFTWQGKQYCWTRLPQGFLNSPALFTADAVDLLKEVPNVQVYVDDIYLSHDNPHEHIQQLEKVFQILLQAGYVVSLKKSEIGQRTVEFLGFNITKEGRGLTDTFKTKLLNVTPPKDLKQLQSILGLLNFARNFIPNFAELVQTLYNLIASSKGKYIEWTEDNTKQLNKVIEALNTASNLEERLPDQRLVIKVNTSPSAGYVRYYNESGKKPIMYLNYVFSKAELKFSMLEKLLTTMHKALIKAMDLAMGQEILVYSPIVSMTKIQKTPLPERKALPIRWITWMTYLEDPRIQFHYDKTLPELKHIPDVYTSSIPPLKHPSQYEGVFCTDGSAIKSPDPTKSNNAGMGIVHAIYNPEYKILNQWSIPLGHHTAQMAEIAAVEFACKKALKVPGPVLVITDSFYVAESANKELPYWKSNGFVNNKKEPLKHISKWKSIAECLSIKPDITIQHEKGHQPINTSIHTEGNALADKLATQGSYVVNAGKRTADGSEFEKRTADGSEFESPKKKAKVE

SEQ ID NO: 690 - protein, 2176 aa, synthetic construct
MPAAKRVKLDGGDKKYSIGLDIGTNSVGWAVITDEYKVPSKKFKVLGNTDRHSIKKNLIGALLFDSGETAEATRLKRTARRRYTRRKNRICYLQEIFSNEMAKVDDSFFHRLEESFLVEEDKKHERHPIFGNIVDEVAYHEKYPTIYHLRKKLVDSTDKADLRLIYLALAHMIKFRGHFLIEGDLNPDNSDVDKLFIQLVQTYNQLFEENPINASGVDAKAILSARLSKSRRLENLIAQLPGEKKNGLFGNLIALSLGLTPNFKSNFDLAEDAKLQLSKDTYDDDLDNLLAQIGDQYADLFLAAKNLSDAILLSDILRVNTEITKAPLSASMIKRYDEHHQDLTLLKALVRQQLPEKYKEIFFDQSKNGYAGYIDGGASQEEFYKFIKPILEKMDGTEELLVKLNREDLLRKQRTFDNGSIPHQIHLGELHAILRRQEDFYPFLKDNREKIEKILTFRIPYYVGPLARGNSRFAWMTRKSEETITPWNFEEVVDKGASAQSFIERMTNFDKNLPNEKVLPKHSLLYEYFTVYNELTKVKYVTEGMRKPAFLSGEQKKAIVDLLFKTNRKVTVKQLKEDYFKKIECFDSVEISGVEDRFNASLGTYHDLLKIIKDKDFLDNEENEDILEDIVLTLTLFEDREMIEERLKTYAHLFDDKVMKQLKRRRYTGWGRLSRKLINGIRDKQSGKTILDFLKSDGFANRNFMQLIHDDSLTFKEDIQKAQVSGQGDSLHEHIANLAGSPAIKKGILQTVKVVDELVKVMGRHKPENIVIEMARENQTTQKGQKNSRERMKRIEEGIKELGSQILKEHPVENTQLQNEKLYLYYLQNGRDMYVDQELDINRLSDYDVDHIVPQSFLKDDSIDNKVLTRSDKARGKSDNVPSEEVVKKMKNYWRQLLNAKLITQRKFDNLTKAERGGLSELDKAGFIKRQLVETRQITKHVAQILDSRMNTKYDENDKLIREVKVITLKSKLVSDFRKDFQFYKVREINNYHHAHDAYLNAVVGTALIKKYPKLESEFVYGDYKVYDVRKMIAKSEQEIGKATAKYFFYSNIMNFFKTEITLANGEIRKRPLIETNGETGEIVWDKGRDFATVRKVLSMPQVNIVKKTEVQTGGFSKESILPKRNSDKLIARKKDWDPKKYGGFDSPTVAYSVLVVAKVEKGKSKKLKSVKELLGITIMERSSFEKNPIDFLEAKGYKEVKKDLIIKLPKYSLFELENGRKRMLASAGELQKGNELALPSKYVNFLYLASHYEKLKGSPEDNEQKQLFVEQHKHYLDEIIEQISEFSKRVILADANLDKVLSAYNKHRDKPIREQAENIIHLFTLTNLGAPAAFKYFDTTIDRKRYTSTKEVLDATLIHQSITGLYETRIDLSQLGGDGGGGSEAAAKPAPGGMNPLQLLQPLPAEVKGTKLLAHWNSGATITCIPESFLEDEQPIKQTLIKTIHGEKQQNVYYLTFKVKGRKVEAEVIASPYEYILLSPTDVPWLTQQPLQLTILVPLQEYQDRILNKTALPEEQKQQLKALFTKYDNLWQHWENQVGHRKIRPHNIATGDYPPRPQKQYPINPKAKPSIQIVIDDLLKQGVLTPQNSTMNTPVYPVPKPDGRWRMVLDYREVNKTIPLTAAQNQHSAGILATIVRQKYKTTLDLANGFWAHPITPDSYWLTAFTWQGKQYCWTRLPQGFLNSPALFTADAVDLLKEVPNVQVYVDDIYLSHDNPHEHIQQLEKVFQILLQAGYVVSLKKSEIGQRTVEFLGFNITKEGRGLTDTFKTKLLNVTPPKDLKQLQSILGLLNFARNFIPNFAELVQTLYNLIASSKGKYIEWTEDNTKQLNKVIEALNTASNLEERLPDQRLVIKVNTSPSAGYVRYYNESGKKPIMYLNYVFSKAELKFSMLEKLLTTMHKALIKAMDLAMGQEILVYSPIVSMTKIQKTPLPERKALPIRWITWMTYLEDPRIQFHYDKTLPELKHIPDVYTSSIPPLKHPSQYEGVFCTDGSAIKSPDPTKSNNAGMGIVHAIYNPEYKILNQWSIPLGHHTAQMAEIAAVEFACKKALKVPGPVLVITDSFYVAESANKELPYWKSNGFVNNKKEPLKHISKWKSIAECLSIKPDITIQHEKGHQPINTSIHTEGNALADKLATQGSYVVNAGKRTADGSEFEKRTADGSEFESPKKKAKVE

SEQ ID NO: 691 - protein, 2173 aa, synthetic construct
MPAAKRVKLDGGDKKYSIGLDIGTNSVGWAVITDEYKVPSKKFKVLGNTDRHSIKKNLIGALLFDSGETAEATRLKRTARRRYTRRKNRICYLQEIFSNEMAKVDDSFFHRLEESFLVEEDKKHERHPIFGNIVDEVAYHEKYPTIYHLRKKLVDSTDKADLRLIYLALAHMIKFRGHFLIEGDLNPDNSDVDKLFIQLVQTYNQLFEENPINASGVDAKAILSARLSKSRRLENLIAQLPGEKKNGLFGNLIALSLGLTPNFKSNFDLAEDAKLQLSKDTYDDDLDNLLAQIGDQYADLFLAAKNLSDAILLSDILRVNTEITKAPLSASMIKRYDEHHQDLTLLKALVRQQLPEKYKEIFFDQSKNGYAGYIDGGASQEEFYKFIKPILEKMDGTEELLVKLNREDLLRKQRTFDNGSIPHQIHLGELHAILRRQEDFYPFLKDNREKIEKILTFRIPYYVGPLARGNSRFAWMTRKSEETITPWNFEEVVDKGASAQSFIERMTNFDKNLPNEKVLPKHSLLYEYFTVYNELTKVKYVTEGMRKPAFLSGEQKKAIVDLLFKTNRKVTVKQLKEDYFKKIECFDSVEISGVEDRFNASLGTYHDLLKIIKDKDFLDNEENEDILEDIVLTLTLFEDREMIEERLKTYAHLFDDKVMKQLKRRRYTGWGRLSRKLINGIRDKQSGKTILDFLKSDGFANRNFMQLIHDDSLTFKEDIQKAQVSGQGDSLHEHIANLAGSPAIKKGILQTVKVVDELVKVMGRHKPENIVIEMARENQTTQKGQKNSRERMKRIEEGIKELGSQILKEHPVENTQLQNEKLYLYYLQNGRDMYVDQELDINRLSDYDVDHIVPQSFLKDDSIDNKVLTRSDKARGKSDNVPSEEVVKKMKNYWRQLLNAKLITQRKFDNLTKAERGGLSELDKAGFIKRQLVETRQITKHVAQILDSRMNTKYDENDKLIREVKVITLKSKLVSDFRKDFQFYKVREINNYHHAHDAYLNAVVGTALIKKYPKLESEFVYGDYKVYDVRKMIAKSEQEIGKATAKYFFYSNIMNFFKTEITLANGEIRKRPLIETNGETGEIVWDKGRDFATVRKVLSMPQVNIVKKTEVQTGGFSKESILPKRNSDKLIARKKDWDPKKYGGFDSPTVAYSVLVVAKVEKGKSKKLKSVKELLGITIMERSSFEKNPIDFLEAKGYKEVKKDLIIKLPKYSLFELENGRKRMLASAGELQKGNELALPSKYVNFLYLASHYEKLKGSPEDNEQKQLFVEQHKHYLDEIIEQISEFSKRVILADANLDKVLSAYNKHRDKPIREQAENIIHLFTLTNLGAPAAFKYFDTTIDRKRYTSTKEVLDATLIHQSITGLYETRIDLSQLGGDGGGSSEAAAKGGMNPLQLLQPLPAEVKGTKLLAHWNSGATITCIPESFLEDEQPIKQTLIKTIHGEKQQNVYYLTFKVKGRKVEAEVIASPYEYILLSPTDVPWLTQQPLQLTILVPLQEYQDRILNKTALPEEQKQQLKALFTKYDNLWQHWENQVGHRKIRPHNIATGDYPPRPQKQYPINPKAKPSIQIVIDDLLKQGVLTPQNSTMNTPVYPVPKPDGRWRMVLDYREVNKTIPLTAAQNQHSAGILATIVRQKYKTTLDLANGFWAHPITPDSYWLTAFTWQGKQYCWTRLPQGFLNSPALFTADAVDLLKEVPNVQVYVDDIYLSHDNPHEHIQQLEKVFQILLQAGYVVSLKKSEIGQRTVEFLGFNITKEGRGLTDTFKTKLLNVTPPKDLKQLQSILGLLNFARNFIPNFAELVQTLYNLIASSKGKYIEWTEDNTKQLNKVIEALNTASNLEERLPDQRLVIKVNTSPSAGYVRYYNESGKKPIMYLNYVFSKAELKFSMLEKLLTTMHKALIKAMDLAMGQEILVYSPIVSMTKIQKTPLPERKALPIRWITWMTYLEDPRIQFHYDKTLPELKHIPDVYTSSIPPLKHPSQYEGVFCTDGSAIKSPDPTKSNNAGMGIVHAIYNPEYKILNQWSIPLGHHTAQMAEIAAVEFACKKALKVPGPVLVITDSFYVAESANKELPYWKSNGFVNNKKEPLKHISKWKSIAECLSIKPDITIQHEKGHQPINTSIHTEGNALADKLATQGSYVVNAGKRTADGSEFEKRTADGSEFESPKKKAKVE

SEQ ID NO: 692 - protein, 2180 aa, synthetic construct
MPAAKRVKLDGGDKKYSIGLDIGTNSVGWAVITDEYKVPSKKFKVLGNTDRHSIKKNLIGALLFDSGETAEATRLKRTARRRYTRRKNRICYLQEIFSNEMAKVDDSFFHRLEESFLVEEDKKHERHPIFGNIVDEVAYHEKYPTIYHLRKKLVDSTDKADLRLIYLALAHMIKFRGHFLIEGDLNPDNSDVDKLFIQLVQTYNQLFEENPINASGVDAKAILSARLSKSRRLENLIAQLPGEKKNGLFGNLIALSLGLTPNFKSNFDLAEDAKLQLSKDTYDDDLDNLLAQIGDQYADLFLAAKNLSDAILLSDILRVNTEITKAPLSASMIKRYDEHHQDLTLLKALVRQQLPEKYKEIFFDQSKNGYAGYIDGGASQEEFYKFIKPILEKMDGTEELLVKLNREDLLRKQRTFDNGSIPHQIHLGELHAILRRQEDFYPFLKDNREKIEKILTFRIPYYVGPLARGNSRFAWMTRKSEETITPWNFEEVVDKGASAQSFIERMTNFDKNLPNEKVLPKHSLLYEYFTVYNELTKVKYVTEGMRKPAFLSGEQKKAIVDLLFKTNRKVTVKQLKEDYFKKIECFDSVEISGVEDRFNASLGTYHDLLKIIKDKDFLDNEENEDILEDIVLTLTLFEDREMIEERLKTYAHLFDDKVMKQLKRRRYTGWGRLSRKLINGIRDKQSGKTILDFLKSDGFANRNFMQLIHDDSLTFKEDIQKAQVSGQGDSLHEHIANLAGSPAIKKGILQTVKVVDELVKVMGRHKPENIVIEMARENQTTQKGQKNSRERMKRIEEGIKELGSQILKEHPVENTQLQNEKLYLYYLQNGRDMYVDQELDINRLSDYDVDHIVPQSFLKDDSIDNKVLTRSDKARGKSDNVPSEEVVKKMKNYWRQLLNAKLITQRKFDNLTKAERGGLSELDKAGFIKRQLVETRQITKHVAQILDSRMNTKYDENDKLIREVKVITLKSKLVSDFRKDFQFYKVREINNYHHAHDAYLNAVVGTALIKKYPKLESEFVYGDYKVYDVRKMIAKSEQEIGKATAKYFFYSNIMNFFKTEITLANGEIRKRPLIETNGETGEIVWDKGRDFATVRKVLSMPQVNIVKKTEVQTGGFSKESILPKRNSDKLIARKKDWDPKKYGGFDSPTVAYSVLVVAKVEKGKSKKLKSVKELLGITIMERSSFEKNPIDFLEAKGYKEVKKDLIIKLPKYSLFELENGRKRMLASAGELQKGNELALPSKYVNFLYLASHYEKLKGSPEDNEQKQLFVEQHKHYLDEIIEQISEFSKRVILADANLDKVLSAYNKHRDKPIREQAENIIHLFTLTNLGAPAAFKYFDTTIDRKRYTSTKEVLDATLIHQSITGLYETRIDLSQLGGDGGEAAAKGGGGSEAAAKGGMNPLQLLQPLPAEVKGTKLLAHWNSGATITCIPESFLEDEQPIKQTLIKTIHGEKQQNVYYLTFKVKGRKVEAEVIASPYEYILLSPTDVPWLTQQPLQLTILVPLQEYQDRILNKTALPEEQKQQLKALFTKYDNLWQHWENQVGHRKIRPHNIATGDYPPRPQKQYPINPKAKPSIQIVIDDLLKQGVLTPQNSTMNTPVYPVPKPDGRWRMVLDYREVNKTIPLTAAQNQHSAGILATIVRQKYKTTLDLANGFWAHPITPDSYWLTAFTWQGKQYCWTRLPQGFLNSPALFTADAVDLLKEVPNVQVYVDDIYLSHDNPHEHIQQLEKVFQILLQAGYVVSLKKSEIGQRTVEFLGFNITKEGRGLTDTFKTKLLNVTPPKDLKQLQSILGLLNFARNFIPNFAELVQTLYNLIASSKGKYIEWTEDNTKQLNKVIEALNTASNLEERLPDQRLVIKVNTSPSAGYVRYYNESGKKPIMYLNYVFSKAELKFSMLEKLLTTMHKALIKAMDLAMGQEILVYSPIVSMTKIQKTPLPERKALPIRWITWMTYLEDPRIQFHYDKTLPELKHIPDVYTSSIPPLKHPSQYEGVFCTDGSAIKSPDPTKSNNAGMGIVHAIYNPEYKILNQWSIPLGHHTAQMAEIAAVEFACKKALKVPGPVLVITDSFYVAESANKELPYWKSNGFVNNKKEPLKHISKWKSIAECLSIKPDITIQHEKGHQPINTSIHTEGNALADKLATQGSYVVNAGKRTADGSEFEKRTADGSEFESPKKKAKVE

SEQ ID NO: 693 - protein, 2170 aa, synthetic construct
MPAAKRVKLDGGDKKYSIGLDIGTNSVGWAVITDEYKVPSKKFKVLGNTDRHSIKKNLIGALLFDSGETAEATRLKRTARRRYTRRKNRICYLQEIFSNEMAKVDDSFFHRLEESFLVEEDKKHERHPIFGNIVDEVAYHEKYPTIYHLRKKLVDSTDKADLRLIYLALAHMIKFRGHFLIEGDLNPDNSDVDKLFIQLVQTYNQLFEENPINASGVDAKAILSARLSKSRRLENLIAQLPGEKKNGLFGNLIALSLGLTPNFKSNFDLAEDAKLQLSKDTYDDDLDNLLAQIGDQYADLFLAAKNLSDAILLSDILRVNTEITKAPLSASMIKRYDEHHQDLTLLKALVRQQLPEKYKEIFFDQSKNGYAGYIDGGASQEEFYKFIKPILEKMDGTEELLVKLNREDLLRKQRTFDNGSIPHQIHLGELHAILRRQEDFYPFLKDNREKIEKILTFRIPYYVGPLARGNSRFAWMTRKSEETITPWNFEEVVDKGASAQSFIERMTNFDKNLPNEKVLPKHSLLYEYFTVYNELTKVKYVTEGMRKPAFLSGEQKKAIVDLLFKTNRKVTVKQLKEDYFKKIECFDSVEISGVEDRFNASLGTYHDLLKIIKDKDFLDNEENEDILEDIVLTLTLFEDREMIEERLKTYAHLFDDKVMKQLKRRRYTGWGRLSRKLINGIRDKQSGKTILDFLKSDGFANRNFMQLIHDDSLTFKEDIQKAQVSGQGDSLHEHIANLAGSPAIKKGILQTVKVVDELVKVMGRHKPENIVIEMARENQTTQKGQKNSRERMKRIEEGIKELGSQILKEHPVENTQLQNEKLYLYYLQNGRDMYVDQELDINRLSDYDVDHIVPQSFLKDDSIDNKVLTRSDKARGKSDNVPSEEVVKKMKNYWRQLLNAKLITQRKFDNLTKAERGGLSELDKAGFIKRQLVETRQITKHVAQILDSRMNTKYDENDKLIREVKVITLKSKLVSDFRKDFQFYKVREINNYHHAHDAYLNAVVGTALIKKYPKLESEFVYGDYKVYDVRKMIAKSEQEIGKATAKYFFYSNIMNFFKTEITLANGEIRKRPLIETNGETGEIVWDKGRDFATVRKVLSMPQVNIVKKTEVQTGGFSKESILPKRNSDKLIARKKDWDPKKYGGFDSPTVAYSVLVVAKVEKGKSKKLKSVKELLGITIMERSSFEKNPIDFLEAKGYKEVKKDLIIKLPKYSLFELENGRKRMLASAGELQKGNELALPSKYVNFLYLASHYEKLKGSPEDNEQKQLFVEQHKHYLDEIIEQISEFSKRVILADANLDKVLSAYNKHRDKPIREQAENIIHLFTLTNLGAPAAFKYFDTTIDRKRYTSTKEVLDATLIHQSITGLYETRIDLSQLGGDGGPAPAPGGMNPLQLLQPLPAEVKGTKLLAHWNSGATITCIPESFLEDEQPIKQTLIKTIHGEKQQNVYYLTFKVKGRKVEAEVIASPYEYILLSPTDVPWLTQQPLQLTILVPLQEYQDRILNKTALPEEQKQQLKALFTKYDNLWQHWENQVGHRKIRPHNIATGDYPPRPQKQYPINPKAKPSIQIVIDDLLKQGVLTPQNSTMNTPVYPVPKPDGRWRMVLDYREVNKTIPLTAAQNQHSAGILATIVRQKYKTTLDLANGFWAHPITPDSYWLTAFTWQGKQYCWTRLPQGFLNSPALFTADAVDLLKEVPNVQVYVDDIYLSHDNPHEHIQQLEKVFQILLQAGYVVSLKKSEIGQRTVEFLGFNITKEGRGLTDTFKTKLLNVTPPKDLKQLQSILGLLNFARNFIPNFAELVQTLYNLIASSKGKYIEWTEDNTKQLNKVIEALNTASNLEERLPDQRLVIKVNTSPSAGYVRYYNESGKKPIMYLNYVFSKAELKFSMLEKLLTTMHKALIKAMDLAMGQEILVYSPIVSMTKIQKTPLPERKALPIRWITWMTYLEDPRIQFHYDKTLPELKHIPDVYTSSIPPLKHPSQYEGVFCTDGSAIKSPDPTKSNNAGMGIVHAIYNPEYKILNQWSIPLGHHTAQMAEIAAVEFACKKALKVPGPVLVITDSFYVAESANKELPYWKSNGFVNNKKEPLKHISKWKSIAECLSIKPDITIQHEKGHQPINTSIHTEGNALADKLATQGSYVVNAGKRTADGSEFEKRTADGSEFESPKKKAKVE

SEQ ID NO: 694 - protein, 2185 aa, synthetic construct
MPAAKRVKLDGGDKKYSIGLDIGTNSVGWAVITDEYKVPSKKFKVLGNTDRHSIKKNLIGALLFDSGETAEATRLKRTARRRYTRRKNRICYLQEIFSNEMAKVDDSFFHRLEESFLVEEDKKHERHPIFGNIVDEVAYHEKYPTIYHLRKKLVDSTDKADLRLIYLALAHMIKFRGHFLIEGDLNPDNSDVDKLFIQLVQTYNQLFEENPINASGVDAKAILSARLSKSRRLENLIAQLPGEKKNGLFGNLIALSLGLTPNFKSNFDLAEDAKLQLSKDTYDDDLDNLLAQIGDQYADLFLAAKNLSDAILLSDILRVNTEITKAPLSASMIKRYDEHHQDLTLLKALVRQQLPEKYKEIFFDQSKNGYAGYIDGGASQEEFYKFIKPILEKMDGTEELLVKLNREDLLRKQRTFDNGSIPHQIHLGELHAILRRQEDFYPFLKDNREKIEKILTFRIPYYVGPLARGNSRFAWMTRKSEETITPWNFEEVVDKGASAQSFIERMTNFDKNLPNEKVLPKHSLLYEYFTVYNELTKVKYVTEGMRKPAFLSGEQKKAIVDLLFKTNRKVTVKQLKEDYFKKIECFDSVEISGVEDRFNASLGTYHDLLKIIKDKDFLDNEENEDILEDIVLTLTLFEDREMIEERLKTYAHLFDDKVMKQLKRRRYTGWGRLSRKLINGIRDKQSGKTILDFLKSDGFANRNFMQLIHDDSLTFKEDIQKAQVSGQGDSLHEHIANLAGSPAIKKGILQTVKVVDELVKVMGRHKPENIVIEMARENQTTQKGQKNSRERMKRIEEGIKELGSQILKEHPVENTQLQNEKLYLYYLQNGRDMYVDQELDINRLSDYDVDHIVPQSFLKDDSIDNKVLTRSDKARGKSDNVPSEEVVKKMKNYWRQLLNAKLITQRKFDNLTKAERGGLSELDKAGFIKRQLVETRQITKHVAQILDSRMNTKYDENDKLIREVKVITLKSKLVSDFRKDFQFYKVREINNYHHAHDAYLNAVVGTALIKKYPKLESEFVYGDYKVYDVRKMIAKSEQEIGKATAKYFFYSNIMNFFKTEITLANGEIRKRPLIETNGETGEIVWDKGRDFATVRKVLSMPQVNIVKKTEVQTGGFSKESILPKRNSDKLIARKKDWDPKKYGGFDSPTVAYSVLVVAKVEKGKSKKLKSVKELLGITIMERSSFEKNPIDFLEAKGYKEVKKDLIIKLPKYSLFELENGRKRMLASAGELQKGNELALPSKYVNFLYLASHYEKLKGSPEDNEQKQLFVEQHKHYLDEIIEQISEFSKRVILADANLDKVLSAYNKHRDKPIREQAENIIHLFTLTNLGAPAAFKYFDTTIDRKRYTSTKEVLDATLIHQSITGLYETRIDLSQLGGDGGEAAAKEAAAKEAAAKEAAAKGGMNPLQLLQPLPAEVKGTKLLAHWNSGATITCIPESFLEDEQPIKQTLIKTIHGEKQQNVYYLTFKVKGRKVEAEVIASPYEYILLSPTDVPWLTQQPLQLTILVPLQEYQDRILNKTALPEEQKQQLKALFTKYDNLWQHWENQVGHRKIRPHNIATGDYPPRPQKQYPINPKAKPSIQIVIDDLLKQGVLTPQNSTMNTPVYPVPKPDGRWRMVLDYREVNKTIPLTAAQNQHSAGILATIVRQKYKTTLDLANGFWAHPITPDSYWLTAFTWQGKQYCWTRLPQGFLNSPALFTADAVDLLKEVPNVQVYVDDIYLSHDNPHEHIQQLEKVFQILLQAGYVVSLKKSEIGQRTVEFLGFNITKEGRGLTDTFKTKLLNVTPPKDLKQLQSILGLLNFARNFIPNFAELVQTLYNLIASSKGKYIEWTEDNTKQLNKVIEALNTASNLEERLPDQRLVIKVNTSPSAGYVRYYNESGKKPIMYLNYVFSKAELKFSMLEKLLTTMHKALIKAMDLAMGQEILVYSPIVSMTKIQKTPLPERKALPIRWITWMTYLEDPRIQFHYDKTLPELKHIPDVYTSSIPPLKHPSQYEGVFCTDGSAIKSPDPTKSNNAGMGIVHAIYNPEYKILNQWSIPLGHHTAQMAEIAAVEFACKKALKVPGPVLVITDSFYVAESANKELPYWKSNGFVNNKKEPLKHISKWKSIAECLSIKPDITIQHEKGHQPINTSIHTEGNALADKLATQGSYVVNAGKRTADGSEFEKRTADGSEFESPKKKAKVE

SEQ ID NO: 695 - protein, 2081 aa, synthetic construct
MPAAKRVKLDGGDKKYSIGLDIGTNSVGWAVITDEYKVPSKKFKVLGNTDRHSIKKNLIGALLFDSGETAEATRLKRTARRRYTRRKNRICYLQEIFSNEMAKVDDSFFHRLEESFLVEEDKKHERHPIFGNIVDEVAYHEKYPTIYHLRKKLVDSTDKADLRLIYLALAHMIKFRGHFLIEGDLNPDNSDVDKLFIQLVQTYNQLFEENPINASGVDAKAILSARLSKSRRLENLIAQLPGEKKNGLFGNLIALSLGLTPNFKSNFDLAEDAKLQLSKDTYDDDLDNLLAQIGDQYADLFLAAKNLSDAILLSDILRVNTEITKAPLSASMIKRYDEHHQDLTLLKALVRQQLPEKYKEIFFDQSKNGYAGYIDGGASQEEFYKFIKPILEKMDGTEELLVKLNREDLLRKQRTFDNGSIPHQIHLGELHAILRRQEDFYPFLKDNREKIEKILTFRIPYYVGPLARGNSRFAWMTRKSEETITPWNFEEVVDKGASAQSFIERMTNFDKNLPNEKVLPKHSLLYEYFTVYNELTKVKYVTEGMRKPAFLSGEQKKAIVDLLFKTNRKVTVKQLKEDYFKKIECFDSVEISGVEDRFNASLGTYHDLLKIIKDKDFLDNEENEDILEDIVLTLTLFEDREMIEERLKTYAHLFDDKVMKQLKRRRYTGWGRLSRKLINGIRDKQSGKTILDFLKSDGFANRNFMQLIHDDSLTFKEDIQKAQVSGQGDSLHEHIANLAGSPAIKKGILQTVKVVDELVKVMGRHKPENIVIEMARENQTTQKGQKNSRERMKRIEEGIKELGSQILKEHPVENTQLQNEKLYLYYLQNGRDMYVDQELDINRLSDYDVDHIVPQSFLKDDSIDNKVLTRSDKARGKSDNVPSEEVVKKMKNYWRQLLNAKLITQRKFDNLTKAERGGLSELDKAGFIKRQLVETRQITKHVAQILDSRMNTKYDENDKLIREVKVITLKSKLVSDFRKDFQFYKVREINNYHHAHDAYLNAVVGTALIKKYPKLESEFVYGDYKVYDVRKMIAKSEQEIGKATAKYFFYSNIMNFFKTEITLANGEIRKRPLIETNGETGEIVWDKGRDFATVRKVLSMPQVNIVKKTEVQTGGFSKESILPKRNSDKLIARKKDWDPKKYGGFDSPTVAYSVLVVAKVEKGKSKKLKSVKELLGITIMERSSFEKNPIDFLEAKGYKEVKKDLIIKLPKYSLFELENGRKRMLASAGELQKGNELALPSKYVNFLYLASHYEKLKGSPEDNEQKQLFVEQHKHYLDEIIEQISEFSKRVILADANLDKVLSAYNKHRDKPIREQAENIIHLFTLTNLGAPAAFKYFDTTIDRKRYTSTKEVLDATLIHQSITGLYETRIDLSQLGGDGGPAPAPGGVPWLTQQPLQLTILVPLQEYQDRILNKTALPEEQKQQLKALFTKYDNLWQHWENQVGHRKIRPHNIATGDYPPRPQKQYPINPKAKPSIQIVIDDLLKQGVLTPQNSTMNTPVYPVPKPDGRWRMVLDYREVNKTIPLTAAQNQHSAGILATIVRQKYKTTLDLANGFWAHPITPDSYWLTAFTWQGKQYCWTRLPQGFLNSPALFTADAVDLLKEVPNVQVYVDDIYLSHDNPHEHIQQLEKVFQILLQAGYVVSLKKSEIGQRTVEFLGFNITKEGRGLTDTFKTKLLNVTPPKDLKQLQSILGLLNFARNFIPNFAELVQTLYNLIASSKGKYIEWTEDNTKQLNKVIEALNTASNLEERLPDQRLVIKVNTSPSAGYVRYYNESGKKPIMYLNYVFSKAELKFSMLEKLLTTMHKALIKAMDLAMGQEILVYSPIVSMTKIQKTPLPERKALPIRWITWMTYLEDPRIQFHYDKTLPELKHIPDVYTSSIPPLKHPSQYEGVFCTDGSAIKSPDPTKSNNAGMGIVHAIYNPEYKILNQWSIPLGHHTAQMAEIAAVEFACKKALKVPGPVLVITDSFYVAESANKELPYWKSNGFVNNKKEPLKHISKWKSIAECLSIKPDITIQHEKGHQPINTSIHTEGNALADKLATQGSYVVNAGKRTADGSEFEKRTADGSEFESPKKKAKVE

SEQ ID NO: 696 - protein, 2087 aa, synthetic construct
MPAAKRVKLDGGDKKYSIGLDIGTNSVGWAVITDEYKVPSKKFKVLGNTDRHSIKKNLIGALLFDSGETAEATRLKRTARRRYTRRKNRICYLQEIFSNEMAKVDDSFFHRLEESFLVEEDKKHERHPIFGNIVDEVAYHEKYPTIYHLRKKLVDSTDKADLRLIYLALAHMIKFRGHFLIEGDLNPDNSDVDKLFIQLVQTYNQLFEENPINASGVDAKAILSARLSKSRRLENLIAQLPGEKKNGLFGNLIALSLGLTPNFKSNFDLAEDAKLQLSKDTYDDDLDNLLAQIGDQYADLFLAAKNLSDAILLSDILRVNTEITKAPLSASMIKRYDEHHQDLTLLKALVRQQLPEKYKEIFFDQSKNGYAGYIDGGASQEEFYKFIKPILEKMDGTEELLVKLNREDLLRKQRTFDNGSIPHQIHLGELHAILRRQEDFYPFLKDNREKIEKILTFRIPYYVGPLARGNSRFAWMTRKSEETITPWNFEEVVDKGASAQSFIERMTNFDKNLPNEKVLPKHSLLYEYFTVYNELTKVKYVTEGMRKPAFLSGEQKKAIVDLLFKTNRKVTVKQLKEDYFKKIECFDSVEISGVEDRFNASLGTYHDLLKIIKDKDFLDNEENEDILEDIVLTLTLFEDREMIEERLKTYAHLFDDKVMKQLKRRRYTGWGRLSRKLINGIRDKQSGKTILDFLKSDGFANRNFMQLIHDDSLTFKEDIQKAQVSGQGDSLHEHIANLAGSPAIKKGILQTVKVVDELVKVMGRHKPENIVIEMARENQTTQKGQKNSRERMKRIEEGIKELGSQILKEHPVENTQLQNEKLYLYYLQNGRDMYVDQELDINRLSDYDVDHIVPQSFLKDDSIDNKVLTRSDKARGKSDNVPSEEVVKKMKNYWRQLLNAKLITQRKFDNLTKAERGGLSELDKAGFIKRQLVETRQITKHVAQILDSRMNTKYDENDKLIREVKVITLKSKLVSDFRKDFQFYKVREINNYHHAHDAYLNAVVGTALIKKYPKLESEFVYGDYKVYDVRKMIAKSEQEIGKATAKYFFYSNIMNFFKTEITLANGEIRKRPLIETNGETGEIVWDKGRDFATVRKVLSMPQVNIVKKTEVQTGGFSKESILPKRNSDKLIARKKDWDPKKYGGFDSPTVAYSVLVVAKVEKGKSKKLKSVKELLGITIMERSSFEKNPIDFLEAKGYKEVKKDLIIKLPKYSLFELENGRKRMLASAGELQKGNELALPSKYVNFLYLASHYEKLKGSPEDNEQKQLFVEQHKHYLDEIIEQISEFSKRVILADANLDKVLSAYNKHRDKPIREQAENIIHLFTLTNLGAPAAFKYFDTTIDRKRYTSTKEVLDATLIHQSITGLYETRIDLSQLGGDGGPAPGGGEAAAKGGVPWLTQQPLQLTILVPLQEYQDRILNKTALPEEQKQQLKALFTKYDNLWQHWENQVGHRKIRPHNIATGDYPPRPQKQYPINPKAKPSIQIVIDDLLKQGVLTPQNSTMNTPVYPVPKPDGRWRMVLDYREVNKTIPLTAAQNQHSAGILATIVRQKYKTTLDLANGFWAHPITPDSYWLTAFTWQGKQYCWTRLPQGFLNSPALFTADAVDLLKEVPNVQVYVDDIYLSHDNPHEHIQQLEKVFQILLQAGYVVSLKKSEIGQRTVEFLGFNITKEGRGLTDTFKTKLLNVTPPKDLKQLQSILGLLNFARNFIPNFAELVQTLYNLIASSKGKYIEWTEDNTKQLNKVIEALNTASNLEERLPDQRLVIKVNTSPSAGYVRYYNESGKKPIMYLNYVFSKAELKFSMLEKLLTTMHKALIKAMDLAMGQEILVYSPIVSMTKIQKTPLPERKALPIRWITWMTYLEDPRIQFHYDKTLPELKHIPDVYTSSIPPLKHPSQYEGVFCTDGSAIKSPDPTKSNNAGMGIVHAIYNPEYKILNQWSIPLGHHTAQMAEIAAVEFACKKALKVPGPVLVITDSFYVAESANKELPYWKSNGFVNNKKEPLKHISKWKSIAECLSIKPDITIQHEKGHQPINTSIHTEGNALADKLATQGSYVVNAGKRTADGSEFEKRTADGSEFESPKKKAKVE

SEQ ID NO: 697 - protein, 2087 aa, synthetic construct
MPAAKRVKLDGGDKKYSIGLDIGTNSVGWAVITDEYKVPSKKFKVLGNTDRHSIKKNLIGALLFDSGETAEATRLKRTARRRYTRRKNRICYLQEIFSNEMAKVDDSFFHRLEESFLVEEDKKHERHPIFGNIVDEVAYHEKYPTIYHLRKKLVDSTDKADLRLIYLALAHMIKFRGHFLIEGDLNPDNSDVDKLFIQLVQTYNQLFEENPINASGVDAKAILSARLSKSRRLENLIAQLPGEKKNGLFGNLIALSLGLTPNFKSNFDLAEDAKLQLSKDTYDDDLDNLLAQIGDQYADLFLAAKNLSDAILLSDILRVNTEITKAPLSASMIKRYDEHHQDLTLLKALVRQQLPEKYKEIFFDQSKNGYAGYIDGGASQEEFYKFIKPILEKMDGTEELLVKLNREDLLRKQRTFDNGSIPHQIHLGELHAILRRQEDFYPFLKDNREKIEKILTFRIPYYVGPLARGNSRFAWMTRKSEETITPWNFEEVVDKGASAQSFIERMTNFDKNLPNEKVLPKHSLLYEYFTVYNELTKVKYVTEGMRKPAFLSGEQKKAIVDLLFKTNRKVTVKQLKEDYFKKIECFDSVEISGVEDRFNASLGTYHDLLKIIKDKDFLDNEENEDILEDIVLTLTLFEDREMIEERLKTYAHLFDDKVMKQLKRRRYTGWGRLSRKLINGIRDKQSGKTILDFLKSDGFANRNFMQLIHDDSLTFKEDIQKAQVSGQGDSLHEHIANLAGSPAIKKGILQTVKVVDELVKVMGRHKPENIVIEMARENQTTQKGQKNSRERMKRIEEGIKELGSQILKEHPVENTQLQNEKLYLYYLQNGRDMYVDQELDINRLSDYDVDHIVPQSFLKDDSIDNKVLTRSDKARGKSDNVPSEEVVKKMKNYWRQLLNAKLITQRKFDNLTKAERGGLSELDKAGFIKRQLVETRQITKHVAQILDSRMNTKYDENDKLIREVKVITLKSKLVSDFRKDFQFYKVREINNYHHAHDAYLNAVVGTALIKKYPKLESEFVYGDYKVYDVRKMIAKSEQEIGKATAKYFFYSNIMNFFKTEITLANGEIRKRPLIETNGETGEIVWDKGRDFATVRKVLSMPQVNIVKKTEVQTGGFSKESILPKRNSDKLIARKKDWDPKKYGGFDSPTVAYSVLVVAKVEKGKSKKLKSVKELLGITIMERSSFEKNPIDFLEAKGYKEVKKDLIIKLPKYSLFELENGRKRMLASAGELQKGNELALPSKYVNFLYLASHYEKLKGSPEDNEQKQLFVEQHKHYLDEIIEQISEFSKRVILADANLDKVLSAYNKHRDKPIREQAENIIHLFTLTNLGAPAAFKYFDTTIDRKRYTSTKEVLDATLIHQSITGLYETRIDLSQLGGDGGGGGEAAAKGGSGGVPWLTQQPLQLTILVPLQEYQDRILNKTALPEEQKQQLKALFTKYDNLWQHWENQVGHRKIRPHNIATGDYPPRPQKQYPINPKAKPSIQIVIDDLLKQGVLTPQNSTMNTPVYPVPKPDGRWRMVLDYREVNKTIPLTAAQNQHSAGILATIVRQKYKTTLDLANGFWAHPITPDSYWLTAFTWQGKQYCWTRLPQGFLNSPALFTADAVDLLKEVPNVQVYVDDIYLSHDNPHEHIQQLEKVFQILLQAGYVVSLKKSEIGQRTVEFLGFNITKEGRGLTDTFKTKLLNVTPPKDLKQLQSILGLLNFARNFIPNFAELVQTLYNLIASSKGKYIEWTEDNTKQLNKVIEALNTASNLEERLPDQRLVIKVNTSPSAGYVRYYNESGKKPIMYLNYVFSKAELKFSMLEKLLTTMHKALIKAMDLAMGQEILVYSPIVSMTKIQKTPLPERKALPIRWITWMTYLEDPRIQFHYDKTLPELKHIPDVYTSSIPPLKHPSQYEGVFCTDGSAIKSPDPTKSNNAGMGIVHAIYNPEYKILNQWSIPLGHHTAQMAEIAAVEFACKKALKVPGPVLVITDSFYVAESANKELPYWKSNGFVNNKKEPLKHISKWKSIAECLSIKPDITIQHEKGHQPINTSIHTEGNALADKLATQGSYVVNAGKRTADGSEFEKRTADGSEFESPKKKAKVE

SEQ ID NO: 698 - protein, 2087 aa, synthetic construct
MPAAKRVKLDGGDKKYSIGLDIGTNSVGWAVITDEYKVPSKKFKVLGNTDRHSIKKNLIGALLFDSGETAEATRLKRTARRRYTRRKNRICYLQEIFSNEMAKVDDSFFHRLEESFLVEEDKKHERHPIFGNIVDEVAYHEKYPTIYHLRKKLVDSTDKADLRLIYLALAHMIKFRGHFLIEGDLNPDNSDVDKLFIQLVQTYNQLFEENPINASGVDAKAILSARLSKSRRLENLIAQLPGEKKNGLFGNLIALSLGLTPNFKSNFDLAEDAKLQLSKDTYDDDLDNLLAQIGDQYADLFLAAKNLSDAILLSDILRVNTEITKAPLSASMIKRYDEHHQDLTLLKALVRQQLPEKYKEIFFDQSKNGYAGYIDGGASQEEFYKFIKPILEKMDGTEELLVKLNREDLLRKQRTFDNGSIPHQIHLGELHAILRRQEDFYPFLKDNREKIEKILTFRIPYYVGPLARGNSRFAWMTRKSEETITPWNFEEVVDKGASAQSFIERMTNFDKNLPNEKVLPKHSLLYEYFTVYNELTKVKYVTEGMRKPAFLSGEQKKAIVDLLFKTNRKVTVKQLKEDYFKKIECFDSVEISGVEDRFNASLGTYHDLLKIIKDKDFLDNEENEDILEDIVLTLTLFEDREMIEERLKTYAHLFDDKVMKQLKRRRYTGWGRLSRKLINGIRDKQSGKTILDFLKSDGFANRNFMQLIHDDSLTFKEDIQKAQVSGQGDSLHEHIANLAGSPAIKKGILQTVKVVDELVKVMGRHKPENIVIEMARENQTTQKGQKNSRERMKRIEEGIKELGSQILKEHPVENTQLQNEKLYLYYLQNGRDMYVDQELDINRLSDYDVDHIVPQSFLKDDSIDNKVLTRSDKARGKSDNVPSEEVVKKMKNYWRQLLNAKLITQRKFDNLTKAERGGLSELDKAGFIKRQLVETRQITKHVAQILDSRMNTKYDENDKLIREVKVITLKSKLVSDFRKDFQFYKVREINNYHHAHDAYLNAVVGTALIKKYPKLESEFVYGDYKVYDVRKMIAKSEQEIGKATAKYFFYSNIMNFFKTEITLANGEIRKRPLIETNGETGEIVWDKGRDFATVRKVLSMPQVNIVKKTEVQTGGFSKESILPKRNSDKLIARKKDWDPKKYGGFDSPTVAYSVLVVAKVEKGKSKKLKSVKELLGITIMERSSFEKNPIDFLEAKGYKEVKKDLIIKLPKYSLFELENGRKRMLASAGELQKGNELALPSKYVNFLYLASHYEKLKGSPEDNEQKQLFVEQHKHYLDEIIEQISEFSKRVILADANLDKVLSAYNKHRDKPIREQAENIIHLFTLTNLGAPAAFKYFDTTIDRKRYTSTKEVLDATLIHQSITGLYETRIDLSQLGGDGGGGGEAAAKGSSGGVPWLTQQPLQLTILVPLQEYQDRILNKTALPEEQKQQLKALFTKYDNLWQHWENQVGHRKIRPHNIATGDYPPRPQKQYPINPKAKPSIQIVIDDLLKQGVLTPQNSTMNTPVYPVPKPDGRWRMVLDYREVNKTIPLTAAQNQHSAGILATIVRQKYKTTLDLANGFWAHPITPDSYWLTAFTWQGKQYCWTRLPQGFLNSPALFTADAVDLLKEVPNVQVYVDDIYLSHDNPHEHIQQLEKVFQILLQAGYVVSLKKSEIGQRTVEFLGFNITKEGRGLTDTFKTKLLNVTPPKDLKQLQSILGLLNFARNFIPNFAELVQTLYNLIASSKGKYIEWTEDNTKQLNKVIEALNTASNLEERLPDQRLVIKVNTSPSAGYVRYYNESGKKPIMYLNYVFSKAELKFSMLEKLLTTMHKALIKAMDLAMGQEILVYSPIVSMTKIQKTPLPERKALPIRWITWMTYLEDPRIQFHYDKTLPELKHIPDVYTSSIPPLKHPSQYEGVFCTDGSAIKSPDPTKSNNAGMGIVHAIYNPEYKILNQWSIPLGHHTAQMAEIAAVEFACKKALKVPGPVLVITDSFYVAESANKELPYWKSNGFVNNKKEPLKHISKWKSIAECLSIKPDITIQHEKGHQPINTSIHTEGNALADKLATQGSYVVNAGKRTADGSEFEKRTADGSEFESPKKKAKVE

SEQ ID NO: 699 - protein, 2087 aa, synthetic construct
MPAAKRVKLDGGDKKYSIGLDIGTNSVGWAVITDEYKVPSKKFKVLGNTDRHSIKKNLIGALLFDSGETAEATRLKRTARRRYTRRKNRICYLQEIFSNEMAKVDDSFFHRLEESFLVEEDKKHERHPIFGNIVDEVAYHEKYPTIYHLRKKLVDSTDKADLRLIYLALAHMIKFRGHFLIEGDLNPDNSDVDKLFIQLVQTYNQLFEENPINASGVDAKAILSARLSKSRRLENLIAQLPGEKKNGLFGNLIALSLGLTPNFKSNFDLAEDAKLQLSKDTYDDDLDNLLAQIGDQYADLFLAAKNLSDAILLSDILRVNTEITKAPLSASMIKRYDEHHQDLTLLKALVRQQLPEKYKEIFFDQSKNGYAGYIDGGASQEEFYKFIKPILEKMDGTEELLVKLNREDLLRKQRTFDNGSIPHQIHLGELHAILRRQEDFYPFLKDNREKIEKILTFRIPYYVGPLARGNSRFAWMTRKSEETITPWNFEEVVDKGASAQSFIERMTNFDKNLPNEKVLPKHSLLYEYFTVYNELTKVKYVTEGMRKPAFLSGEQKKAIVDLLFKTNRKVTVKQLKEDYFKKIECFDSVEISGVEDRFNASLGTYHDLLKIIKDKDFLDNEENEDILEDIVLTLTLFEDREMIEERLKTYAHLFDDKVMKQLKRRRYTGWGRLSRKLINGIRDKQSGKTILDFLKSDGFANRNFMQLIHDDSLTFKEDIQKAQVSGQGDSLHEHIANLAGSPAIKKGILQTVKVVDELVKVMGRHKPENIVIEMARENQTTQKGQKNSRERMKRIEEGIKELGSQILKEHPVENTQLQNEKLYLYYLQNGRDMYVDQELDINRLSDYDVDHIVPQSFLKDDSIDNKVLTRSDKARGKSDNVPSEEVVKKMKNYWRQLLNAKLITQRKFDNLTKAERGGLSELDKAGFIKRQLVETRQITKHVAQILDSRMNTKYDENDKLIREVKVITLKSKLVSDFRKDFQFYKVREINNYHHAHDAYLNAVVGTALIKKYPKLESEFVYGDYKVYDVRKMIAKSEQEIGKATAKYFFYSNIMNFFKTEITLANGEIRKRPLIETNGETGEIVWDKGRDFATVRKVLSMPQVNIVKKTEVQTGGFSKESILPKRNSDKLIARKKDWDPKKYGGFDSPTVAYSVLVVAKVEKGKSKKLKSVKELLGITIMERSSFEKNPIDFLEAKGYKEVKKDLIIKLPKYSLFELENGRKRMLASAGELQKGNELALPSKYVNFLYLASHYEKLKGSPEDNEQKQLFVEQHKHYLDEIIEQISEFSKRVILADANLDKVLSAYNKHRDKPIREQAENIIHLFTLTNLGAPAAFKYFDTTIDRKRYTSTKEVLDATLIHQSITGLYETRIDLSQLGGDGGGSSGGGEAAAKGGVPWLTQQPLQLTILVPLQEYQDRILNKTALPEEQKQQLKALFTKYDNLWQHWENQVGHRKIRPHNIATGDYPPRPQKQYPINPKAKPSIQIVIDDLLKQGVLTPQNSTMNTPVYPVPKPDGRWRMVLDYREVNKTIPLTAAQNQHSAGILATIVRQKYKTTLDLANGFWAHPITPDSYWLTAFTWQGKQYCWTRLPQGFLNSPALFTADAVDLLKEVPNVQVYVDDIYLSHDNPHEHIQQLEKVFQILLQAGYVVSLKKSEIGQRTVEFLGFNITKEGRGLTDTFKTKLLNVTPPKDLKQLQSILGLLNFARNFIPNFAELVQTLYNLIASSKGKYIEWTEDNTKQLNKVIEALNTASNLEERLPDQRLVIKVNTSPSAGYVRYYNESGKKPIMYLNYVFSKAELKFSMLEKLLTTMHKALIKAMDLAMGQEILVYSPIVSMTKIQKTPLPERKALPIRWITWMTYLEDPRIQFHYDKTLPELKHIPDVYTSSIPPLKHPSQYEGVFCTDGSAIKSPDPTKSNNAGMGIVHAIYNPEYKILNQWSIPLGHHTAQMAEIAAVEFACKKALKVPGPVLVITDSFYVAESANKELPYWKSNGFVNNKKEPLKHISKWKSIAECLSIKPDITIQHEKGHQPINTSIHTEGNALADKLATQGSYVVNAGKRTADGSEFEKRTADGSEFESPKKKAKVE

SEQ ID NO: 700 - protein, 2094 aa, synthetic construct
MPAAKRVKLDGGDKKYSIGLDIGTNSVGWAVITDEYKVPSKKFKVLGNTDRHSIKKNLIGALLFDSGETAEATRLKRTARRRYTRRKNRICYLQEIFSNEMAKVDDSFFHRLEESFLVEEDKKHERHPIFGNIVDEVAYHEKYPTIYHLRKKLVDSTDKADLRLIYLALAHMIKFRGHFLIEGDLNPDNSDVDKLFIQLVQTYNQLFEENPINASGVDAKAILSARLSKSRRLENLIAQLPGEKKNGLFGNLIALSLGLTPNFKSNFDLAEDAKLQLSKDTYDDDLDNLLAQIGDQYADLFLAAKNLSDAILLSDILRVNTEITKAPLSASMIKRYDEHHQDLTLLKALVRQQLPEKYKEIFFDQSKNGYAGYIDGGASQEEFYKFIKPILEKMDGTEELLVKLNREDLLRKQRTFDNGSIPHQIHLGELHAILRRQEDFYPFLKDNREKIEKILTFRIPYYVGPLARGNSRFAWMTRKSEETITPWNFEEVVDKGASAQSFIERMTNFDKNLPNEKVLPKHSLLYEYFTVYNELTKVKYVTEGMRKPAFLSGEQKKAIVDLLFKTNRKVTVKQLKEDYFKKIECFDSVEISGVEDRFNASLGTYHDLLKIIKDKDFLDNEENEDILEDIVLTLTLFEDREMIEERLKTYAHLFDDKVMKQLKRRRYTGWGRLSRKLINGIRDKQSGKTILDFLKSDGFANRNFMQLIHDDSLTFKEDIQKAQVSGQGDSLHEHIANLAGSPAIKKGILQTVKVVDELVKVMGRHKPENIVIEMARENQTTQKGQKNSRERMKRIEEGIKELGSQILKEHPVENTQLQNEKLYLYYLQNGRDMYVDQELDINRLSDYDVDHIVPQSFLKDDSIDNKVLTRSDKARGKSDNVPSEEVVKKMKNYWRQLLNAKLITQRKFDNLTKAERGGLSELDKAGFIKRQLVETRQITKHVAQILDSRMNTKYDENDKLIREVKVITLKSKLVSDFRKDFQFYKVREINNYHHAHDAYLNAVVGTALIKKYPKLESEFVYGDYKVYDVRKMIAKSEQEIGKATAKYFFYSNIMNFFKTEITLANGEIRKRPLIETNGETGEIVWDKGRDFATVRKVLSMPQVNIVKKTEVQTGGFSKESILPKRNSDKLIARKKDWDPKKYGGFDSPTVAYSVLVVAKVEKGKSKKLKSVKELLGITIMERSSFEKNPIDFLEAKGYKEVKKDLIIKLPKYSLFELENGRKRMLASAGELQKGNELALPSKYVNFLYLASHYEKLKGSPEDNEQKQLFVEQHKHYLDEIIEQISEFSKRVILADANLDKVLSAYNKHRDKPIREQAENIIHLFTLTNLGAPAAFKYFDTTIDRKRYTSTKEVLDATLIHQSITGLYETRIDLSQLGGDGGGGSGGSGGSGGSGGSGGSGGVPWLTQQPLQLTILVPLQEYQDRILNKTALPEEQKQQLKALFTKYDNLWQHWENQVGHRKIRPHNIATGDYPPRPQKQYPINPKAKPSIQIVIDDLLKQGVLTPQNSTMNTPVYPVPKPDGRWRMVLDYREVNKTIPLTAAQNQHSAGILATIVRQKYKTTLDLANGFWAHPITPDSYWLTAFTWQGKQYCWTRLPQGFLNSPALFNADAVDLLKEVPNVQVYVDDIYLSHDNPHEHIQQLEKVFQILLQAGYVVSLKKSEIGQRTVEFLGFNITKEGRGLTDTFKTKLLNVTPPKDLKQLQSILGLLNFARNFIPNFAELVQTLYNLIASSPGKYIEWTEDNTKQLNKVIEALNTASNLEERLPDQRLVIKVNTSPSAGYVRYYNESGKKPIMYLNYVFSKAELKFSMLEKLLTTMHKALIKAMDLAMGQEILVYSPIVSMTKIQKTPLPERKALPIRWITWMTYLEDPRIQFHYDKTLPELKHIPDVYTSSIPPLKHPSQYEGVFCTDGSAIKSPDPTKSNNAGMGIVHAIYNPEYKILNQWSIPLGHHTAQMAEIAAVEFACKKALKVPGPVLVITDSFYVAESANKELPYWKSNGFVNNKKEPLKHISKWKSIAECLSIKPDITIQHEKGHQPINTSIHTEGNALADKLATQGSYVVNAGKRTADGSEFEKRTADGSEFESPKKKAKVE

SEQ ID NO: 701 - protein, 2091 aa, synthetic construct
MPAAKRVKLDGGDKKYSIGLDIGTNSVGWAVITDEYKVPSKKFKVLGNTDRHSIKKNLIGALLFDSGETAEATRLKRTARRRYTRRKNRICYLQEIFSNEMAKVDDSFFHRLEESFLVEEDKKHERHPIFGNIVDEVAYHEKYPTIYHLRKKLVDSTDKADLRLIYLALAHMIKFRGHFLIEGDLNPDNSDVDKLFIQLVQTYNQLFEENPINASGVDAKAILSARLSKSRRLENLIAQLPGEKKNGLFGNLIALSLGLTPNFKSNFDLAEDAKLQLSKDTYDDDLDNLLAQIGDQYADLFLAAKNLSDAILLSDILRVNTEITKAPLSASMIKRYDEHHQDLTLLKALVRQQLPEKYKEIFFDQSKNGYAGYIDGGASQEEFYKFIKPILEKMDGTEELLVKLNREDLLRKQRTFDNGSIPHQIHLGELHAILRRQEDFYPFLKDNREKIEKILTFRIPYYVGPLARGNSRFAWMTRKSEETITPWNFEEVVDKGASAQSFIERMTNFDKNLPNEKVLPKHSLLYEYFTVYNELTKVKYVTEGMRKPAFLSGEQKKAIVDLLFKTNRKVTVKQLKEDYFKKIECFDSVEISGVEDRFNASLGTYHDLLKIIKDKDFLDNEENEDILEDIVLTLTLFEDREMIEERLKTYAHLFDDKVMKQLKRRRYTGWGRLSRKLINGIRDKQSGKTILDFLKSDGFANRNFMQLIHDDSLTFKEDIQKAQVSGQGDSLHEHIANLAGSPAIKKGILQTVKVVDELVKVMGRHKPENIVIEMARENQTTQKGQKNSRERMKRIEEGIKELGSQILKEHPVENTQLQNEKLYLYYLQNGRDMYVDQELDINRLSDYDVDHIVPQSFLKDDSIDNKVLTRSDKARGKSDNVPSEEVVKKMKNYWRQLLNAKLITQRKFDNLTKAERGGLSELDKAGFIKRQLVETRQITKHVAQILDSRMNTKYDENDKLIREVKVITLKSKLVSDFRKDFQFYKVREINNYHHAHDAYLNAVVGTALIKKYPKLESEFVYGDYKVYDVRKMIAKSEQEIGKATAKYFFYSNIMNFFKTEITLANGEIRKRPLIETNGETGEIVWDKGRDFATVRKVLSMPQVNIVKKTEVQTGGFSKESILPKRNSDKLIARKKDWDPKKYGGFDSPTVAYSVLVVAKVEKGKSKKLKSVKELLGITIMERSSFEKNPIDFLEAKGYKEVKKDLIIKLPKYSLFELENGRKRMLASAGELQKGNELALPSKYVNFLYLASHYEKLKGSPEDNEQKQLFVEQHKHYLDEIIEQISEFSKRVILADANLDKVLSAYNKHRDKPIREQAENIIHLFTLTNLGAPAAFKYFDTTIDRKRYTSTKEVLDATLIHQSITGLYETRIDLSQLGGDGGEAAAKGGGGSEAAAKGGVPWLTQQPLQLTILVPLQEYQDRILNKTALPEEQKQQLKALFTKYDNLWQHWENQVGHRKIRPHNIATGDYPPRPQKQYPINPKAKPSIQIVIDDLLKQGVLTPQNSTMNTPVYPVPKPDGRWRMVLDYREVNKTIPLTAAQNQHSAGILATIVRQKYKTTLDLANGFWAHPITPDSYWLTAFTWQGKQYCWTRLPQGFLNSPALFNADAVDLLKEVPNVQVYVDDIYLSHDNPHEHIQQLEKVFQILLQAGYVVSLKKSEIGQRTVEFLGFNITKEGRGLTDTFKTKLLNVTPPKDLKQLQSILGLLNFARNFIPNFAELVQTLYNLIASSPGKYIEWTEDNTKQLNKVIEALNTASNLEERLPDQRLVIKVNTSPSAGYVRYYNESGKKPIMYLNYVFSKAELKFSMLEKLLTTMHKALIKAMDLAMGQEILVYSPIVSMTKIQKTPLPERKALPIRWITWMTYLEDPRIQFHYDKTLPELKHIPDVYTSSIPPLKHPSQYEGVFCTDGSAIKSPDPTKSNNAGMGIVHAIYNPEYKILNQWSIPLGHHTAQMAEIAAVEFACKKALKVPGPVLVITDSFYVAESANKELPYWKSNGFVNNKKEPLKHISKWKSIAECLSIKPDITIQHEKGHQPINTSIHTEGNALADKLATQGSYVVNAGKRTADGSEFEKRTADGSEFESPKKKAKVE

SEQ ID NO: 702 - protein, 2091 aa, synthetic construct
MPAAKRVKLDGGDKKYSIGLDIGTNSVGWAVITDEYKVPSKKFKVLGNTDRHSIKKNLIGALLFDSGETAEATRLKRTARRRYTRRKNRICYLQEIFSNEMAKVDDSFFHRLEESFLVEEDKKHERHPIFGNIVDEVAYHEKYPTIYHLRKKLVDSTDKADLRLIYLALAHMIKFRGHFLIEGDLNPDNSDVDKLFIQLVQTYNQLFEENPINASGVDAKAILSARLSKSRRLENLIAQLPGEKKNGLFGNLIALSLGLTPNFKSNFDLAEDAKLQLSKDTYDDDLDNLLAQIGDQYADLFLAAKNLSDAILLSDILRVNTEITKAPLSASMIKRYDEHHQDLTLLKALVRQQLPEKYKEIFFDQSKNGYAGYIDGGASQEEFYKFIKPILEKMDGTEELLVKLNREDLLRKQRTFDNGSIPHQIHLGELHAILRRQEDFYPFLKDNREKIEKILTFRIPYYVGPLARGNSRFAWMTRKSEETITPWNFEEVVDKGASAQSFIERMTNFDKNLPNEKVLPKHSLLYEYFTVYNELTKVKYVTEGMRKPAFLSGEQKKAIVDLLFKTNRKVTVKQLKEDYFKKIECFDSVEISGVEDRFNASLGTYHDLLKIIKDKDFLDNEENEDILEDIVLTLTLFEDREMIEERLKTYAHLFDDKVMKQLKRRRYTGWGRLSRKLINGIRDKQSGKTILDFLKSDGFANRNFMQLIHDDSLTFKEDIQKAQVSGQGDSLHEHIANLAGSPAIKKGILQTVKVVDELVKVMGRHKPENIVIEMARENQTTQKGQKNSRERMKRIEEGIKELGSQILKEHPVENTQLQNEKLYLYYLQNGRDMYVDQELDINRLSDYDVDHIVPQSFLKDDSIDNKVLTRSDKARGKSDNVPSEEVVKKMKNYWRQLLNAKLITQRKFDNLTKAERGGLSELDKAGFIKRQLVETRQITKHVAQILDSRMNTKYDENDKLIREVKVITLKSKLVSDFRKDFQFYKVREINNYHHAHDAYLNAVVGTALIKKYPKLESEFVYGDYKVYDVRKMIAKSEQEIGKATAKYFFYSNIMNFFKTEITLANGEIRKRPLIETNGETGEIVWDKGRDFATVRKVLSMPQVNIVKKTEVQTGGFSKESILPKRNSDKLIARKKDWDPKKYGGFDSPTVAYSVLVVAKVEKGKSKKLKSVKELLGITIMERSSFEKNPIDFLEAKGYKEVKKDLIIKLPKYSLFELENGRKRMLASAGELQKGNELALPSKYVNFLYLASHYEKLKGSPEDNEQKQLFVEQHKHYLDEIIEQISEFSKRVILADANLDKVLSAYNKHRDKPIREQAENIIHLFTLTNLGAPAAFKYFDTTIDRKRYTSTKEVLDATLIHQSITGLYETRIDLSQLGGDGGGGSGGSGGSGGSGGSGGVPWLTQQPLQLTILVPLQEYQDRILNKTALPEEQKQQLKALFTKYDNLWQHWENQVGHRKIRPHNIATGDYPPRPQKQYPINPKAKPSIQIVIDDLLKQGVLTPQNSTMNTPVYPVPKPDGRWRMVLDYREVNKTIPLTAAQNQHSAGILATIVRQKYKTTLDLANGFWAHPITPDSYWLTAFTWQGKQYCWTRLPQGFLNSPALFNADAVDLLKEVPNVQVYVDDIYLSHDNPHEHIQQLEKVFQILLQAGYVVSLKKSEIGQRTVEFLGFNITKEGRGLTDTFKTKLLNVTPPKDLKQLQSILGLLNFARNFIPNFAELVQTLYNLIASSPGKYIEWTEDNTKQLNKVIEALNTASNLEERLPDQRLVIKVNTSPSAGYVRYYNESGKKPIMYLNYVFSKAELKFSMLEKLLTTMHKALIKAMDLAMGQEILVYSPIVSMTKIQKTPLPERKALPIRWITWMTYLEDPRIQFHYDKTLPELKHIPDVYTSSIPPLKHPSQYEGVFCTDGSAIKSPDPTKSNNAGMGIVHAIYNPEYKILNQWSIPLGHHTAQMAEIAAVEFACKKALKVPGPVLVITDSFYVAESANKELPYWKSNGFVNNKKEPLKHISKWKSIAECLSIKPDITIQHEKGHQPINTSIHTEGNALADKLATQGSYVVNAGKRTADGSEFEKRTADGSEFESPKKKAKVE

SEQ ID NO: 703 - protein, 2082 aa, synthetic construct
MPAAKRVKLDGGDKKYSIGLDIGTNSVGWAVITDEYKVPSKKFKVLGNTDRHSIKKNLIGALLFDSGETAEATRLKRTARRRYTRRKNRICYLQEIFSNEMAKVDDSFFHRLEESFLVEEDKKHERHPIFGNIVDEVAYHEKYPTIYHLRKKLVDSTDKADLRLIYLALAHMIKFRGHFLIEGDLNPDNSDVDKLFIQLVQTYNQLFEENPINASGVDAKAILSARLSKSRRLENLIAQLPGEKKNGLFGNLIALSLGLTPNFKSNFDLAEDAKLQLSKDTYDDDLDNLLAQIGDQYADLFLAAKNLSDAILLSDILRVNTEITKAPLSASMIKRYDEHHQDLTLLKALVRQQLPEKYKEIFFDQSKNGYAGYIDGGASQEEFYKFIKPILEKMDGTEELLVKLNREDLLRKQRTFDNGSIPHQIHLGELHAILRRQEDFYPFLKDNREKIEKILTFRIPYYVGPLARGNSRFAWMTRKSEETITPWNFEEVVDKGASAQSFIERMTNFDKNLPNEKVLPKHSLLYEYFTVYNELTKVKYVTEGMRKPAFLSGEQKKAIVDLLFKTNRKVTVKQLKEDYFKKIECFDSVEISGVEDRFNASLGTYHDLLKIIKDKDFLDNEENEDILEDIVLTLTLFEDREMIEERLKTYAHLFDDKVMKQLKRRRYTGWGRLSRKLINGIRDKQSGKTILDFLKSDGFANRNFMQLIHDDSLTFKEDIQKAQVSGQGDSLHEHIANLAGSPAIKKGILQTVKVVDELVKVMGRHKPENIVIEMARENQTTQKGQKNSRERMKRIEEGIKELGSQILKEHPVENTQLQNEKLYLYYLQNGRDMYVDQELDINRLSDYDVDHIVPQSFLKDDSIDNKVLTRSDKARGKSDNVPSEEVVKKMKNYWRQLLNAKLITQRKFDNLTKAERGGLSELDKAGFIKRQLVETRQITKHVAQILDSRMNTKYDENDKLIREVKVITLKSKLVSDFRKDFQFYKVREINNYHHAHDAYLNAVVGTALIKKYPKLESEFVYGDYKVYDVRKMIAKSEQEIGKATAKYFFYSNIMNFFKTEITLANGEIRKRPLIETNGETGEIVWDKGRDFATVRKVLSMPQVNIVKKTEVQTGGFSKESILPKRNSDKLIARKKDWDPKKYGGFDSPTVAYSVLVVAKVEKGKSKKLKSVKELLGITIMERSSFEKNPIDFLEAKGYKEVKKDLIIKLPKYSLFELENGRKRMLASAGELQKGNELALPSKYVNFLYLASHYEKLKGSPEDNEQKQLFVEQHKHYLDEIIEQISEFSKRVILADANLDKVLSAYNKHRDKPIREQAENIIHLFTLTNLGAPAAFKYFDTTIDRKRYTSTKEVLDATLIHQSITGLYETRIDLSQLGGDGGGSSGGSGGVPWLTQQPLQLTILVPLQEYQDRILNKTALPEEQKQQLKALFTKYDNLWQHWENQVGHRKIRPHNIATGDYPPRPQKQYPINPKAKPSIQIVIDDLLKQGVLTPQNSTMNTPVYPVPKPDGRWRMVLDYREVNKTIPLTAAQNQHSAGILATIVRQKYKTTLDLANGFWAHPITPDSYWLTAFTWQGKQYCWTRLPQGFLNSPALFNADAVDLLKEVPNVQVYVDDIYLSHDNPHEHIQQLEKVFQILLQAGYVVSLKKSEIGQRTVEFLGFNITKEGRGLTDTFKTKLLNVTPPKDLKQLQSILGLLNFARNFIPNFAELVQTLYNLIASSPGKYIEWTEDNTKQLNKVIEALNTASNLEERLPDQRLVIKVNTSPSAGYVRYYNESGKKPIMYLNYVFSKAELKFSMLEKLLTTMHKALIKAMDLAMGQEILVYSPIVSMTKIQKTPLPERKALPIRWITWMTYLEDPRIQFHYDKTLPELKHIPDVYTSSIPPLKHPSQYEGVFCTDGSAIKSPDPTKSNNAGMGIVHAIYNPEYKILNQWSIPLGHHTAQMAEIAAVEFACKKALKVPGPVLVITDSFYVAESANKELPYWKSNGFVNNKKEPLKHISKWKSIAECLSIKPDITIQHEKGHQPINTSIHTEGNALADKLATQGSYVVNAGKRTADGSEFEKRTADGSEFESPKKKAKVE

SEQ ID NO: 704 - protein, 2092 aa, synthetic construct
MPAAKRVKLDGGDKKYSIGLDIGTNSVGWAVITDEYKVPSKKFKVLGNTDRHSIKKNLIGALLFDSGETAEATRLKRTARRRYTRRKNRICYLQEIFSNEMAKVDDSFFHRLEESFLVEEDKKHERHPIFGNIVDEVAYHEKYPTIYHLRKKLVDSTDKADLRLIYLALAHMIKFRGHFLIEGDLNPDNSDVDKLFIQLVQTYNQLFEENPINASGVDAKAILSARLSKSRRLENLIAQLPGEKKNGLFGNLIALSLGLTPNFKSNFDLAEDAKLQLSKDTYDDDLDNLLAQIGDQYADLFLAAKNLSDAILLSDILRVNTEITKAPLSASMIKRYDEHHQDLTLLKALVRQQLPEKYKEIFFDQSKNGYAGYIDGGASQEEFYKFIKPILEKMDGTEELLVKLNREDLLRKQRTFDNGSIPHQIHLGELHAILRRQEDFYPFLKDNREKIEKILTFRIPYYVGPLARGNSRFAWMTRKSEETITPWNFEEVVDKGASAQSFIERMTNFDKNLPNEKVLPKHSLLYEYFTVYNELTKVKYVTEGMRKPAFLSGEQKKAIVDLLFKTNRKVTVKQLKEDYFKKIECFDSVEISGVEDRFNASLGTYHDLLKIIKDKDFLDNEENEDILEDIVLTLTLFEDREMIEERLKTYAHLFDDKVMKQLKRRRYTGWGRLSRKLINGIRDKQSGKTILDFLKSDGFANRNFMQLIHDDSLTFKEDIQKAQVSGQGDSLHEHIANLAGSPAIKKGILQTVKVVDELVKVMGRHKPENIVIEMARENQTTQKGQKNSRERMKRIEEGIKELGSQILKEHPVENTQLQNEKLYLYYLQNGRDMYVDQELDINRLSDYDVDHIVPQSFLKDDSIDNKVLTRSDKARGKSDNVPSEEVVKKMKNYWRQLLNAKLITQRKFDNLTKAERGGLSELDKAGFIKRQLVETRQITKHVAQILDSRMNTKYDENDKLIREVKVITLKSKLVSDFRKDFQFYKVREINNYHHAHDAYLNAVVGTALIKKYPKLESEFVYGDYKVYDVRKMIAKSEQEIGKATAKYFFYSNIMNFFKTEITLANGEIRKRPLIETNGETGEIVWDKGRDFATVRKVLSMPQVNIVKKTEVQTGGFSKESILPKRNSDKLIARKKDWDPKKYGGFDSPTVAYSVLVVAKVEKGKSKKLKSVKELLGITIMERSSFEKNPIDFLEAKGYKEVKKDLIIKLPKYSLFELENGRKRMLASAGELQKGNELALPSKYVNFLYLASHYEKLKGSPEDNEQKQLFVEQHKHYLDEIIEQISEFSKRVILADANLDKVLSAYNKHRDKPIREQAENIIHLFTLTNLGAPAAFKYFDTTIDRKRYTSTKEVLDATLIHQSITGLYETRIDLSQLGGDGGSGSETPGTSESATPESGGVPWLTQQPLQLTILVPLQEYQDRILNKTALPEEQKQQLKALFTKYDNLWQHWENQVGHRKIRPHNIATGDYPPRPQKQYPINPKAKPSIQIVIDDLLKQGVLTPQNSTMNTPVYPVPKPDGRWRMVLDYREVNKTIPLTAAQNQHSAGILATIVRQKYKTTLDLANGFWAHPITPDSYWLTAFTWQGKQYCWTRLPQGFLNSPALFNADAVDLLKEVPNVQVYVDDIYLSHDNPHEHIQQLEKVFQILLQAGYVVSLKKSEIGQRTVEFLGFNITKEGRGLTDTFKTKLLNVTPPKDLKQLQSILGKLNFARNFIPNFAELVQTLYNLIASSPGKYIEWTEDNTKQLNKVIEALNTASNLEERLPDQRLVIKVNTSPSAGYVRYYNESGKKPIMYLNYVFSKAELKFSMLEKLLTTMHKALIKAMDLAMGQEILVYSPIVSMTKIQKTPLPERKALPIRWITWMTYLEDPRIQFHYDKTLPELKHIPDVYTSSIPPLKHPSQYEGVFCTDGSAIKSPDPTKSNNAGMGIVHAIYNPEYKILNQWSIPLGHHTAQMAEIAAVEFACKKALKVPGPVLVITDSFYVAESANKELPYWKSNGFVNNKKEPLKHISKWKSIAECLSIKPDITIQHEKGHQPINTSIHTEGNALADKLATQGSYVVNAGKRTADGSEFEKRTADGSEFESPKKKAKVE

SEQ ID NO: 705 - protein, 2087 aa, synthetic construct
MPAAKRVKLDGGDKKYSIGLDIGTNSVGWAVITDEYKVPSKKFKVLGNTDRHSIKKNLIGALLFDSGETAEATRLKRTARRRYTRRKNRICYLQEIFSNEMAKVDDSFFHRLEESFLVEEDKKHERHPIFGNIVDEVAYHEKYPTIYHLRKKLVDSTDKADLRLIYLALAHMIKFRGHFLIEGDLNPDNSDVDKLFIQLVQTYNQLFEENPINASGVDAKAILSARLSKSRRLENLIAQLPGEKKNGLFGNLIALSLGLTPNFKSNFDLAEDAKLQLSKDTYDDDLDNLLAQIGDQYADLFLAAKNLSDAILLSDILRVNTEITKAPLSASMIKRYDEHHQDLTLLKALVRQQLPEKYKEIFFDQSKNGYAGYIDGGASQEEFYKFIKPILEKMDGTEELLVKLNREDLLRKQRTFDNGSIPHQIHLGELHAILRRQEDFYPFLKDNREKIEKILTFRIPYYVGPLARGNSRFAWMTRKSEETITPWNFEEVVDKGASAQSFIERMTNFDKNLPNEKVLPKHSLLYEYFTVYNELTKVKYVTEGMRKPAFLSGEQKKAIVDLLFKTNRKVTVKQLKEDYFKKIECFDSVEISGVEDRFNASLGTYHDLLKIIKDKDFLDNEENEDILEDIVLTLTLFEDREMIEERLKTYAHLFDDKVMKQLKRRRYTGWGRLSRKLINGIRDKQSGKTILDFLKSDGFANRNFMQLIHDDSLTFKEDIQKAQVSGQGDSLHEHIANLAGSPAIKKGILQTVKVVDELVKVMGRHKPENIVIEMARENQTTQKGQKNSRERMKRIEEGIKELGSQILKEHPVENTQLQNEKLYLYYLQNGRDMYVDQELDINRLSDYDVDHIVPQSFLKDDSIDNKVLTRSDKARGKSDNVPSEEVVKKMKNYWRQLLNAKLITQRKFDNLTKAERGGLSELDKAGFIKRQLVETRQITKHVAQILDSRMNTKYDENDKLIREVKVITLKSKLVSDFRKDFQFYKVREINNYHHAHDAYLNAVVGTALIKKYPKLESEFVYGDYKVYDVRKMIAKSEQEIGKATAKYFFYSNIMNFFKTEITLANGEIRKRPLIETNGETGEIVWDKGRDFATVRKVLSMPQVNIVKKTEVQTGGFSKESILPKRNSDKLIARKKDWDPKKYGGFDSPTVAYSVLVVAKVEKGKSKKLKSVKELLGITIMERSSFEKNPIDFLEAKGYKEVKKDLIIKLPKYSLFELENGRKRMLASAGELQKGNELALPSKYVNFLYLASHYEKLKGSPEDNEQKQLFVEQHKHYLDEIIEQISEFSKRVILADANLDKVLSAYNKHRDKPIREQAENIIHLFTLTNLGAPAAFKYFDTTIDRKRYTSTKEVLDATLIHQSITGLYETRIDLSQLGGDGGPAPAPAPAPAPGGVPWLTQQPLQLTILVPLQEYQDRILNKTALPEEQKQQLKALFTKYDNLWQHWENQVGHRKIRPHNIATGDYPPRPQKQYPINPKAKPSIQIVIDDLLKQGVLTPQNSTMNTPVYPVPKPDGRWRMVLDYREVNKTIPLTAAQNQHSAGILATIVRQKYKTTLDLANGFWAHPITPDSYWLTAFTWQGKQYCWTRLPQGFLNSPALFNADAVDLLKEVPNVQVYVDDIYLSHDNPHEHIQQLEKVFQILLQAGYVVSLKKSEIGQRTVEFLGFNITKEGRGLTDTFKTKLLNVTPPKDLKQLQSILGKLNFARNFIPNFAELVQTLYNLIASSPGKYIEWTEDNTKQLNKVIEALNTASNLEERLPDQRLVIKVNTSPSAGYVRYYNESGKKPIMYLNYVFSKAELKFSMLEKLLTTMHKALIKAMDLAMGQEILVYSPIVSMTKIQKTPLPERKALPIRWITWMTYLEDPRIQFHYDKTLPELKHIPDVYTSSIPPLKHPSQYEGVFCTDGSAIKSPDPTKSNNAGMGIVHAIYNPEYKILNQWSIPLGHHTAQMAEIAAVEFACKKALKVPGPVLVITDSFYVAESANKELPYWKSNGFVNNKKEPLKHISKWKSIAECLSIKPDITIQHEKGHQPINTSIHTEGNALADKLATQGSYVVNAGKRTADGSEFEKRTADGSEFESPKKKAKVE

SEQ ID NO: 706 - protein, 2085 aa, synthetic construct
MPAAKRVKLDGGDKKYSIGLDIGTNSVGWAVITDEYKVPSKKFKVLGNTDRHSIKKNLIGALLFDSGETAEATRLKRTARRRYTRRKNRICYLQEIFSNEMAKVDDSFFHRLEESFLVEEDKKHERHPIFGNIVDEVAYHEKYPTIYHLRKKLVDSTDKADLRLIYLALAHMIKFRGHFLIEGDLNPDNSDVDKLFIQLVQTYNQLFEENPINASGVDAKAILSARLSKSRRLENLIAQLPGEKKNGLFGNLIALSLGLTPNFKSNFDLAEDAKLQLSKDTYDDDLDNLLAQIGDQYADLFLAAKNLSDAILLSDILRVNTEITKAPLSASMIKRYDEHHQDLTLLKALVRQQLPEKYKEIFFDQSKNGYAGYIDGGASQEEFYKFIKPILEKMDGTEELLVKLNREDLLRKQRTFDNGSIPHQIHLGELHAILRRQEDFYPFLKDNREKIEKILTFRIPYYVGPLARGNSRFAWMTRKSEETITPWNFEEVVDKGASAQSFIERMTNFDKNLPNEKVLPKHSLLYEYFTVYNELTKVKYVTEGMRKPAFLSGEQKKAIVDLLFKTNRKVTVKQLKEDYFKKIECFDSVEISGVEDRFNASLGTYHDLLKIIKDKDFLDNEENEDILEDIVLTLTLFEDREMIEERLKTYAHLFDDKVMKQLKRRRYTGWGRLSRKLINGIRDKQSGKTILDFLKSDGFANRNFMQLIHDDSLTFKEDIQKAQVSGQGDSLHEHIANLAGSPAIKKGILQTVKVVDELVKVMGRHKPENIVIEMARENQTTQKGQKNSRERMKRIEEGIKELGSQILKEHPVENTQLQNEKLYLYYLQNGRDMYVDQELDINRLSDYDVDHIVPQSFLKDDSIDNKVLTRSDKARGKSDNVPSEEVVKKMKNYWRQLLNAKLITQRKFDNLTKAERGGLSELDKAGFIKRQLVETRQITKHVAQILDSRMNTKYDENDKLIREVKVITLKSKLVSDFRKDFQFYKVREINNYHHAHDAYLNAVVGTALIKKYPKLESEFVYGDYKVYDVRKMIAKSEQEIGKATAKYFFYSNIMNFFKTEITLANGEIRKRPLIETNGETGEIVWDKGRDFATVRKVLSMPQVNIVKKTEVQTGGFSKESILPKRNSDKLIARKKDWDPKKYGGFDSPTVAYSVLVVAKVEKGKSKKLKSVKELLGITIMERSSFEKNPIDFLEAKGYKEVKKDLIIKLPKYSLFELENGRKRMLASAGELQKGNELALPSKYVNFLYLASHYEKLKGSPEDNEQKQLFVEQHKHYLDEIIEQISEFSKRVILADANLDKVLSAYNKHRDKPIREQAENIIHLFTLTNLGAPAAFKYFDTTIDRKRYTSTKEVLDATLIHQSITGLYETRIDLSQLGGDGGPAPGGGGSSGGVPWLTQQPLQLTILVPLQEYQDRILNKTALPEEQKQQLKALFTKYDNLWQHWENQVGHRKIRPHNIATGDYPPRPQKQYPINPKAKPSIQIVIDDLLKQGVLTPQNSTMNTPVYPVPKPDGRWRMVLDYREVNKTIPLTAAQNQHSAGILATIVRQKYKTTLDLANGFWAHPITPDSYWLTAFTWQGKQYCWTRLPQGFLNSPALFNADAVDLLKEVPNVQVYVDDIYLSHDNPHEHIQQLEKVFQILLQAGYVVSLKKSEIGQRTVEFLGFNITKEGRGLTDTFKTKLLNVTPPKDLKQLQSILGKLNFARNFIPNFAELVQTLYNLIASSPGKYIEWTEDNTKQLNKVIEALNTASNLEERLPDQRLVIKVNTSPSAGYVRYYNESGKKPIMYLNYVFSKAELKFSMLEKLLTTMHKALIKAMDLAMGQEILVYSPIVSMTKIQKTPLPERKALPIRWITWMTYLEDPRIQFHYDKTLPELKHIPDVYTSSIPPLKHPSQYEGVFCTDGSAIKSPDPTKSNNAGMGIVHAIYNPEYKILNQWSIPLGHHTAQMAEIAAVEFACKKALKVPGPVLVITDSFYVAESANKELPYWKSNGFVNNKKEPLKHISKWKSIAECLSIKPDITIQHEKGHQPINTSIHTEGNALADKLATQGSYVVNAGKRTADGSEFEKRTADGSEFESPKKKAKVE

SEQ ID NO: 707 - protein, 2168 aa, synthetic construct
MPAAKRVKLDGGDKKYSIGLDIGTNSVGWAVITDEYKVPSKKFKVLGNTDRHSIKKNLIGALLFDSGETAEATRLKRTARRRYTRRKNRICYLQEIFSNEMAKVDDSFFHRLEESFLVEEDKKHERHPIFGNIVDEVAYHEKYPTIYHLRKKLVDSTDKADLRLIYLALAHMIKFRGHFLIEGDLNPDNSDVDKLFIQLVQTYNQLFEENPINASGVDAKAILSARLSKSRRLENLIAQLPGEKKNGLFGNLIALSLGLTPNFKSNFDLAEDAKLQLSKDTYDDDLDNLLAQIGDQYADLFLAAKNLSDAILLSDILRVNTEITKAPLSASMIKRYDEHHQDLTLLKALVRQQLPEKYKEIFFDQSKNGYAGYIDGGASQEEFYKFIKPILEKMDGTEELLVKLNREDLLRKQRTFDNGSIPHQIHLGELHAILRRQEDFYPFLKDNREKIEKILTFRIPYYVGPLARGNSRFAWMTRKSEETITPWNFEEVVDKGASAQSFIERMTNFDKNLPNEKVLPKHSLLYEYFTVYNELTKVKYVTEGMRKPAFLSGEQKKAIVDLLFKTNRKVTVKQLKEDYFKKIECFDSVEISGVEDRFNASLGTYHDLLKIIKDKDFLDNEENEDILEDIVLTLTLFEDREMIEERLKTYAHLFDDKVMKQLKRRRYTGWGRLSRKLINGIRDKQSGKTILDFLKSDGFANRNFMQLIHDDSLTFKEDIQKAQVSGQGDSLHEHIANLAGSPAIKKGILQTVKVVDELVKVMGRHKPENIVIEMARENQTTQKGQKNSRERMKRIEEGIKELGSQILKEHPVENTQLQNEKLYLYYLQNGRDMYVDQELDINRLSDYDVDHIVPQSFLKDDSIDNKVLTRSDKARGKSDNVPSEEVVKKMKNYWRQLLNAKLITQRKFDNLTKAERGGLSELDKAGFIKRQLVETRQITKHVAQILDSRMNTKYDENDKLIREVKVITLKSKLVSDFRKDFQFYKVREINNYHHAHDAYLNAVVGTALIKKYPKLESEFVYGDYKVYDVRKMIAKSEQEIGKATAKYFFYSNIMNFFKTEITLANGEIRKRPLIETNGETGEIVWDKGRDFATVRKVLSMPQVNIVKKTEVQTGGFSKESILPKRNSDKLIARKKDWDPKKYGGFDSPTVAYSVLVVAKVEKGKSKKLKSVKELLGITIMERSSFEKNPIDFLEAKGYKEVKKDLIIKLPKYSLFELENGRKRMLASAGELQKGNELALPSKYVNFLYLASHYEKLKGSPEDNEQKQLFVEQHKHYLDEIIEQISEFSKRVILADANLDKVLSAYNKHRDKPIREQAENIIHLFTLTNLGAPAAFKYFDTTIDRKRYTSTKEVLDATLIHQSITGLYETRIDLSQLGGDGGGSSGGMNPLQLLQPLPAEVKGTKLLAHWNSGATITCIPESFLEDEQPIKQTLIKTIHGEKQQNVYYLTFKVKGRKVEAEVIASPYEYILLSPTDVPWLTQQPLQLTILVPLQEYQDRILNKTALPEEQKQQLKALFTKYDNLWQHWENQVGHRKIRPHNIATGDYPPRPQKQYPINPKAKPSIQIVIDDLLKQGVLTPQNSTMNTPVYPVPKPDGRWRMVLDYREVNKTIPLTAAQNQHSAGILATIVRQKYKTTLDLANGFWAHPITPDSYWLTAFTWQGKQYCWTRLPQGFLNSPALFNADAVDLLKEVPNVQVYVDDIYLSHDNPHEHIQQLEKVFQILLQAGYVVSLKKSEIGQRTVEFLGFNITKEGRGLTDTFKTKLLNVTPPKDLKQLQSILGLLNFARNFIPNFAELVQTLYNLIASSPGKYIEWTEDNTKQLNKVIEALNTASNLEERLPDQRLVIKVNTSPSAGYVRYYNESGKKPIMYLNYVFSKAELKFSMLEKLLTTMHKALIKAMDLAMGQEILVYSPIVSMTKIQKTPLPERKALPIRWITWMTYLEDPRIQFHYDKTLPELKHIPDVYTSSIPPLKHPSQYEGVFCTDGSAIKSPDPTKSNNAGMGIVHAIYNPEYKILNQWSIPLGHHTAQMAEIAAVEFACKKALKVPGPVLVITDSFYVAESANKELPYWKSNGFVNNKKEPLKHISKWKSIAECLSIKPDITIQHEKGHQPINTSIHTEGNALADKLATQGSYVVNAGKRTADGSEFEKRTADGSEFESPKKKAKVE

SEQ ID NO: 708 - protein, 2174 aa, synthetic construct
MPAAKRVKLDGGDKKYSIGLDIGTNSVGWAVITDEYKVPSKKFKVLGNTDRHSIKKNLIGALLFDSGETAEATRLKRTARRRYTRRKNRICYLQEIFSNEMAKVDDSFFHRLEESFLVEEDKKHERHPIFGNIVDEVAYHEKYPTIYHLRKKLVDSTDKADLRLIYLALAHMIKFRGHFLIEGDLNPDNSDVDKLFIQLVQTYNQLFEENPINASGVDAKAILSARLSKSRRLENLIAQLPGEKKNGLFGNLIALSLGLTPNFKSNFDLAEDAKLQLSKDTYDDDLDNLLAQIGDQYADLFLAAKNLSDAILLSDILRVNTEITKAPLSASMIKRYDEHHQDLTLLKALVRQQLPEKYKEIFFDQSKNGYAGYIDGGASQEEFYKFIKPILEKMDGTEELLVKLNREDLLRKQRTFDNGSIPHQIHLGELHAILRRQEDFYPFLKDNREKIEKILTFRIPYYVGPLARGNSRFAWMTRKSEETITPWNFEEVVDKGASAQSFIERMTNFDKNLPNEKVLPKHSLLYEYFTVYNELTKVKYVTEGMRKPAFLSGEQKKAIVDLLFKTNRKVTVKQLKEDYFKKIECFDSVEISGVEDRFNASLGTYHDLLKIIKDKDFLDNEENEDILEDIVLTLTLFEDREMIEERLKTYAHLFDDKVMKQLKRRRYTGWGRLSRKLINGIRDKQSGKTILDFLKSDGFANRNFMQLIHDDSLTFKEDIQKAQVSGQGDSLHEHIANLAGSPAIKKGILQTVKVVDELVKVMGRHKPENIVIEMARENQTTQKGQKNSRERMKRIEEGIKELGSQILKEHPVENTQLQNEKLYLYYLQNGRDMYVDQELDINRLSDYDVDHIVPQSFLKDDSIDNKVLTRSDKARGKSDNVPSEEVVKKMKNYWRQLLNAKLITQRKFDNLTKAERGGLSELDKAGFIKRQLVETRQITKHVAQILDSRMNTKYDENDKLIREVKVITLKSKLVSDFRKDFQFYKVREINNYHHAHDAYLNAVVGTALIKKYPKLESEFVYGDYKVYDVRKMIAKSEQEIGKATAKYFFYSNIMNFFKTEITLANGEIRKRPLIETNGETGEIVWDKGRDFATVRKVLSMPQVNIVKKTEVQTGGFSKESILPKRNSDKLIARKKDWDPKKYGGFDSPTVAYSVLVVAKVEKGKSKKLKSVKELLGITIMERSSFEKNPIDFLEAKGYKEVKKDLIIKLPKYSLFELENGRKRMLASAGELQKGNELALPSKYVNFLYLASHYEKLKGSPEDNEQKQLFVEQHKHYLDEIIEQISEFSKRVILADANLDKVLSAYNKHRDKPIREQAENIIHLFTLTNLGAPAAFKYFDTTIDRKRYTSTKEVLDATLIHQSITGLYETRIDLSQLGGDGGGGGPAPGSSGGMNPLQLLQPLPAEVKGTKLLAHWNSGATITCIPESFLEDEQPIKQTLIKTIHGEKQQNVYYLTFKVKGRKVEAEVIASPYEYILLSPTDVPWLTQQPLQLTILVPLQEYQDRILNKTALPEEQKQQLKALFTKYDNLWQHWENQVGHRKIRPHNIATGDYPPRPQKQYPINPKAKPSIQIVIDDLLKQGVLTPQNSTMNTPVYPVPKPDGRWRMVLDYREVNKTIPLTAAQNQHSAGILATIVRQKYKTTLDLANGFWAHPITPDSYWLTAFTWQGKQYCWTRLPQGFLNSPALFNADAVDLLKEVPNVQVYVDDIYLSHDNPHEHIQQLEKVFQILLQAGYVVSLKKSEIGQRTVEFLGFNITKEGRGLTDTFKTKLLNVTPPKDLKQLQSILGLLNFARNFIPNFAELVQTLYNLIASSPGKYIEWTEDNTKQLNKVIEALNTASNLEERLPDQRLVIKVNTSPSAGYVRYYNESGKKPIMYLNYVFSKAELKFSMLEKLLTTMHKALIKAMDLAMGQEILVYSPIVSMTKIQKTPLPERKALPIRWITWMTYLEDPRIQFHYDKTLPELKHIPDVYTSSIPPLKHPSQYEGVFCTDGSAIKSPDPTKSNNAGMGIVHAIYNPEYKILNQWSIPLGHHTAQMAEIAAVEFACKKALKVPGPVLVITDSFYVAESANKELPYWKSNGFVNNKKEPLKHISKWKSIAECLSIKPDITIQHEKGHQPINTSIHTEGNALADKLATQGSYVVNAGKRTADGSEFEKRTADGSEFESPKKKAKVE

SEQ ID NO: 709 - protein, 2176 aa, synthetic construct
MPAAKRVKLDGGDKKYSIGLDIGTNSVGWAVITDEYKVPSKKFKVLGNTDRHSIKKNLIGALLFDSGETAEATRLKRTARRRYTRRKNRICYLQEIFSNEMAKVDDSFFHRLEESFLVEEDKKHERHPIFGNIVDEVAYHEKYPTIYHLRKKLVDSTDKADLRLIYLALAHMIKFRGHFLIEGDLNPDNSDVDKLFIQLVQTYNQLFEENPINASGVDAKAILSARLSKSRRLENLIAQLPGEKKNGLFGNLIALSLGLTPNFKSNFDLAEDAKLQLSKDTYDDDLDNLLAQIGDQYADLFLAAKNLSDAILLSDILRVNTEITKAPLSASMIKRYDEHHQDLTLLKALVRQQLPEKYKEIFFDQSKNGYAGYIDGGASQEEFYKFIKPILEKMDGTEELLVKLNREDLLRKQRTFDNGSIPHQIHLGELHAILRRQEDFYPFLKDNREKIEKILTFRIPYYVGPLARGNSRFAWMTRKSEETITPWNFEEVVDKGASAQSFIERMTNFDKNLPNEKVLPKHSLLYEYFTVYNELTKVKYVTEGMRKPAFLSGEQKKAIVDLLFKTNRKVTVKQLKEDYFKKIECFDSVEISGVEDRFNASLGTYHDLLKIIKDKDFLDNEENEDILEDIVLTLTLFEDREMIEERLKTYAHLFDDKVMKQLKRRRYTGWGRLSRKLINGIRDKQSGKTILDFLKSDGFANRNFMQLIHDDSLTFKEDIQKAQVSGQGDSLHEHIANLAGSPAIKKGILQTVKVVDELVKVMGRHKPENIVIEMARENQTTQKGQKNSRERMKRIEEGIKELGSQILKEHPVENTQLQNEKLYLYYLQNGRDMYVDQELDINRLSDYDVDHIVPQSFLKDDSIDNKVLTRSDKARGKSDNVPSEEVVKKMKNYWRQLLNAKLITQRKFDNLTKAERGGLSELDKAGFIKRQLVETRQITKHVAQILDSRMNTKYDENDKLIREVKVITLKSKLVSDFRKDFQFYKVREINNYHHAHDAYLNAVVGTALIKKYPKLESEFVYGDYKVYDVRKMIAKSEQEIGKATAKYFFYSNIMNFFKTEITLANGEIRKRPLIETNGETGEIVWDKGRDFATVRKVLSMPQVNIVKKTEVQTGGFSKESILPKRNSDKLIARKKDWDPKKYGGFDSPTVAYSVLVVAKVEKGKSKKLKSVKELLGITIMERSSFEKNPIDFLEAKGYKEVKKDLIIKLPKYSLFELENGRKRMLASAGELQKGNELALPSKYVNFLYLASHYEKLKGSPEDNEQKQLFVEQHKHYLDEIIEQISEFSKRVILADANLDKVLSAYNKHRDKPIREQAENIIHLFTLTNLGAPAAFKYFDTTIDRKRYTSTKEVLDATLIHQSITGLYETRIDLSQLGGDGGPAPEAAAKGSSGGMNPLQLLQPLPAEVKGTKLLAHWNSGATITCIPESFLEDEQPIKQTLIKTIHGEKQQNVYYLTFKVKGRKVEAEVIASPYEYILLSPTDVPWLTQQPLQLTILVPLQEYQDRILNKTALPEEQKQQLKALFTKYDNLWQHWENQVGHRKIRPHNIATGDYPPRPQKQYPINPKAKPSIQIVIDDLLKQGVLTPQNSTMNTPVYPVPKPDGRWRMVLDYREVNKTIPLTAAQNQHSAGILATIVRQKYKTTLDLANGFWAHPITPDSYWLTAFTWQGKQYCWTRLPQGFLNSPALFNADAVDLLKEVPNVQVYVDDIYLSHDNPHEHIQQLEKVFQILLQAGYVVSLKKSEIGQRTVEFLGFNITKEGRGLTDTFKTKLLNVTPPKDLKQLQSILGLLNFARNFIPNFAELVQTLYNLIASSPGKYIEWTEDNTKQLNKVIEALNTASNLEERLPDQRLVIKVNTSPSAGYVRYYNESGKKPIMYLNYVFSKAELKFSMLEKLLTTMHKALIKAMDLAMGQEILVYSPIVSMTKIQKTPLPERKALPIRWITWMTYLEDPRIQFHYDKTLPELKHIPDVYTSSIPPLKHPSQYEGVFCTDGSAIKSPDPTKSNNAGMGIVHAIYNPEYKILNQWSIPLGHHTAQMAEIAAVEFACKKALKVPGPVLVITDSFYVAESANKELPYWKSNGFVNNKKEPLKHISKWKSIAECLSIKPDITIQHEKGHQPINTSIHTEGNALADKLATQGSYVVNAGKRTADGSEFEKRTADGSEFESPKKKAKVE

SEQ ID NO: 710 - protein, 2171 aa, synthetic construct
MPAAKRVKLDGGDKKYSIGLDIGTNSVGWAVITDEYKVPSKKFKVLGNTDRHSIKKNLIGALLFDSGETAEATRLKRTARRRYTRRKNRICYLQEIFSNEMAKVDDSFFHRLEESFLVEEDKKHERHPIFGNIVDEVAYHEKYPTIYHLRKKLVDSTDKADLRLIYLALAHMIKFRGHFLIEGDLNPDNSDVDKLFIQLVQTYNQLFEENPINASGVDAKAILSARLSKSRRLENLIAQLPGEKKNGLFGNLIALSLGLTPNFKSNFDLAEDAKLQLSKDTYDDDLDNLLAQIGDQYADLFLAAKNLSDAILLSDILRVNTEITKAPLSASMIKRYDEHHQDLTLLKALVRQQLPEKYKEIFFDQSKNGYAGYIDGGASQEEFYKFIKPILEKMDGTEELLVKLNREDLLRKQRTFDNGSIPHQIHLGELHAILRRQEDFYPFLKDNREKIEKILTFRIPYYVGPLARGNSRFAWMTRKSEETITPWNFEEVVDKGASAQSFIERMTNFDKNLPNEKVLPKHSLLYEYFTVYNELTKVKYVTEGMRKPAFLSGEQKKAIVDLLFKTNRKVTVKQLKEDYFKKIECFDSVEISGVEDRFNASLGTYHDLLKIIKDKDFLDNEENEDILEDIVLTLTLFEDREMIEERLKTYAHLFDDKVMKQLKRRRYTGWGRLSRKLINGIRDKQSGKTILDFLKSDGFANRNFMQLIHDDSLTFKEDIQKAQVSGQGDSLHEHIANLAGSPAIKKGILQTVKVVDELVKVMGRHKPENIVIEMARENQTTQKGQKNSRERMKRIEEGIKELGSQILKEHPVENTQLQNEKLYLYYLQNGRDMYVDQELDINRLSDYDVDHIVPQSFLKDDSIDNKVLTRSDKARGKSDNVPSEEVVKKMKNYWRQLLNAKLITQRKFDNLTKAERGGLSELDKAGFIKRQLVETRQITKHVAQILDSRMNTKYDENDKLIREVKVITLKSKLVSDFRKDFQFYKVREINNYHHAHDAYLNAVVGTALIKKYPKLESEFVYGDYKVYDVRKMIAKSEQEIGKATAKYFFYSNIMNFFKTEITLANGEIRKRPLIETNGETGEIVWDKGRDFATVRKVLSMPQVNIVKKTEVQTGGFSKESILPKRNSDKLIARKKDWDPKKYGGFDSPTVAYSVLVVAKVEKGKSKKLKSVKELLGITIMERSSFEKNPIDFLEAKGYKEVKKDLIIKLPKYSLFELENGRKRMLASAGELQKGNELALPSKYVNFLYLASHYEKLKGSPEDNEQKQLFVEQHKHYLDEIIEQISEFSKRVILADANLDKVLSAYNKHRDKPIREQAENIIHLFTLTNLGAPAAFKYFDTTIDRKRYTSTKEVLDATLIHQSITGLYETRIDLSQLGGDGGGGGGSSGGMNPLQLLQPLPAEVKGTKLLAHWNSGATITCIPESFLEDEQPIKQTLIKTIHGEKQQNVYYLTFKVKGRKVEAEVIASPYEYILLSPTDVPWLTQQPLQLTILVPLQEYQDRILNKTALPEEQKQQLKALFTKYDNLWQHWENQVGHRKIRPHNIATGDYPPRPQKQYPINPKAKPSIQIVIDDLLKQGVLTPQNSTMNTPVYPVPKPDGRWRMVLDYREVNKTIPLTAAQNQHSAGILATIVRQKYKTTLDLANGFWAHPITPDSYWLTAFTWQGKQYCWTRLPQGFLNSPALFNADAVDLLKEVPNVQVYVDDIYLSHDNPHEHIQQLEKVFQILLQAGYVVSLKKSEIGQRTVEFLGFNITKEGRGLTDTFKTKLLNVTPPKDLKQLQSILGLLNFARNFIPNFAELVQTLYNLIASSPGKYIEWTEDNTKQLNKVIEALNTASNLEERLPDQRLVIKVNTSPSAGYVRYYNESGKKPIMYLNYVFSKAELKFSMLEKLLTTMHKALIKAMDLAMGQEILVYSPIVSMTKIQKTPLPERKALPIRWITWMTYLEDPRIQFHYDKTLPELKHIPDVYTSSIPPLKHPSQYEGVFCTDGSAIKSPDPTKSNNAGMGIVHAIYNPEYKILNQWSIPLGHHTAQMAEIAAVEFACKKALKVPGPVLVITDSFYVAESANKELPYWKSNGFVNNKKEPLKHISKWKSIAECLSIKPDITIQHEKGHQPINTSIHTEGNALADKLATQGSYVVNAGKRTADGSEFEKRTADGSEFESPKKKAKVE

SEQ ID NO: 711 - protein, 2174 aa, synthetic construct
MPAAKRVKLDGGDKKYSIGLDIGTNSVGWAVITDEYKVPSKKFKVLGNTDRHSIKKNLIGALLFDSGETAEATRLKRTARRRYTRRKNRICYLQEIFSNEMAKVDDSFFHRLEESFLVEEDKKHERHPIFGNIVDEVAYHEKYPTIYHLRKKLVDSTDKADLRLIYLALAHMIKFRGHFLIEGDLNPDNSDVDKLFIQLVQTYNQLFEENPINASGVDAKAILSARLSKSRRLENLIAQLPGEKKNGLFGNLIALSLGLTPNFKSNFDLAEDAKLQLSKDTYDDDLDNLLAQIGDQYADLFLAAKNLSDAILLSDILRVNTEITKAPLSASMIKRYDEHHQDLTLLKALVRQQLPEKYKEIFFDQSKNGYAGYIDGGASQEEFYKFIKPILEKMDGTEELLVKLNREDLLRKQRTFDNGSIPHQIHLGELHAILRRQEDFYPFLKDNREKIEKILTFRIPYYVGPLARGNSRFAWMTRKSEETITPWNFEEVVDKGASAQSFIERMTNFDKNLPNEKVLPKHSLLYEYFTVYNELTKVKYVTEGMRKPAFLSGEQKKAIVDLLFKTNRKVTVKQLKEDYFKKIECFDSVEISGVEDRFNASLGTYHDLLKIIKDKDFLDNEENEDILEDIVLTLTLFEDREMIEERLKTYAHLFDDKVMKQLKRRRYTGWGRLSRKLINGIRDKQSGKTILDFLKSDGFANRNFMQLIHDDSLTFKEDIQKAQVSGQGDSLHEHIANLAGSPAIKKGILQTVKVVDELVKVMGRHKPENIVIEMARENQTTQKGQKNSRERMKRIEEGIKELGSQILKEHPVENTQLQNEKLYLYYLQNGRDMYVDQELDINRLSDYDVDHIVPQSFLKDDSIDNKVLTRSDKARGKSDNVPSEEVVKKMKNYWRQLLNAKLITQRKFDNLTKAERGGLSELDKAGFIKRQLVETRQITKHVAQILDSRMNTKYDENDKLIREVKVITLKSKLVSDFRKDFQFYKVREINNYHHAHDAYLNAVVGTALIKKYPKLESEFVYGDYKVYDVRKMIAKSEQEIGKATAKYFFYSNIMNFFKTEITLANGEIRKRPLIETNGETGEIVWDKGRDFATVRKVLSMPQVNIVKKTEVQTGGFSKESILPKRNSDKLIARKKDWDPKKYGGFDSPTVAYSVLVVAKVEKGKSKKLKSVKELLGITIMERSSFEKNPIDFLEAKGYKEVKKDLIIKLPKYSLFELENGRKRMLASAGELQKGNELALPSKYVNFLYLASHYEKLKGSPEDNEQKQLFVEQHKHYLDEIIEQISEFSKRVILADANLDKVLSAYNKHRDKPIREQAENIIHLFTLTNLGAPAAFKYFDTTIDRKRYTSTKEVLDATLIHQSITGLYETRIDLSQLGGDGGGSSGGGGGSGGMNPLQLLQPLPAEVKGTKLLAHWNSGATITCIPESFLEDEQPIKQTLIKTIHGEKQQNVYYLTFKVKGRKVEAEVIASPYEYILLSPTDVPWLTQQPLQLTILVPLQEYQDRILNKTALPEEQKQQLKALFTKYDNLWQHWENQVGHRKIRPHNIATGDYPPRPQKQYPINPKAKPSIQIVIDDLLKQGVLTPQNSTMNTPVYPVPKPDGRWRMVLDYREVNKTIPLTAAQNQHSAGILATIVRQKYKTTLDLANGFWAHPITPDSYWLTAFTWQGKQYCWTRLPQGFLNSPALFNADAVDLLKEVPNVQVYVDDIYLSHDNPHEHIQQLEKVFQILLQAGYVVSLKKSEIGQRTVEFLGFNITKEGRGLTDTFKTKLLNVTPPKDLKQLQSILGLLNFARNFIPNFAELVQTLYNLIASSPGKYIEWTEDNTKQLNKVIEALNTASNLEERLPDQRLVIKVNTSPSAGYVRYYNESGKKPIMYLNYVFSKAELKFSMLEKLLTTMHKALIKAMDLAMGQEILVYSPIVSMTKIQKTPLPERKALPIRWITWMTYLEDPRIQFHYDKTLPELKHIPDVYTSSIPPLKHPSQYEGVFCTDGSAIKSPDPTKSNNAGMGIVHAIYNPEYKILNQWSIPLGHHTAQMAEIAAVEFACKKALKVPGPVLVITDSFYVAESANKELPYWKSNGFVNNKKEPLKHISKWKSIAECLSIKPDITIQHEKGHQPINTSIHTEGNALADKLATQGSYVVNAGKRTADGSEFEKRTADGSEFESPKKKAKVE

SEQ ID NO: 712 - protein, 2176 aa, synthetic construct
MPAAKRVKLDGGDKKYSIGLDIGTNSVGWAVITDEYKVPSKKFKVLGNTDRHSIKKNLIGALLFDSGETAEATRLKRTARRRYTRRKNRICYLQEIFSNEMAKVDDSFFHRLEESFLVEEDKKHERHPIFGNIVDEVAYHEKYPTIYHLRKKLVDSTDKADLRLIYLALAHMIKFRGHFLIEGDLNPDNSDVDKLFIQLVQTYNQLFEENPINASGVDAKAILSARLSKSRRLENLIAQLPGEKKNGLFGNLIALSLGLTPNFKSNFDLAEDAKLQLSKDTYDDDLDNLLAQIGDQYADLFLAAKNLSDAILLSDILRVNTEITKAPLSASMIKRYDEHHQDLTLLKALVRQQLPEKYKEIFFDQSKNGYAGYIDGGASQEEFYKFIKPILEKMDGTEELLVKLNREDLLRKQRTFDNGSIPHQIHLGELHAILRRQEDFYPFLKDNREKIEKILTFRIPYYVGPLARGNSRFAWMTRKSEETITPWNFEEVVDKGASAQSFIERMTNFDKNLPNEKVLPKHSLLYEYFTVYNELTKVKYVTEGMRKPAFLSGEQKKAIVDLLFKTNRKVTVKQLKEDYFKKIECFDSVEISGVEDRFNASLGTYHDLLKIIKDKDFLDNEENEDILEDIVLTLTLFEDREMIEERLKTYAHLFDDKVMKQLKRRRYTGWGRLSRKLINGIRDKQSGKTILDFLKSDGFANRNFMQLIHDDSLTFKEDIQKAQVSGQGDSLHEHIANLAGSPAIKKGILQTVKVVDELVKVMGRHKPENIVIEMARENQTTQKGQKNSRERMKRIEEGIKELGSQILKEHPVENTQLQNEKLYLYYLQNGRDMYVDQELDINRLSDYDVDHIVPQSFLKDDSIDNKVLTRSDKARGKSDNVPSEEVVKKMKNYWRQLLNAKLITQRKFDNLTKAERGGLSELDKAGFIKRQLVETRQITKHVAQILDSRMNTKYDENDKLIREVKVITLKSKLVSDFRKDFQFYKVREINNYHHAHDAYLNAVVGTALIKKYPKLESEFVYGDYKVYDVRKMIAKSEQEIGKATAKYFFYSNIMNFFKTEITLANGEIRKRPLIETNGETGEIVWDKGRDFATVRKVLSMPQVNIVKKTEVQTGGFSKESILPKRNSDKLIARKKDWDPKKYGGFDSPTVAYSVLVVAKVEKGKSKKLKSVKELLGITIMERSSFEKNPIDFLEAKGYKEVKKDLIIKLPKYSLFELENGRKRMLASAGELQKGNELALPSKYVNFLYLASHYEKLKGSPEDNEQKQLFVEQHKHYLDEIIEQISEFSKRVILADANLDKVLSAYNKHRDKPIREQAENIIHLFTLTNLGAPAAFKYFDTTIDRKRYTSTKEVLDATLIHQSITGLYETRIDLSQLGGDGGGSSGGSEAAAKGGMNPLQLLQPLPAEVKGTKLLAHWNSGATITCIPESFLEDEQPIKQTLIKTIHGEKQQNVYYLTFKVKGRKVEAEVIASPYEYILLSPTDVPWLTQQPLQLTILVPLQEYQDRILNKTALPEEQKQQLKALFTKYDNLWQHWENQVGHRKIRPHNIATGDYPPRPQKQYPINPKAKPSIQIVIDDLLKQGVLTPQNSTMNTPVYPVPKPDGRWRMVLDYREVNKTIPLTAAQNQHSAGILATIVRQKYKTTLDLANGFWAHPITPDSYWLTAFTWQGKQYCWTRLPQGFLNSPALFNADAVDLLKEVPNVQVYVDDIYLSHDNPHEHIQQLEKVFQILLQAGYVVSLKKSEIGQRTVEFLGFNITKEGRGLTDTFKTKLLNVTPPKDLKQLQSILGLLNFARNFIPNFAELVQTLYNLIASSPGKYIEWTEDNTKQLNKVIEALNTASNLEERLPDQRLVIKVNTSPSAGYVRYYNESGKKPIMYLNYVFSKAELKFSMLEKLLTTMHKALIKAMDLAMGQEILVYSPIVSMTKIQKTPLPERKALPIRWITWMTYLEDPRIQFHYDKTLPELKHIPDVYTSSIPPLKHPSQYEGVFCTDGSAIKSPDPTKSNNAGMGIVHAIYNPEYKILNQWSIPLGHHTAQMAEIAAVEFACKKALKVPGPVLVITDSFYVAESANKELPYWKSNGFVNNKKEPLKHISKWKSIAECLSIKPDITIQHEKGHQPINTSIHTEGNALADKLATQGSYVVNAGKRTADGSEFEKRTADGSEFESPKKKAKVE

SEQ ID NO: 713 - protein, 2181 aa, synthetic construct
MPAAKRVKLDGGDKKYSIGLDIGTNSVGWAVITDEYKVPSKKFKVLGNTDRHSIKKNLIGALLFDSGETAEATRLKRTARRRYTRRKNRICYLQEIFSNEMAKVDDSFFHRLEESFLVEEDKKHERHPIFGNIVDEVAYHEKYPTIYHLRKKLVDSTDKADLRLIYLALAHMIKFRGHFLIEGDLNPDNSDVDKLFIQLVQTYNQLFEENPINASGVDAKAILSARLSKSRRLENLIAQLPGEKKNGLFGNLIALSLGLTPNFKSNFDLAEDAKLQLSKDTYDDDLDNLLAQIGDQYADLFLAAKNLSDAILLSDILRVNTEITKAPLSASMIKRYDEHHQDLTLLKALVRQQLPEKYKEIFFDQSKNGYAGYIDGGASQEEFYKFIKPILEKMDGTEELLVKLNREDLLRKQRTFDNGSIPHQIHLGELHAILRRQEDFYPFLKDNREKIEKILTFRIPYYVGPLARGNSRFAWMTRKSEETITPWNFEEVVDKGASAQSFIERMTNFDKNLPNEKVLPKHSLLYEYFTVYNELTKVKYVTEGMRKPAFLSGEQKKAIVDLLFKTNRKVTVKQLKEDYFKKIECFDSVEISGVEDRFNASLGTYHDLLKIIKDKDFLDNEENEDILEDIVLTLTLFEDREMIEERLKTYAHLFDDKVMKQLKRRRYTGWGRLSRKLINGIRDKQSGKTILDFLKSDGFANRNFMQLIHDDSLTFKEDIQKAQVSGQGDSLHEHIANLAGSPAIKKGILQTVKVVDELVKVMGRHKPENIVIEMARENQTTQKGQKNSRERMKRIEEGIKELGSQILKEHPVENTQLQNEKLYLYYLQNGRDMYVDQELDINRLSDYDVDHIVPQSFLKDDSIDNKVLTRSDKARGKSDNVPSEEVVKKMKNYWRQLLNAKLITQRKFDNLTKAERGGLSELDKAGFIKRQLVETRQITKHVAQILDSRMNTKYDENDKLIREVKVITLKSKLVSDFRKDFQFYKVREINNYHHAHDAYLNAVVGTALIKKYPKLESEFVYGDYKVYDVRKMIAKSEQEIGKATAKYFFYSNIMNFFKTEITLANGEIRKRPLIETNGETGEIVWDKGRDFATVRKVLSMPQVNIVKKTEVQTGGFSKESILPKRNSDKLIARKKDWDPKKYGGFDSPTVAYSVLVVAKVEKGKSKKLKSVKELLGITIMERSSFEKNPIDFLEAKGYKEVKKDLIIKLPKYSLFELENGRKRMLASAGELQKGNELALPSKYVNFLYLASHYEKLKGSPEDNEQKQLFVEQHKHYLDEIIEQISEFSKRVILADANLDKVLSAYNKHRDKPIREQAENIIHLFTLTNLGAPAAFKYFDTTIDRKRYTSTKEVLDATLIHQSITGLYETRIDLSQLGGDGGSGSETPGTSESATPESGGMNPLQLLQPLPAEVKGTKLLAHWNSGATITCIPESFLEDEQPIKQTLIKTIHGEKQQNVYYLTFKVKGRKVEAEVIASPYEYILLSPTDVPWLTQQPLQLTILVPLQEYQDRILNKTALPEEQKQQLKALFTKYDNLWQHWENQVGHRKIRPHNIATGDYPPRPQKQYPINPKAKPSIQIVIDDLLKQGVLTPQNSTMNTPVYPVPKPDGRWRMVLDYREVNKTIPLTAAQNQHSAGILATIVRQKYKTTLDLANGFWAHPITPDSYWLTAFTWQGKQYCWTRLPQGFLNSPALFNADAVDLLKEVPNVQVYVDDIYLSHDNPHEHIQQLEKVFQILLQAGYVVSLKKSEIGQRTVEFLGFNITKEGRGLTDTFKTKLLNVTPPKDLKQLQSILGLLNFARNFIPNFAELVQTLYNLIASSPGKYIEWTEDNTKQLNKVIEALNTASNLEERLPDQRLVIKVNTSPSAGYVRYYNESGKKPIMYLNYVFSKAELKFSMLEKLLTTMHKALIKAMDLAMGQEILVYSPIVSMTKIQKTPLPERKALPIRWITWMTYLEDPRIQFHYDKTLPELKHIPDVYTSSIPPLKHPSQYEGVFCTDGSAIKSPDPTKSNNAGMGIVHAIYNPEYKILNQWSIPLGHHTAQMAEIAAVEFACKKALKVPGPVLVITDSFYVAESANKELPYWKSNGFVNNKKEPLKHISKWKSIAECLSIKPDITIQHEKGHQPINTSIHTEGNALADKLATQGSYVVNAGKRTADGSEFEKRTADGSEFESPKKKAKVE

SEQ ID NO: 714 - protein, 2176 aa, synthetic construct
MPAAKRVKLDGGDKKYSIGLDIGTNSVGWAVITDEYKVPSKKFKVLGNTDRHSIKKNLIGALLFDSGETAEATRLKRTARRRYTRRKNRICYLQEIFSNEMAKVDDSFFHRLEESFLVEEDKKHERHPIFGNIVDEVAYHEKYPTIYHLRKKLVDSTDKADLRLIYLALAHMIKFRGHFLIEGDLNPDNSDVDKLFIQLVQTYNQLFEENPINASGVDAKAILSARLSKSRRLENLIAQLPGEKKNGLFGNLIALSLGLTPNFKSNFDLAEDAKLQLSKDTYDDDLDNLLAQIGDQYADLFLAAKNLSDAILLSDILRVNTEITKAPLSASMIKRYDEHHQDLTLLKALVRQQLPEKYKEIFFDQSKNGYAGYIDGGASQEEFYKFIKPILEKMDGTEELLVKLNREDLLRKQRTFDNGSIPHQIHLGELHAILRRQEDFYPFLKDNREKIEKILTFRIPYYVGPLARGNSRFAWMTRKSEETITPWNFEEVVDKGASAQSFIERMTNFDKNLPNEKVLPKHSLLYEYFTVYNELTKVKYVTEGMRKPAFLSGEQKKAIVDLLFKTNRKVTVKQLKEDYFKKIECFDSVEISGVEDRFNASLGTYHDLLKIIKDKDFLDNEENEDILEDIVLTLTLFEDREMIEERLKTYAHLFDDKVMKQLKRRRYTGWGRLSRKLINGIRDKQSGKTILDFLKSDGFANRNFMQLIHDDSLTFKEDIQKAQVSGQGDSLHEHIANLAGSPAIKKGILQTVKVVDELVKVMGRHKPENIVIEMARENQTTQKGQKNSRERMKRIEEGIKELGSQILKEHPVENTQLQNEKLYLYYLQNGRDMYVDQELDINRLSDYDVDHIVPQSFLKDDSIDNKVLTRSDKARGKSDNVPSEEVVKKMKNYWRQLLNAKLITQRKFDNLTKAERGGLSELDKAGFIKRQLVETRQITKHVAQILDSRMNTKYDENDKLIREVKVITLKSKLVSDFRKDFQFYKVREINNYHHAHDAYLNAVVGTALIKKYPKLESEFVYGDYKVYDVRKMIAKSEQEIGKATAKYFFYSNIMNFFKTEITLANGEIRKRPLIETNGETGEIVWDKGRDFATVRKVLSMPQVNIVKKTEVQTGGFSKESILPKRNSDKLIARKKDWDPKKYGGFDSPTVAYSVLVVAKVEKGKSKKLKSVKELLGITIMERSSFEKNPIDFLEAKGYKEVKKDLIIKLPKYSLFELENGRKRMLASAGELQKGNELALPSKYVNFLYLASHYEKLKGSPEDNEQKQLFVEQHKHYLDEIIEQISEFSKRVILADANLDKVLSAYNKHRDKPIREQAENIIHLFTLTNLGAPAAFKYFDTTIDRKRYTSTKEVLDATLIHQSITGLYETRIDLSQLGGDGGGGSEAAAKPAPGGMNPLQLLQPLPAEVKGTKLLAHWNSGATITCIPESFLEDEQPIKQTLIKTIHGEKQQNVYYLTFKVKGRKVEAEVIASPYEYILLSPTDVPWLTQQPLQLTILVPLQEYQDRILNKTALPEEQKQQLKALFTKYDNLWQHWENQVGHRKIRPHNIATGDYPPRPQKQYPINPKAKPSIQIVIDDLLKQGVLTPQNSTMNTPVYPVPKPDGRWRMVLDYREVNKTIPLTAAQNQHSAGILATIVRQKYKTTLDLANGFWAHPITPDSYWLTAFTWQGKQYCWTRLPQGFLNSPALFNADAVDLLKEVPNVQVYVDDIYLSHDNPHEHIQQLEKVFQILLQAGYVVSLKKSEIGQRTVEFLGFNITKEGRGLTDTFKTKLLNVTPPKDLKQLQSILGLLNFARNFIPNFAELVQTLYNLIASSPGKYIEWTEDNTKQLNKVIEALNTASNLEERLPDQRLVIKVNTSPSAGYVRYYNESGKKPIMYLNYVFSKAELKFSMLEKLLTTMHKALIKAMDLAMGQEILVYSPIVSMTKIQKTPLPERKALPIRWITWMTYLEDPRIQFHYDKTLPELKHIPDVYTSSIPPLKHPSQYEGVFCTDGSAIKSPDPTKSNNAGMGIVHAIYNPEYKILNQWSIPLGHHTAQMAEIAAVEFACKKALKVPGPVLVITDSFYVAESANKELPYWKSNGFVNNKKEPLKHISKWKSIAECLSIKPDITIQHEKGHQPINTSIHTEGNALADKLATQGSYVVNAGKRTADGSEFEKRTADGSEFESPKKKAKVE

SEQ ID NO: 715 - protein, 2208 aa, synthetic construct
MPAAKRVKLDGGDKKYSIGLDIGTNSVGWAVITDEYKVPSKKFKVLGNTDRHSIKKNLIGALLFDSGETAEATRLKRTARRRYTRRKNRICYLQEIFSNEMAKVDDSFFHRLEESFLVEEDKKHERHPIFGNIVDEVAYHEKYPTIYHLRKKLVDSTDKADLRLIYLALAHMIKFRGHFLIEGDLNPDNSDVDKLFIQLVQTYNQLFEENPINASGVDAKAILSARLSKSRRLENLIAQLPGEKKNGLFGNLIALSLGLTPNFKSNFDLAEDAKLQLSKDTYDDDLDNLLAQIGDQYADLFLAAKNLSDAILLSDILRVNTEITKAPLSASMIKRYDEHHQDLTLLKALVRQQLPEKYKEIFFDQSKNGYAGYIDGGASQEEFYKFIKPILEKMDGTEELLVKLNREDLLRKQRTFDNGSIPHQIHLGELHAILRRQEDFYPFLKDNREKIEKILTFRIPYYVGPLARGNSRFAWMTRKSEETITPWNFEEVVDKGASAQSFIERMTNFDKNLPNEKVLPKHSLLYEYFTVYNELTKVKYVTEGMRKPAFLSGEQKKAIVDLLFKTNRKVTVKQLKEDYFKKIECFDSVEISGVEDRFNASLGTYHDLLKIIKDKDFLDNEENEDILEDIVLTLTLFEDREMIEERLKTYAHLFDDKVMKQLKRRRYTGWGRLSRKLINGIRDKQSGKTILDFLKSDGFANRNFMQLIHDDSLTFKEDIQKAQVSGQGDSLHEHIANLAGSPAIKKGILQTVKVVDELVKVMGRHKPENIVIEMARENQTTQKGQKNSRERMKRIEEGIKELGSQILKEHPVENTQLQNEKLYLYYLQNGRDMYVDQELDINRLSDYDVDHIVPQSFLKDDSIDNKVLTRSDKARGKSDNVPSEEVVKKMKNYWRQLLNAKLITQRKFDNLTKAERGGLSELDKAGFIKRQLVETRQITKHVAQILDSRMNTKYDENDKLIREVKVITLKSKLVSDFRKDFQFYKVREINNYHHAHDAYLNAVVGTALIKKYPKLESEFVYGDYKVYDVRKMIAKSEQEIGKATAKYFFYSNIMNFFKTEITLANGEIRKRPLIETNGETGEIVWDKGRDFATVRKVLSMPQVNIVKKTEVQTGGFSKESILPKRNSDKLIARKKDWDPKKYGGFDSPTVAYSVLVVAKVEKGKSKKLKSVKELLGITIMERSSFEKNPIDFLEAKGYKEVKKDLIIKLPKYSLFELENGRKRMLASAGELQKGNELALPSKYVNFLYLASHYEKLKGSPEDNEQKQLFVEQHKHYLDEIIEQISEFSKRVILADANLDKVLSAYNKHRDKPIREQAENIIHLFTLTNLGAPAAFKYFDTTIDRKRYTSTKEVLDATLIHQSITGLYETRIDLSQLGGDGGAEAAAKEAAAKEAAAKEAAAKALEAEAAAKEAAAKEAAAKEAAAKAGGMDLLKPLTVERKGVKIKGYWNSQADITCVPKDLLQGEEPVRQQNVTTIHGTQEGDVYYVNLKIDGRRINTEVIGTTLDYAIITPGDVPWILKKPLELTIKLDLEEQQGTLLNNSILSKKGKEELKQLFEKYSALWQSWENQVGHRRIRPHKIATGTVKPTPQKQYHINPKAKPDIQIVINDLLKQGVLIQKESTMNTPVYPVPKPNGRWRMVLDYRAVNKVTPLIAVQNQHSYGILGSLFKGRYKTTIDLSNGFWAHPIVPEDYWITAFTWQGKQYCWTVLPQGFLNSPGLFTGDVVDLLQGIPNVEVYVDDVYISHDSEKEHLEYLDILFNRLKEAGYIISLKKSNIANSIVDFLGFQITNEGRGLTDTFKEKLENITAPTTLKQLQSILGLLNFARNFIPDFTELIAPLYALIPKSTKNYVPWQIEHSTTLETLITKLNGAEYLQGRKGDKTLIMKVNASYTTGYIRYYNEGEKKPISYVSIVFSKTELKFTELEKLLTTVHKGLLKALDLSMGQNIHVYSPIVSMQNIQKTPQTAKKALASRWLSWLSYLEDPRIRFFYDPQMPALKDLPAVDTGKDNKKHPSNFQHIFYTDGSAITSPTKEGHLNAGMGIVYFINKDGNLQKQQEWSISLGNHTAQFAEIAAFEFALKKCLPLGGNILVVTDSNYVAKAYNEELDVWASNGFVNNRKKPLKHISKWKSVADLKRLRPDVVVTHEPGHQKLDSSPHAYGNNLADQLATQASFKVHAGKRTADGSEFEKRTADGSEFESPKKKAKVE

SEQ ID NO: 716 - protein, 2192 aa, synthetic construct
MPAAKRVKLDGGDKKYSIGLDIGTNSVGWAVITDEYKVPSKKFKVLGNTDRHSIKKNLIGALLFDSGETAEATRLKRTARRRYTRRKNRICYLQEIFSNEMAKVDDSFFHRLEESFLVEEDKKHERHPIFGNIVDEVAYHEKYPTIYHLRKKLVDSTDKADLRLIYLALAHMIKFRGHFLIEGDLNPDNSDVDKLFIQLVQTYNQLFEENPINASGVDAKAILSARLSKSRRLENLIAQLPGEKKNGLFGNLIALSLGLTPNFKSNFDLAEDAKLQLSKDTYDDDLDNLLAQIGDQYADLFLAAKNLSDAILLSDILRVNTEITKAPLSASMIKRYDEHHQDLTLLKALVRQQLPEKYKEIFFDQSKNGYAGYIDGGASQEEFYKFIKPILEKMDGTEELLVKLNREDLLRKQRTFDNGSIPHQIHLGELHAILRRQEDFYPFLKDNREKIEKILTFRIPYYVGPLARGNSRFAWMTRKSEETITPWNFEEVVDKGASAQSFIERMTNFDKNLPNEKVLPKHSLLYEYFTVYNELTKVKYVTEGMRKPAFLSGEQKKAIVDLLFKTNRKVTVKQLKEDYFKKIECFDSVEISGVEDRFNASLGTYHDLLKIIKDKDFLDNEENEDILEDIVLTLTLFEDREMIEERLKTYAHLFDDKVMKQLKRRRYTGWGRLSRKLINGIRDKQSGKTILDFLKSDGFANRNFMQLIHDDSLTFKEDIQKAQVSGQGDSLHEHIANLAGSPAIKKGILQTVKVVDELVKVMGRHKPENIVIEMARENQTTQKGQKNSRERMKRIEEGIKELGSQILKEHPVENTQLQNEKLYLYYLQNGRDMYVDQELDINRLSDYDVDHIVPQSFLKDDSIDNKVLTRSDKARGKSDNVPSEEVVKKMKNYWRQLLNAKLITQRKFDNLTKAERGGLSELDKAGFIKRQLVETRQITKHVAQILDSRMNTKYDENDKLIREVKVITLKSKLVSDFRKDFQFYKVREINNYHHAHDAYLNAVVGTALIKKYPKLESEFVYGDYKVYDVRKMIAKSEQEIGKATAKYFFYSNIMNFFKTEITLANGEIRKRPLIETNGETGEIVWDKGRDFATVRKVLSMPQVNIVKKTEVQTGGFSKESILPKRNSDKLIARKKDWDPKKYGGFDSPTVAYSVLVVAKVEKGKSKKLKSVKELLGITIMERSSFEKNPIDFLEAKGYKEVKKDLIIKLPKYSLFELENGRKRMLASAGELQKGNELALPSKYVNFLYLASHYEKLKGSPEDNEQKQLFVEQHKHYLDEIIEQISEFSKRVILADANLDKVLSAYNKHRDKPIREQAENIIHLFTLTNLGAPAAFKYFDTTIDRKRYTSTKEVLDATLIHQSITGLYETRIDLSQLGGDGGGGGGSGGGGSGGGGSGGGGSGGGGSGGGGSGGMDLLKPLTVERKGVKIKGYWNSQADITCVPKDLLQGEEPVRQQNVTTIHGTQEGDVYYVNLKIDGRRINTEVIGTTLDYAIITPGDVPWILKKPLELTIKLDLEEQQGTLLNNSILSKKGKEELKQLFEKYSALWQSWENQVGHRRIRPHKIATGTVKPTPQKQYHINPKAKPDIQIVINDLLKQGVLIQKESTMNTPVYPVPKPNGRWRMVLDYRAVNKVTPLIAVQNQHSYGILGSLFKGRYKTTIDLSNGFWAHPIVPEDYWITAFTWQGKQYCWTVLPQGFLNSPGLFTGDVVDLLQGIPNVEVYVDDVYISHDSEKEHLEYLDILFNRLKEAGYIISLKKSNIANSIVDFLGFQITNEGRGLTDTFKEKLENITAPTTLKQLQSILGLLNFARNFIPDFTELIAPLYALIPKSTKNYVPWQIEHSTTLETLITKLNGAEYLQGRKGDKTLIMKVNASYTTGYIRYYNEGEKKPISYVSIVFSKTELKFTELEKLLTTVHKGLLKALDLSMGQNIHVYSPIVSMQNIQKTPQTAKKALASRWLSWLSYLEDPRIRFFYDPQMPALKDLPAVDTGKDNKKHPSNFQHIFYTDGSAITSPTKEGHLNAGMGIVYFINKDGNLQKQQEWSISLGNHTAQFAEIAAFEFALKKCLPLGGNILVVTDSNYVAKAYNEELDVWASNGFVNNRKKPLKHISKWKSVADLKRLRPDVVVTHEPGHQKLDSSPHAYGNNLADQLATQASFKVHAGKRTADGSEFEKRTADGSEFESPKKKAKVE

SEQ ID NO: 717 - protein, 2171 aa, synthetic construct
MPAAKRVKLDGGDKKYSIGLDIGTNSVGWAVITDEYKVPSKKFKVLGNTDRHSIKKNLIGALLFDSGETAEATRLKRTARRRYTRRKNRICYLQEIFSNEMAKVDDSFFHRLEESFLVEEDKKHERHPIFGNIVDEVAYHEKYPTIYHLRKKLVDSTDKADLRLIYLALAHMIKFRGHFLIEGDLNPDNSDVDKLFIQLVQTYNQLFEENPINASGVDAKAILSARLSKSRRLENLIAQLPGEKKNGLFGNLIALSLGLTPNFKSNFDLAEDAKLQLSKDTYDDDLDNLLAQIGDQYADLFLAAKNLSDAILLSDILRVNTEITKAPLSASMIKRYDEHHQDLTLLKALVRQQLPEKYKEIFFDQSKNGYAGYIDGGASQEEFYKFIKPILEKMDGTEELLVKLNREDLLRKQRTFDNGSIPHQIHLGELHAILRRQEDFYPFLKDNREKIEKILTFRIPYYVGPLARGNSRFAWMTRKSEETITPWNFEEVVDKGASAQSFIERMTNFDKNLPNEKVLPKHSLLYEYFTVYNELTKVKYVTEGMRKPAFLSGEQKKAIVDLLFKTNRKVTVKQLKEDYFKKIECFDSVEISGVEDRFNASLGTYHDLLKIIKDKDFLDNEENEDILEDIVLTLTLFEDREMIEERLKTYAHLFDDKVMKQLKRRRYTGWGRLSRKLINGIRDKQSGKTILDFLKSDGFANRNFMQLIHDDSLTFKEDIQKAQVSGQGDSLHEHIANLAGSPAIKKGILQTVKVVDELVKVMGRHKPENIVIEMARENQTTQKGQKNSRERMKRIEEGIKELGSQILKEHPVENTQLQNEKLYLYYLQNGRDMYVDQELDINRLSDYDVDHIVPQSFLKDDSIDNKVLTRSDKARGKSDNVPSEEVVKKMKNYWRQLLNAKLITQRKFDNLTKAERGGLSELDKAGFIKRQLVETRQITKHVAQILDSRMNTKYDENDKLIREVKVITLKSKLVSDFRKDFQFYKVREINNYHHAHDAYLNAVVGTALIKKYPKLESEFVYGDYKVYDVRKMIAKSEQEIGKATAKYFFYSNIMNFFKTEITLANGEIRKRPLIETNGETGEIVWDKGRDFATVRKVLSMPQVNIVKKTEVQTGGFSKESILPKRNSDKLIARKKDWDPKKYGGFDSPTVAYSVLVVAKVEKGKSKKLKSVKELLGITIMERSSFEKNPIDFLEAKGYKEVKKDLIIKLPKYSLFELENGRKRMLASAGELQKGNELALPSKYVNFLYLASHYEKLKGSPEDNEQKQLFVEQHKHYLDEIIEQISEFSKRVILADANLDKVLSAYNKHRDKPIREQAENIIHLFTLTNLGAPAAFKYFDTTIDRKRYTSTKEVLDATLIHQSITGLYETRIDLSQLGGDGGGSSGGSPAPGGMDLLKPLTVERKGVKIKGYWNSQADITCVPKDLLQGEEPVRQQNVTTIHGTQEGDVYYVNLKIDGRRINTEVIGTTLDYAIITPGDVPWILKKPLELTIKLDLEEQQGTLLNNSILSKKGKEELKQLFEKYSALWQSWENQVGHRRIRPHKIATGTVKPTPQKQYHINPKAKPDIQIVINDLLKQGVLIQKESTMNTPVYPVPKPNGRWRMVLDYRAVNKVTPLIAVQNQHSYGILGSLFKGRYKTTIDLSNGFWAHPIVPEDYWITAFTWQGKQYCWTVLPQGFLNSPGLFTGDVVDLLQGIPNVEVYVDDVYISHDSEKEHLEYLDILFNRLKEAGYIISLKKSNIANSIVDFLGFQITNEGRGLTDTFKEKLENITAPTTLKQLQSILGLLNFARNFIPDFTELIAPLYALIPKSTKNYVPWQIEHSTTLETLITKLNGAEYLQGRKGDKTLIMKVNASYTTGYIRYYNEGEKKPISYVSIVFSKTELKFTELEKLLTTVHKGLLKALDLSMGQNIHVYSPIVSMQNIQKTPQTAKKALASRWLSWLSYLEDPRIRFFYDPQMPALKDLPAVDTGKDNKKHPSNFQHIFYTDGSAITSPTKEGHLNAGMGIVYFINKDGNLQKQQEWSISLGNHTAQFAEIAAFEFALKKCLPLGGNILVVTDSNYVAKAYNEELDVWASNGFVNNRKKPLKHISKWKSVADLKRLRPDVVVTHEPGHQKLDSSPHAYGNNLADQLATQASFKVHAGKRTADGSEFEKRTADGSEFESPKKKAKVE

SEQ ID NO: 718 - protein, 2177 aa, synthetic construct
MPAAKRVKLDGGDKKYSIGLDIGTNSVGWAVITDEYKVPSKKFKVLGNTDRHSIKKNLIGALLFDSGETAEATRLKRTARRRYTRRKNRICYLQEIFSNEMAKVDDSFFHRLEESFLVEEDKKHERHPIFGNIVDEVAYHEKYPTIYHLRKKLVDSTDKADLRLIYLALAHMIKFRGHFLIEGDLNPDNSDVDKLFIQLVQTYNQLFEENPINASGVDAKAILSARLSKSRRLENLIAQLPGEKKNGLFGNLIALSLGLTPNFKSNFDLAEDAKLQLSKDTYDDDLDNLLAQIGDQYADLFLAAKNLSDAILLSDILRVNTEITKAPLSASMIKRYDEHHQDLTLLKALVRQQLPEKYKEIFFDQSKNGYAGYIDGGASQEEFYKFIKPILEKMDGTEELLVKLNREDLLRKQRTFDNGSIPHQIHLGELHAILRRQEDFYPFLKDNREKIEKILTFRIPYYVGPLARGNSRFAWMTRKSEETITPWNFEEVVDKGASAQSFIERMTNFDKNLPNEKVLPKHSLLYEYFTVYNELTKVKYVTEGMRKPAFLSGEQKKAIVDLLFKTNRKVTVKQLKEDYFKKIECFDSVEISGVEDRFNASLGTYHDLLKIIKDKDFLDNEENEDILEDIVLTLTLFEDREMIEERLKTYAHLFDDKVMKQLKRRRYTGWGRLSRKLINGIRDKQSGKTILDFLKSDGFANRNFMQLIHDDSLTFKEDIQKAQVSGQGDSLHEHIANLAGSPAIKKGILQTVKVVDELVKVMGRHKPENIVIEMARENQTTQKGQKNSRERMKRIEEGIKELGSQILKEHPVENTQLQNEKLYLYYLQNGRDMYVDQELDINRLSDYDVDHIVPQSFLKDDSIDNKVLTRSDKARGKSDNVPSEEVVKKMKNYWRQLLNAKLITQRKFDNLTKAERGGLSELDKAGFIKRQLVETRQITKHVAQILDSRMNTKYDENDKLIREVKVITLKSKLVSDFRKDFQFYKVREINNYHHAHDAYLNAVVGTALIKKYPKLESEFVYGDYKVYDVRKMIAKSEQEIGKATAKYFFYSNIMNFFKTEITLANGEIRKRPLIETNGETGEIVWDKGRDFATVRKVLSMPQVNIVKKTEVQTGGFSKESILPKRNSDKLIARKKDWDPKKYGGFDSPTVAYSVLVVAKVEKGKSKKLKSVKELLGITIMERSSFEKNPIDFLEAKGYKEVKKDLIIKLPKYSLFELENGRKRMLASAGELQKGNELALPSKYVNFLYLASHYEKLKGSPEDNEQKQLFVEQHKHYLDEIIEQISEFSKRVILADANLDKVLSAYNKHRDKPIREQAENIIHLFTLTNLGAPAAFKYFDTTIDRKRYTSTKEVLDATLIHQSITGLYETRIDLSQLGGDGGEAAAKEAAAKEAAAKGGMDLLKPLTVERKGVKIKGYWNSQADITCVPKDLLQGEEPVRQQNVTTIHGTQEGDVYYVNLKIDGRRINTEVIGTTLDYAIITPGDVPWILKKPLELTIKLDLEEQQGTLLNNSILSKKGKEELKQLFEKYSALWQSWENQVGHRRIRPHKIATGTVKPTPQKQYHINPKAKPDIQIVINDLLKQGVLIQKESTMNTPVYPVPKPNGRWRMVLDYRAVNKVTPLIAVQNQHSYGILGSLFKGRYKTTIDLSNGFWAHPIVPEDYWITAFTWQGKQYCWTVLPQGFLNSPGLFTGDVVDLLQGIPNVEVYVDDVYISHDSEKEHLEYLDILFNRLKEAGYIISLKKSNIANSIVDFLGFQITNEGRGLTDTFKEKLENITAPTTLKQLQSILGLLNFARNFIPDFTELIAPLYALIPKSTKNYVPWQIEHSTTLETLITKLNGAEYLQGRKGDKTLIMKVNASYTTGYIRYYNEGEKKPISYVSIVFSKTELKFTELEKLLTTVHKGLLKALDLSMGQNIHVYSPIVSMQNIQKTPQTAKKALASRWLSWLSYLEDPRIRFFYDPQMPALKDLPAVDTGKDNKKHPSNFQHIFYTDGSAITSPTKEGHLNAGMGIVYFINKDGNLQKQQEWSISLGNHTAQFAEIAAFEFALKKCLPLGGNILVVTDSNYVAKAYNEELDVWASNGFVNNRKKPLKHISKWKSVADLKRLRPDVVVTHEPGHQKLDSSPHAYGNNLADQLATQASFKVHAGKRTADGSEFEKRTADGSEFESPKKKAKVE

SEQ ID NO: 719 - protein, 2177 aa, synthetic construct
MPAAKRVKLDGGDKKYSIGLDIGTNSVGWAVITDEYKVPSKKFKVLGNTDRHSIKKNLIGALLFDSGETAEATRLKRTARRRYTRRKNRICYLQEIFSNEMAKVDDSFFHRLEESFLVEEDKKHERHPIFGNIVDEVAYHEKYPTIYHLRKKLVDSTDKADLRLIYLALAHMIKFRGHFLIEGDLNPDNSDVDKLFIQLVQTYNQLFEENPINASGVDAKAILSARLSKSRRLENLIAQLPGEKKNGLFGNLIALSLGLTPNFKSNFDLAEDAKLQLSKDTYDDDLDNLLAQIGDQYADLFLAAKNLSDAILLSDILRVNTEITKAPLSASMIKRYDEHHQDLTLLKALVRQQLPEKYKEIFFDQSKNGYAGYIDGGASQEEFYKFIKPILEKMDGTEELLVKLNREDLLRKQRTFDNGSIPHQIHLGELHAILRRQEDFYPFLKDNREKIEKILTFRIPYYVGPLARGNSRFAWMTRKSEETITPWNFEEVVDKGASAQSFIERMTNFDKNLPNEKVLPKHSLLYEYFTVYNELTKVKYVTEGMRKPAFLSGEQKKAIVDLLFKTNRKVTVKQLKEDYFKKIECFDSVEISGVEDRFNASLGTYHDLLKIIKDKDFLDNEENEDILEDIVLTLTLFEDREMIEERLKTYAHLFDDKVMKQLKRRRYTGWGRLSRKLINGIRDKQSGKTILDFLKSDGFANRNFMQLIHDDSLTFKEDIQKAQVSGQGDSLHEHIANLAGSPAIKKGILQTVKVVDELVKVMGRHKPENIVIEMARENQTTQKGQKNSRERMKRIEEGIKELGSQILKEHPVENTQLQNEKLYLYYLQNGRDMYVDQELDINRLSDYDVDHIVPQSFLKDDSIDNKVLTRSDKARGKSDNVPSEEVVKKMKNYWRQLLNAKLITQRKFDNLTKAERGGLSELDKAGFIKRQLVETRQITKHVAQILDSRMNTKYDENDKLIREVKVITLKSKLVSDFRKDFQFYKVREINNYHHAHDAYLNAVVGTALIKKYPKLESEFVYGDYKVYDVRKMIAKSEQEIGKATAKYFFYSNIMNFFKTEITLANGEIRKRPLIETNGETGEIVWDKGRDFATVRKVLSMPQVNIVKKTEVQTGGFSKESILPKRNSDKLIARKKDWDPKKYGGFDSPTVAYSVLVVAKVEKGKSKKLKSVKELLGITIMERSSFEKNPIDFLEAKGYKEVKKDLIIKLPKYSLFELENGRKRMLASAGELQKGNELALPSKYVNFLYLASHYEKLKGSPEDNEQKQLFVEQHKHYLDEIIEQISEFSKRVILADANLDKVLSAYNKHRDKPIREQAENIIHLFTLTNLGAPAAFKYFDTTIDRKRYTSTKEVLDATLIHQSITGLYETRIDLSQLGGDGGGSSGSSGSSGSSGSSGGMDLLKPLTVERKGVKIKGYWNSQADITCVPKDLLQGEEPVRQQNVTTIHGTQEGDVYYVNLKIDGRRINTEVIGTTLDYAIITPGDVPWILKKPLELTIKLDLEEQQGTLLNNSILSKKGKEELKQLFEKYSALWQSWENQVGHRRIRPHKIATGTVKPTPQKQYHINPKAKPDIQIVINDLLKQGVLIQKESTMNTPVYPVPKPNGRWRMVLDYRAVNKVTPLIAVQNQHSYGILGSLFKGRYKTTIDLSNGFWAHPIVPEDYWITAFTWQGKQYCWTVLPQGFLNSPGLFTGDVVDLLQGIPNVEVYVDDVYISHDSEKEHLEYLDILFNRLKEAGYIISLKKSNIANSIVDFLGFQITNEGRGLTDTFKEKLENITAPTTLKQLQSILGLLNFARNFIPDFTELIAPLYALIPKSTKNYVPWQIEHSTTLETLITKLNGAEYLQGRKGDKTLIMKVNASYTTGYIRYYNEGEKKPISYVSIVFSKTELKFTELEKLLTTVHKGLLKALDLSMGQNIHVYSPIVSMQNIQKTPQTAKKALASRWLSWLSYLEDPRIRFFYDPQMPALKDLPAVDTGKDNKKHPSNFQHIFYTDGSAITSPTKEGHLNAGMGIVYFINKDGNLQKQQEWSISLGNHTAQFAEIAAFEFALKKCLPLGGNILVVTDSNYVAKAYNEELDVWASNGFVNNRKKPLKHISKWKSVADLKRLRPDVVVTHEPGHQKLDSSPHAYGNNLADQLATQASFKVHAGKRTADGSEFEKRTADGSEFESPKKKAKVE

SEQ ID NO: 720 - protein, 2171 aa, synthetic construct
MPAAKRVKLDGGDKKYSIGLDIGTNSVGWAVITDEYKVPSKKFKVLGNTDRHSIKKNLIGALLFDSGETAEATRLKRTARRRYTRRKNRICYLQEIFSNEMAKVDDSFFHRLEESFLVEEDKKHERHPIFGNIVDEVAYHEKYPTIYHLRKKLVDSTDKADLRLIYLALAHMIKFRGHFLIEGDLNPDNSDVDKLFIQLVQTYNQLFEENPINASGVDAKAILSARLSKSRRLENLIAQLPGEKKNGLFGNLIALSLGLTPNFKSNFDLAEDAKLQLSKDTYDDDLDNLLAQIGDQYADLFLAAKNLSDAILLSDILRVNTEITKAPLSASMIKRYDEHHQDLTLLKALVRQQLPEKYKEIFFDQSKNGYAGYIDGGASQEEFYKFIKPILEKMDGTEELLVKLNREDLLRKQRTFDNGSIPHQIHLGELHAILRRQEDFYPFLKDNREKIEKILTFRIPYYVGPLARGNSRFAWMTRKSEETITPWNFEEVVDKGASAQSFIERMTNFDKNLPNEKVLPKHSLLYEYFTVYNELTKVKYVTEGMRKPAFLSGEQKKAIVDLLFKTNRKVTVKQLKEDYFKKIECFDSVEISGVEDRFNASLGTYHDLLKIIKDKDFLDNEENEDILEDIVLTLTLFEDREMIEERLKTYAHLFDDKVMKQLKRRRYTGWGRLSRKLINGIRDKQSGKTILDFLKSDGFANRNFMQLIHDDSLTFKEDIQKAQVSGQGDSLHEHIANLAGSPAIKKGILQTVKVVDELVKVMGRHKPENIVIEMARENQTTQKGQKNSRERMKRIEEGIKELGSQILKEHPVENTQLQNEKLYLYYLQNGRDMYVDQELDINRLSDYDVDHIVPQSFLKDDSIDNKVLTRSDKARGKSDNVPSEEVVKKMKNYWRQLLNAKLITQRKFDNLTKAERGGLSELDKAGFIKRQLVETRQITKHVAQILDSRMNTKYDENDKLIREVKVITLKSKLVSDFRKDFQFYKVREINNYHHAHDAYLNAVVGTALIKKYPKLESEFVYGDYKVYDVRKMIAKSEQEIGKATAKYFFYSNIMNFFKTEITLANGEIRKRPLIETNGETGEIVWDKGRDFATVRKVLSMPQVNIVKKTEVQTGGFSKESILPKRNSDKLIARKKDWDPKKYGGFDSPTVAYSVLVVAKVEKGKSKKLKSVKELLGITIMERSSFEKNPIDFLEAKGYKEVKKDLIIKLPKYSLFELENGRKRMLASAGELQKGNELALPSKYVNFLYLASHYEKLKGSPEDNEQKQLFVEQHKHYLDEIIEQISEFSKRVILADANLDKVLSAYNKHRDKPIREQAENIIHLFTLTNLGAPAAFKYFDTTIDRKRYTSTKEVLDATLIHQSITGLYETRIDLSQLGGDGGGGGGSSPAPGGMDLLKPLTVERKGVKIKGYWNSQADITCVPKDLLQGEEPVRQQNVTTIHGTQEGDVYYVNLKIDGRRINTEVIGTTLDYAIITPGDVPWILKKPLELTIKLDLEEQQGTLLNNSILSKKGKEELKQLFEKYSALWQSWENQVGHRRIRPHKIATGTVKPTPQKQYHINPKAKPDIQIVINDLLKQGVLIQKESTMNTPVYPVPKPNGRWRMVLDYRAVNKVTPLIAVQNQHSYGILGSLFKGRYKTTIDLSNGFWAHPIVPEDYWITAFTWQGKQYCWTVLPQGFLNSPGLFTGDVVDLLQGIPNVEVYVDDVYISHDSEKEHLEYLDILFNRLKEAGYIISLKKSNIANSIVDFLGFQITNEGRGLTDTFKEKLENITAPTTLKQLQSILGLLNFARNFIPDFTELIAPLYALIPKSTKNYVPWQIEHSTTLETLITKLNGAEYLQGRKGDKTLIMKVNASYTTGYIRYYNEGEKKPISYVSIVFSKTELKFTELEKLLTTVHKGLLKALDLSMGQNIHVYSPIVSMQNIQKTPQTAKKALASRWLSWLSYLEDPRIRFFYDPQMPALKDLPAVDTGKDNKKHPSNFQHIFYTDGSAITSPTKEGHLNAGMGIVYFINKDGNLQKQQEWSISLGNHTAQFAEIAAFEFALKKCLPLGGNILVVTDSNYVAKAYNEELDVWASNGFVNNRKKPLKHISKWKSVADLKRLRPDVVVTHEPGHQKLDSSPHAYGNNLADQLATQASFKVHAGKRTADGSEFEKRTADGSEFESPKKKAKVE

SEQ ID NO: 721 - protein, 2173 aa, synthetic construct
MPAAKRVKLDGGDKKYSIGLDIGTNSVGWAVITDEYKVPSKKFKVLGNTDRHSIKKNLIGALLFDSGETAEATRLKRTARRRYTRRKNRICYLQEIFSNEMAKVDDSFFHRLEESFLVEEDKKHERHPIFGNIVDEVAYHEKYPTIYHLRKKLVDSTDKADLRLIYLALAHMIKFRGHFLIEGDLNPDNSDVDKLFIQLVQTYNQLFEENPINASGVDAKAILSARLSKSRRLENLIAQLPGEKKNGLFGNLIALSLGLTPNFKSNFDLAEDAKLQLSKDTYDDDLDNLLAQIGDQYADLFLAAKNLSDAILLSDILRVNTEITKAPLSASMIKRYDEHHQDLTLLKALVRQQLPEKYKEIFFDQSKNGYAGYIDGGASQEEFYKFIKPILEKMDGTEELLVKLNREDLLRKQRTFDNGSIPHQIHLGELHAILRRQEDFYPFLKDNREKIEKILTFRIPYYVGPLARGNSRFAWMTRKSEETITPWNFEEVVDKGASAQSFIERMTNFDKNLPNEKVLPKHSLLYEYFTVYNELTKVKYVTEGMRKPAFLSGEQKKAIVDLLFKTNRKVTVKQLKEDYFKKIECFDSVEISGVEDRFNASLGTYHDLLKIIKDKDFLDNEENEDILEDIVLTLTLFEDREMIEERLKTYAHLFDDKVMKQLKRRRYTGWGRLSRKLINGIRDKQSGKTILDFLKSDGFANRNFMQLIHDDSLTFKEDIQKAQVSGQGDSLHEHIANLAGSPAIKKGILQTVKVVDELVKVMGRHKPENIVIEMARENQTTQKGQKNSRERMKRIEEGIKELGSQILKEHPVENTQLQNEKLYLYYLQNGRDMYVDQELDINRLSDYDVDHIVPQSFLKDDSIDNKVLTRSDKARGKSDNVPSEEVVKKMKNYWRQLLNAKLITQRKFDNLTKAERGGLSELDKAGFIKRQLVETRQITKHVAQILDSRMNTKYDENDKLIREVKVITLKSKLVSDFRKDFQFYKVREINNYHHAHDAYLNAVVGTALIKKYPKLESEFVYGDYKVYDVRKMIAKSEQEIGKATAKYFFYSNIMNFFKTEITLANGEIRKRPLIETNGETGEIVWDKGRDFATVRKVLSMPQVNIVKKTEVQTGGFSKESILPKRNSDKLIARKKDWDPKKYGGFDSPTVAYSVLVVAKVEKGKSKKLKSVKELLGITIMERSSFEKNPIDFLEAKGYKEVKKDLIIKLPKYSLFELENGRKRMLASAGELQKGNELALPSKYVNFLYLASHYEKLKGSPEDNEQKQLFVEQHKHYLDEIIEQISEFSKRVILADANLDKVLSAYNKHRDKPIREQAENIIHLFTLTNLGAPAAFKYFDTTIDRKRYTSTKEVLDATLIHQSITGLYETRIDLSQLGGDGGEAAAKGSSPAPGGMDLLKPLTVERKGVKIKGYWNSQADITCVPKDLLQGEEPVRQQNVTTIHGTQEGDVYYVNLKIDGRRINTEVIGTTLDYAIITPGDVPWILKKPLELTIKLDLEEQQGTLLNNSILSKKGKEELKQLFEKYSALWQSWENQVGHRRIRPHKIATGTVKPTPQKQYHINPKAKPDIQIVINDLLKQGVLIQKESTMNTPVYPVPKPNGRWRMVLDYRAVNKVTPLIAVQNQHSYGILGSLFKGRYKTTIDLSNGFWAHPIVPEDYWITAFTWQGKQYCWTVLPQGFLNSPGLFTGDVVDLLQGIPNVEVYVDDVYISHDSEKEHLEYLDILFNRLKEAGYIISLKKSNIANSIVDFLGFQITNEGRGLTDTFKEKLENITAPTTLKQLQSILGLLNFARNFIPDFTELIAPLYALIPKSTKNYVPWQIEHSTTLETLITKLNGAEYLQGRKGDKTLIMKVNASYTTGYIRYYNEGEKKPISYVSIVFSKTELKFTELEKLLTTVHKGLLKALDLSMGQNIHVYSPIVSMQNIQKTPQTAKKALASRWLSWLSYLEDPRIRFFYDPQMPALKDLPAVDTGKDNKKHPSNFQHIFYTDGSAITSPTKEGHLNAGMGIVYFINKDGNLQKQQEWSISLGNHTAQFAEIAAFEFALKKCLPLGGNILVVTDSNYVAKAYNEELDVWASNGFVNNRKKPLKHISKWKSVADLKRLRPDVVVTHEPGHQKLDSSPHAYGNNLADQLATQASFKVHAGKRTADGSEFEKRTADGSEFESPKKKAKVE

SEQ ID NO: 722 - protein, 2180 aa, synthetic construct
MPAAKRVKLDGGDKKYSIGLDIGTNSVGWAVITDEYKVPSKKFKVLGNTDRHSIKKNLIGALLFDSGETAEATRLKRTARRRYTRRKNRICYLQEIFSNEMAKVDDSFFHRLEESFLVEEDKKHERHPIFGNIVDEVAYHEKYPTIYHLRKKLVDSTDKADLRLIYLALAHMIKFRGHFLIEGDLNPDNSDVDKLFIQLVQTYNQLFEENPINASGVDAKAILSARLSKSRRLENLIAQLPGEKKNGLFGNLIALSLGLTPNFKSNFDLAEDAKLQLSKDTYDDDLDNLLAQIGDQYADLFLAAKNLSDAILLSDILRVNTEITKAPLSASMIKRYDEHHQDLTLLKALVRQQLPEKYKEIFFDQSKNGYAGYIDGGASQEEFYKFIKPILEKMDGTEELLVKLNREDLLRKQRTFDNGSIPHQIHLGELHAILRRQEDFYPFLKDNREKIEKILTFRIPYYVGPLARGNSRFAWMTRKSEETITPWNFEEVVDKGASAQSFIERMTNFDKNLPNEKVLPKHSLLYEYFTVYNELTKVKYVTEGMRKPAFLSGEQKKAIVDLLFKTNRKVTVKQLKEDYFKKIECFDSVEISGVEDRFNASLGTYHDLLKIIKDKDFLDNEENEDILEDIVLTLTLFEDREMIEERLKTYAHLFDDKVMKQLKRRRYTGWGRLSRKLINGIRDKQSGKTILDFLKSDGFANRNFMQLIHDDSLTFKEDIQKAQVSGQGDSLHEHIANLAGSPAIKKGILQTVKVVDELVKVMGRHKPENIVIEMARENQTTQKGQKNSRERMKRIEEGIKELGSQILKEHPVENTQLQNEKLYLYYLQNGRDMYVDQELDINRLSDYDVDHIVPQSFLKDDSIDNKVLTRSDKARGKSDNVPSEEVVKKMKNYWRQLLNAKLITQRKFDNLTKAERGGLSELDKAGFIKRQLVETRQITKHVAQILDSRMNTKYDENDKLIREVKVITLKSKLVSDFRKDFQFYKVREINNYHHAHDAYLNAVVGTALIKKYPKLESEFVYGDYKVYDVRKMIAKSEQEIGKATAKYFFYSNIMNFFKTEITLANGEIRKRPLIETNGETGEIVWDKGRDFATVRKVLSMPQVNIVKKTEVQTGGFSKESILPKRNSDKLIARKKDWDPKKYGGFDSPTVAYSVLVVAKVEKGKSKKLKSVKELLGITIMERSSFEKNPIDFLEAKGYKEVKKDLIIKLPKYSLFELENGRKRMLASAGELQKGNELALPSKYVNFLYLASHYEKLKGSPEDNEQKQLFVEQHKHYLDEIIEQISEFSKRVILADANLDKVLSAYNKHRDKPIREQAENIIHLFTLTNLGAPAAFKYFDTTIDRKRYTSTKEVLDATLIHQSITGLYETRIDLSQLGGDGGGSSGSSGSSGSSGSSGSSGGMDLLKPLTVERKGVKIKGYWNSQADITCVPKDLLQGEEPVRQQNVTTIHGTQEGDVYYVNLKIDGRRINTEVIGTTLDYAIITPGDVPWILKKPLELTIKLDLEEQQGTLLNNSILSKKGKEELKQLFEKYSALWQSWENQVGHRRIRPHKIATGTVKPTPQKQYHINPKAKPDIQIVINDLLKQGVLIQKESTMNTPVYPVPKPNGRWRMVLDYRAVNKVTPLIAVQNQHSYGILGSLFKGRYKTTIDLSNGFWAHPIVPEDYWITAFTWQGKQYCWTVLPQGFLNSPGLFTGDVVDLLQGIPNVEVYVDDVYISHDSEKEHLEYLDILFNRLKEAGYIISLKKSNIANSIVDFLGFQITNEGRGLTDTFKEKLENITAPTTLKQLQSILGLLNFARNFIPDFTELIAPLYALIPKSTKNYVPWQIEHSTTLETLITKLNGAEYLQGRKGDKTLIMKVNASYTTGYIRYYNEGEKKPISYVSIVFSKTELKFTELEKLLTTVHKGLLKALDLSMGQNIHVYSPIVSMQNIQKTPQTAKKALASRWLSWLSYLEDPRIRFFYDPQMPALKDLPAVDTGKDNKKHPSNFQHIFYTDGSAITSPTKEGHLNAGMGIVYFINKDGNLQKQQEWSISLGNHTAQFAEIAAFEFALKKCLPLGGNILVVTDSNYVAKAYNEELDVWASNGFVNNRKKPLKHISKWKSVADLKRLRPDVVVTHEPGHQKLDSSPHAYGNNLADQLATQASFKVHAGKRTADGSEFEKRTADGSEFESPKKKAKVE

SEQ ID NO: 723 - protein, 2171 aa, synthetic construct
MPAAKRVKLDGGDKKYSIGLDIGTNSVGWAVITDEYKVPSKKFKVLGNTDRHSIKKNLIGALLFDSGETAEATRLKRTARRRYTRRKNRICYLQEIFSNEMAKVDDSFFHRLEESFLVEEDKKHERHPIFGNIVDEVAYHEKYPTIYHLRKKLVDSTDKADLRLIYLALAHMIKFRGHFLIEGDLNPDNSDVDKLFIQLVQTYNQLFEENPINASGVDAKAILSARLSKSRRLENLIAQLPGEKKNGLFGNLIALSLGLTPNFKSNFDLAEDAKLQLSKDTYDDDLDNLLAQIGDQYADLFLAAKNLSDAILLSDILRVNTEITKAPLSASMIKRYDEHHQDLTLLKALVRQQLPEKYKEIFFDQSKNGYAGYIDGGASQEEFYKFIKPILEKMDGTEELLVKLNREDLLRKQRTFDNGSIPHQIHLGELHAILRRQEDFYPFLKDNREKIEKILTFRIPYYVGPLARGNSRFAWMTRKSEETITPWNFEEVVDKGASAQSFIERMTNFDKNLPNEKVLPKHSLLYEYFTVYNELTKVKYVTEGMRKPAFLSGEQKKAIVDLLFKTNRKVTVKQLKEDYFKKIECFDSVEISGVEDRFNASLGTYHDLLKIIKDKDFLDNEENEDILEDIVLTLTLFEDREMIEERLKTYAHLFDDKVMKQLKRRRYTGWGRLSRKLINGIRDKQSGKTILDFLKSDGFANRNFMQLIHDDSLTFKEDIQKAQVSGQGDSLHEHIANLAGSPAIKKGILQTVKVVDELVKVMGRHKPENIVIEMARENQTTQKGQKNSRERMKRIEEGIKELGSQILKEHPVENTQLQNEKLYLYYLQNGRDMYVDQELDINRLSDYDVDHIVPQSFLKDDSIDNKVLTRSDKARGKSDNVPSEEVVKKMKNYWRQLLNAKLITQRKFDNLTKAERGGLSELDKAGFIKRQLVETRQITKHVAQILDSRMNTKYDENDKLIREVKVITLKSKLVSDFRKDFQFYKVREINNYHHAHDAYLNAVVGTALIKKYPKLESEFVYGDYKVYDVRKMIAKSEQEIGKATAKYFFYSNIMNFFKTEITLANGEIRKRPLIETNGETGEIVWDKGRDFATVRKVLSMPQVNIVKKTEVQTGGFSKESILPKRNSDKLIARKKDWDPKKYGGFDSPTVAYSVLVVAKVEKGKSKKLKSVKELLGITIMERSSFEKNPIDFLEAKGYKEVKKDLIIKLPKYSLFELENGRKRMLASAGELQKGNELALPSKYVNFLYLASHYEKLKGSPEDNEQKQLFVEQHKHYLDEIIEQISEFSKRVILADANLDKVLSAYNKHRDKPIREQAENIIHLFTLTNLGAPAAFKYFDTTIDRKRYTSTKEVLDATLIHQSITGLYETRIDLSQLGGDGGPAPAPAPAPGGMDLLKPLTVERKGVKIKGYWNSQADITCVPKDLLQGEEPVRQQNVTTIHGTQEGDVYYVNLKIDGRRINTEVIGTTLDYAIITPGDVPWILKKPLELTIKLDLEEQQGTLLNNSILSKKGKEELKQLFEKYSALWQSWENQVGHRRIRPHKIATGTVKPTPQKQYHINPKAKPDIQIVINDLLKQGVLIQKESTMNTPVYPVPKPNGRWRMVLDYRAVNKVTPLIAVQNQHSYGILGSLFKGRYKTTIDLSNGFWAHPIVPEDYWITAFTWQGKQYCWTVLPQGFLNSPGLFTGDVVDLLQGIPNVEVYVDDVYISHDSEKEHLEYLDILFNRLKEAGYIISLKKSNIANSIVDFLGFQITNEGRGLTDTFKEKLENITAPTTLKQLQSILGLLNFARNFIPDFTELIAPLYALIPKSTKNYVPWQIEHSTTLETLITKLNGAEYLQGRKGDKTLIMKVNASYTTGYIRYYNEGEKKPISYVSIVFSKTELKFTELEKLLTTVHKGLLKALDLSMGQNIHVYSPIVSMQNIQKTPQTAKKALASRWLSWLSYLEDPRIRFFYDPQMPALKDLPAVDTGKDNKKHPSNFQHIFYTDGSAITSPTKEGHLNAGMGIVYFINKDGNLQKQQEWSISLGNHTAQFAEIAAFEFALKKCLPLGGNILVVTDSNYVAKAYNEELDVWASNGFVNNRKKPLKHISKWKSVADLKRLRPDVVVTHEPGHQKLDSSPHAYGNNLADQLATQASFKVHAGKRTADGSEFEKRTADGSEFESPKKKAKVE

SEQ ID NO: 724 - protein, 2170 aa, synthetic construct
MPAAKRVKLDGGDKKYSIGLDIGTNSVGWAVITDEYKVPSKKFKVLGNTDRHSIKKNLIGALLFDSGETAEATRLKRTARRRYTRRKNRICYLQEIFSNEMAKVDDSFFHRLEESFLVEEDKKHERHPIFGNIVDEVAYHEKYPTIYHLRKKLVDSTDKADLRLIYLALAHMIKFRGHFLIEGDLNPDNSDVDKLFIQLVQTYNQLFEENPINASGVDAKAILSARLSKSRRLENLIAQLPGEKKNGLFGNLIALSLGLTPNFKSNFDLAEDAKLQLSKDTYDDDLDNLLAQIGDQYADLFLAAKNLSDAILLSDILRVNTEITKAPLSASMIKRYDEHHQDLTLLKALVRQQLPEKYKEIFFDQSKNGYAGYIDGGASQEEFYKFIKPILEKMDGTEELLVKLNREDLLRKQRTFDNGSIPHQIHLGELHAILRRQEDFYPFLKDNREKIEKILTFRIPYYVGPLARGNSRFAWMTRKSEETITPWNFEEVVDKGASAQSFIERMTNFDKNLPNEKVLPKHSLLYEYFTVYNELTKVKYVTEGMRKPAFLSGEQKKAIVDLLFKTNRKVTVKQLKEDYFKKIECFDSVEISGVEDRFNASLGTYHDLLKIIKDKDFLDNEENEDILEDIVLTLTLFEDREMIEERLKTYAHLFDDKVMKQLKRRRYTGWGRLSRKLINGIRDKQSGKTILDFLKSDGFANRNFMQLIHDDSLTFKEDIQKAQVSGQGDSLHEHIANLAGSPAIKKGILQTVKVVDELVKVMGRHKPENIVIEMARENQTTQKGQKNSRERMKRIEEGIKELGSQILKEHPVENTQLQNEKLYLYYLQNGRDMYVDQELDINRLSDYDVDHIVPQSFLKDDSIDNKVLTRSDKARGKSDNVPSEEVVKKMKNYWRQLLNAKLITQRKFDNLTKAERGGLSELDKAGFIKRQLVETRQITKHVAQILDSRMNTKYDENDKLIREVKVITLKSKLVSDFRKDFQFYKVREINNYHHAHDAYLNAVVGTALIKKYPKLESEFVYGDYKVYDVRKMIAKSEQEIGKATAKYFFYSNIMNFFKTEITLANGEIRKRPLIETNGETGEIVWDKGRDFATVRKVLSMPQVNIVKKTEVQTGGFSKESILPKRNSDKLIARKKDWDPKKYGGFDSPTVAYSVLVVAKVEKGKSKKLKSVKELLGITIMERSSFEKNPIDFLEAKGYKEVKKDLIIKLPKYSLFELENGRKRMLASAGELQKGNELALPSKYVNFLYLASHYEKLKGSPEDNEQKQLFVEQHKHYLDEIIEQISEFSKRVILADANLDKVLSAYNKHRDKPIREQAENIIHLFTLTNLGAPAAFKYFDTTIDRKRYTSTKEVLDATLIHQSITGLYETRIDLSQLGGDGGGSSEAAAKGGMDLLKPLTVERKGVKIKGYWNSQADITCVPKDLLQGEEPVRQQNVTTIHGTQEGDVYYVNLKIDGRRINTEVIGTTLDYAIITPGDVPWILKKPLELTIKLDLEEQQGTLLNNSILSKKGKEELKQLFEKYSALWQSWENQVGHRRIRPHKIATGTVKPTPQKQYHINPKAKPDIQIVINDLLKQGVLIQKESTMNTPVYPVPKPNGRWRMVLDYRAVNKVTPLIAVQNQHSYGILGSLFKGRYKTTIDLSNGFWAHPIVPEDYWITAFTWQGKQYCWTVLPQGFLNSPGLFTGDVVDLLQGIPNVEVYVDDVYISHDSEKEHLEYLDILFNRLKEAGYIISLKKSNIANSIVDFLGFQITNEGRGLTDTFKEKLENITAPTTLKQLQSILGLLNFARNFIPDFTELIAPLYALIPKSTKNYVPWQIEHSTTLETLITKLNGAEYLQGRKGDKTLIMKVNASYTTGYIRYYNEGEKKPISYVSIVFSKTELKFTELEKLLTTVHKGLLKALDLSMGQNIHVYSPIVSMQNIQKTPQTAKKALASRWLSWLSYLEDPRIRFFYDPQMPALKDLPAVDTGKDNKKHPSNFQHIFYTDGSAITSPTKEGHLNAGMGIVYFINKDGNLQKQQEWSISLGNHTAQFAEIAAFEFALKKCLPLGGNILVVTDSNYVAKAYNEELDVWASNGFVNNRKKPLKHISKWKSVADLKRLRPDVVVTHEPGHQKLDSSPHAYGNNLADQLATQASFKVHAGKRTADGSEFEKRTADGSEFESPKKKAKVE

SEQ ID NO: 725 - protein, 2165 aa, synthetic construct
MPAAKRVKLDGGDKKYSIGLDIGTNSVGWAVITDEYKVPSKKFKVLGNTDRHSIKKNLIGALLFDSGETAEATRLKRTARRRYTRRKNRICYLQEIFSNEMAKVDDSFFHRLEESFLVEEDKKHERHPIFGNIVDEVAYHEKYPTIYHLRKKLVDSTDKADLRLIYLALAHMIKFRGHFLIEGDLNPDNSDVDKLFIQLVQTYNQLFEENPINASGVDAKAILSARLSKSRRLENLIAQLPGEKKNGLFGNLIALSLGLTPNFKSNFDLAEDAKLQLSKDTYDDDLDNLLAQIGDQYADLFLAAKNLSDAILLSDILRVNTEITKAPLSASMIKRYDEHHQDLTLLKALVRQQLPEKYKEIFFDQSKNGYAGYIDGGASQEEFYKFIKPILEKMDGTEELLVKLNREDLLRKQRTFDNGSIPHQIHLGELHAILRRQEDFYPFLKDNREKIEKILTFRIPYYVGPLARGNSRFAWMTRKSEETITPWNFEEVVDKGASAQSFIERMTNFDKNLPNEKVLPKHSLLYEYFTVYNELTKVKYVTEGMRKPAFLSGEQKKAIVDLLFKTNRKVTVKQLKEDYFKKIECFDSVEISGVEDRFNASLGTYHDLLKIIKDKDFLDNEENEDILEDIVLTLTLFEDREMIEERLKTYAHLFDDKVMKQLKRRRYTGWGRLSRKLINGIRDKQSGKTILDFLKSDGFANRNFMQLIHDDSLTFKEDIQKAQVSGQGDSLHEHIANLAGSPAIKKGILQTVKVVDELVKVMGRHKPENIVIEMARENQTTQKGQKNSRERMKRIEEGIKELGSQILKEHPVENTQLQNEKLYLYYLQNGRDMYVDQELDINRLSDYDVDHIVPQSFLKDDSIDNKVLTRSDKARGKSDNVPSEEVVKKMKNYWRQLLNAKLITQRKFDNLTKAERGGLSELDKAGFIKRQLVETRQITKHVAQILDSRMNTKYDENDKLIREVKVITLKSKLVSDFRKDFQFYKVREINNYHHAHDAYLNAVVGTALIKKYPKLESEFVYGDYKVYDVRKMIAKSEQEIGKATAKYFFYSNIMNFFKTEITLANGEIRKRPLIETNGETGEIVWDKGRDFATVRKVLSMPQVNIVKKTEVQTGGFSKESILPKRNSDKLIARKKDWDPKKYGGFDSPTVAYSVLVVAKVEKGKSKKLKSVKELLGITIMERSSFEKNPIDFLEAKGYKEVKKDLIIKLPKYSLFELENGRKRMLASAGELQKGNELALPSKYVNFLYLASHYEKLKGSPEDNEQKQLFVEQHKHYLDEIIEQISEFSKRVILADANLDKVLSAYNKHRDKPIREQAENIIHLFTLTNLGAPAAFKYFDTTIDRKRYTSTKEVLDATLIHQSITGLYETRIDLSQLGGDGGGSSGGMDLLKPLTVERKGVKIKGYWNSQADITCVPKDLLQGEEPVRQQNVTTIHGTQEGDVYYVNLKIDGRRINTEVIGTTLDYAIITPGDVPWILKKPLELTIKLDLEEQQGTLLNNSILSKKGKEELKQLFEKYSALWQSWENQVGHRRIRPHKIATGTVKPTPQKQYHINPKAKPDIQIVINDLLKQGVLIQKESTMNTPVYPVPKPNGRWRMVLDYRAVNKVTPLIAVQNQHSYGILGSLFKGRYKTTIDLSNGFWAHPIVPEDYWITAFTWQGKQYCWTVLPQGFLNSPGLFTGDVVDLLQGIPNVEVYVDDVYISHDSEKEHLEYLDILFNRLKEAGYIISLKKSNIANSIVDFLGFQITNEGRGLTDTFKEKLENITAPTTLKQLQSILGLLNFARNFIPDFTELIAPLYALIPKSTKNYVPWQIEHSTTLETLITKLNGAEYLQGRKGDKTLIMKVNASYTTGYIRYYNEGEKKPISYVSIVFSKTELKFTELEKLLTTVHKGLLKALDLSMGQNIHVYSPIVSMQNIQKTPQTAKKALASRWLSWLSYLEDPRIRFFYDPQMPALKDLPAVDTGKDNKKHPSNFQHIFYTDGSAITSPTKEGHLNAGMGIVYFINKDGNLQKQQEWSISLGNHTAQFAEIAAFEFALKKCLPLGGNILVVTDSNYVAKAYNEELDVWASNGFVNNRKKPLKHISKWKSVADLKRLRPDVVVTHEPGHQKLDSSPHAYGNNLADQLATQASFKVHAGKRTADGSEFEKRTADGSEFESPKKKAKVE

SEQ ID NO: 726 - protein, 2173 aa, synthetic construct
MPAAKRVKLDGGDKKYSIGLDIGTNSVGWAVITDEYKVPSKKFKVLGNTDRHSIKKNLIGALLFDSGETAEATRLKRTARRRYTRRKNRICYLQEIFSNEMAKVDDSFFHRLEESFLVEEDKKHERHPIFGNIVDEVAYHEKYPTIYHLRKKLVDSTDKADLRLIYLALAHMIKFRGHFLIEGDLNPDNSDVDKLFIQLVQTYNQLFEENPINASGVDAKAILSARLSKSRRLENLIAQLPGEKKNGLFGNLIALSLGLTPNFKSNFDLAEDAKLQLSKDTYDDDLDNLLAQIGDQYADLFLAAKNLSDAILLSDILRVNTEITKAPLSASMIKRYDEHHQDLTLLKALVRQQLPEKYKEIFFDQSKNGYAGYIDGGASQEEFYKFIKPILEKMDGTEELLVKLNREDLLRKQRTFDNGSIPHQIHLGELHAILRRQEDFYPFLKDNREKIEKILTFRIPYYVGPLARGNSRFAWMTRKSEETITPWNFEEVVDKGASAQSFIERMTNFDKNLPNEKVLPKHSLLYEYFTVYNELTKVKYVTEGMRKPAFLSGEQKKAIVDLLFKTNRKVTVKQLKEDYFKKIECFDSVEISGVEDRFNASLGTYHDLLKIIKDKDFLDNEENEDILEDIVLTLTLFEDREMIEERLKTYAHLFDDKVMKQLKRRRYTGWGRLSRKLINGIRDKQSGKTILDFLKSDGFANRNFMQLIHDDSLTFKEDIQKAQVSGQGDSLHEHIANLAGSPAIKKGILQTVKVVDELVKVMGRHKPENIVIEMARENQTTQKGQKNSRERMKRIEEGIKELGSQILKEHPVENTQLQNEKLYLYYLQNGRDMYVDQELDINRLSDYDVDHIVPQSFLKDDSIDNKVLTRSDKARGKSDNVPSEEVVKKMKNYWRQLLNAKLITQRKFDNLTKAERGGLSELDKAGFIKRQLVETRQITKHVAQILDSRMNTKYDENDKLIREVKVITLKSKLVSDFRKDFQFYKVREINNYHHAHDAYLNAVVGTALIKKYPKLESEFVYGDYKVYDVRKMIAKSEQEIGKATAKYFFYSNIMNFFKTEITLANGEIRKRPLIETNGETGEIVWDKGRDFATVRKVLSMPQVNIVKKTEVQTGGFSKESILPKRNSDKLIARKKDWDPKKYGGFDSPTVAYSVLVVAKVEKGKSKKLKSVKELLGITIMERSSFEKNPIDFLEAKGYKEVKKDLIIKLPKYSLFELENGRKRMLASAGELQKGNELALPSKYVNFLYLASHYEKLKGSPEDNEQKQLFVEQHKHYLDEIIEQISEFSKRVILADANLDKVLSAYNKHRDKPIREQAENIIHLFTLTNLGAPAAFKYFDTTIDRKRYTSTKEVLDATLIHQSITGLYETRIDLSQLGGDGGEAAAKGGSGGGGGMDLLKPLTVERKGVKIKGYWNSQADITCVPKDLLQGEEPVRQQNVTTIHGTQEGDVYYVNLKIDGRRINTEVIGTTLDYAIITPGDVPWILKKPLELTIKLDLEEQQGTLLNNSILSKKGKEELKQLFEKYSALWQSWENQVGHRRIRPHKIATGTVKPTPQKQYHINPKAKPDIQIVINDLLKQGVLIQKESTMNTPVYPVPKPNGRWRMVLDYRAVNKVTPLIAVQNQHSYGILGSLFKGRYKTTIDLSNGFWAHPIVPEDYWITAFTWQGKQYCWTVLPQGFLNSPGLFTGDVVDLLQGIPNVEVYVDDVYISHDSEKEHLEYLDILFNRLKEAGYIISLKKSNIANSIVDFLGFQITNEGRGLTDTFKEKLENITAPTTLKQLQSILGLLNFARNFIPDFTELIAPLYALIPKSTKNYVPWQIEHSTTLETLITKLNGAEYLQGRKGDKTLIMKVNASYTTGYIRYYNEGEKKPISYVSIVFSKTELKFTELEKLLTTVHKGLLKALDLSMGQNIHVYSPIVSMQNIQKTPQTAKKALASRWLSWLSYLEDPRIRFFYDPQMPALKDLPAVDTGKDNKKHPSNFQHIFYTDGSAITSPTKEGHLNAGMGIVYFINKDGNLQKQQEWSISLGNHTAQFAEIAAFEFALKKCLPLGGNILVVTDSNYVAKAYNEELDVWASNGFVNNRKKPLKHISKWKSVADLKRLRPDVVVTHEPGHQKLDSSPHAYGNNLADQLATQASFKVHAGKRTADGSEFEKRTADGSEFESPKKKAKVE

SEQ ID NO: 727 - protein, 2173 aa, synthetic construct
MPAAKRVKLDGGDKKYSIGLDIGTNSVGWAVITDEYKVPSKKFKVLGNTDRHSIKKNLIGALLFDSGETAEATRLKRTARRRYTRRKNRICYLQEIFSNEMAKVDDSFFHRLEESFLVEEDKKHERHPIFGNIVDEVAYHEKYPTIYHLRKKLVDSTDKADLRLIYLALAHMIKFRGHFLIEGDLNPDNSDVDKLFIQLVQTYNQLFEENPINASGVDAKAILSARLSKSRRLENLIAQLPGEKKNGLFGNLIALSLGLTPNFKSNFDLAEDAKLQLSKDTYDDDLDNLLAQIGDQYADLFLAAKNLSDAILLSDILRVNTEITKAPLSASMIKRYDEHHQDLTLLKALVRQQLPEKYKEIFFDQSKNGYAGYIDGGASQEEFYKFIKPILEKMDGTEELLVKLNREDLLRKQRTFDNGSIPHQIHLGELHAILRRQEDFYPFLKDNREKIEKILTFRIPYYVGPLARGNSRFAWMTRKSEETITPWNFEEVVDKGASAQSFIERMTNFDKNLPNEKVLPKHSLLYEYFTVYNELTKVKYVTEGMRKPAFLSGEQKKAIVDLLFKTNRKVTVKQLKEDYFKKIECFDSVEISGVEDRFNASLGTYHDLLKIIKDKDFLDNEENEDILEDIVLTLTLFEDREMIEERLKTYAHLFDDKVMKQLKRRRYTGWGRLSRKLINGIRDKQSGKTILDFLKSDGFANRNFMQLIHDDSLTFKEDIQKAQVSGQGDSLHEHIANLAGSPAIKKGILQTVKVVDELVKVMGRHKPENIVIEMARENQTTQKGQKNSRERMKRIEEGIKELGSQILKEHPVENTQLQNEKLYLYYLQNGRDMYVDQELDINRLSDYDVDHIVPQSFLKDDSIDNKVLTRSDKARGKSDNVPSEEVVKKMKNYWRQLLNAKLITQRKFDNLTKAERGGLSELDKAGFIKRQLVETRQITKHVAQILDSRMNTKYDENDKLIREVKVITLKSKLVSDFRKDFQFYKVREINNYHHAHDAYLNAVVGTALIKKYPKLESEFVYGDYKVYDVRKMIAKSEQEIGKATAKYFFYSNIMNFFKTEITLANGEIRKRPLIETNGETGEIVWDKGRDFATVRKVLSMPQVNIVKKTEVQTGGFSKESILPKRNSDKLIARKKDWDPKKYGGFDSPTVAYSVLVVAKVEKGKSKKLKSVKELLGITIMERSSFEKNPIDFLEAKGYKEVKKDLIIKLPKYSLFELENGRKRMLASAGELQKGNELALPSKYVNFLYLASHYEKLKGSPEDNEQKQLFVEQHKHYLDEIIEQISEFSKRVILADANLDKVLSAYNKHRDKPIREQAENIIHLFTLTNLGAPAAFKYFDTTIDRKRYTSTKEVLDATLIHQSITGLYETRIDLSQLGGDGGGSSEAAAKPAPGGMDLLKPLTVERKGVKIKGYWNSQADITCVPKDLLQGEEPVRQQNVTTIHGTQEGDVYYVNLKIDGRRINTEVIGTTLDYAIITPGDVPWILKKPLELTIKLDLEEQQGTLLNNSILSKKGKEELKQLFEKYSALWQSWENQVGHRRIRPHKIATGTVKPTPQKQYHINPKAKPDIQIVINDLLKQGVLIQKESTMNTPVYPVPKPNGRWRMVLDYRAVNKVTPLIAVQNQHSYGILGSLFKGRYKTTIDLSNGFWAHPIVPEDYWITAFTWQGKQYCWTVLPQGFLNSPGLFTGDVVDLLQGIPNVEVYVDDVYISHDSEKEHLEYLDILFNRLKEAGYIISLKKSNIANSIVDFLGFQITNEGRGLTDTFKEKLENITAPTTLKQLQSILGLLNFARNFIPDFTELIAPLYALIPKSTKNYVPWQIEHSTTLETLITKLNGAEYLQGRKGDKTLIMKVNASYTTGYIRYYNEGEKKPISYVSIVFSKTELKFTELEKLLTTVHKGLLKALDLSMGQNIHVYSPIVSMQNIQKTPQTAKKALASRWLSWLSYLEDPRIRFFYDPQMPALKDLPAVDTGKDNKKHPSNFQHIFYTDGSAITSPTKEGHLNAGMGIVYFINKDGNLQKQQEWSISLGNHTAQFAEIAAFEFALKKCLPLGGNILVVTDSNYVAKAYNEELDVWASNGFVNNRKKPLKHISKWKSVADLKRLRPDVVVTHEPGHQKLDSSPHAYGNNLADQLATQASFKVHAGKRTADGSEFEKRTADGSEFESPKKKAKVE

SEQ ID NO: 728 - protein, 2173 aa, synthetic construct
MPAAKRVKLDGGDKKYSIGLDIGTNSVGWAVITDEYKVPSKKFKVLGNTDRHSIKKNLIGALLFDSGETAEATRLKRTARRRYTRRKNRICYLQEIFSNEMAKVDDSFFHRLEESFLVEEDKKHERHPIFGNIVDEVAYHEKYPTIYHLRKKLVDSTDKADLRLIYLALAHMIKFRGHFLIEGDLNPDNSDVDKLFIQLVQTYNQLFEENPINASGVDAKAILSARLSKSRRLENLIAQLPGEKKNGLFGNLIALSLGLTPNFKSNFDLAEDAKLQLSKDTYDDDLDNLLAQIGDQYADLFLAAKNLSDAILLSDILRVNTEITKAPLSASMIKRYDEHHQDLTLLKALVRQQLPEKYKEIFFDQSKNGYAGYIDGGASQEEFYKFIKPILEKMDGTEELLVKLNREDLLRKQRTFDNGSIPHQIHLGELHAILRRQEDFYPFLKDNREKIEKILTFRIPYYVGPLARGNSRFAWMTRKSEETITPWNFEEVVDKGASAQSFIERMTNFDKNLPNEKVLPKHSLLYEYFTVYNELTKVKYVTEGMRKPAFLSGEQKKAIVDLLFKTNRKVTVKQLKEDYFKKIECFDSVEISGVEDRFNASLGTYHDLLKIIKDKDFLDNEENEDILEDIVLTLTLFEDREMIEERLKTYAHLFDDKVMKQLKRRRYTGWGRLSRKLINGIRDKQSGKTILDFLKSDGFANRNFMQLIHDDSLTFKEDIQKAQVSGQGDSLHEHIANLAGSPAIKKGILQTVKVVDELVKVMGRHKPENIVIEMARENQTTQKGQKNSRERMKRIEEGIKELGSQILKEHPVENTQLQNEKLYLYYLQNGRDMYVDQELDINRLSDYDVDHIVPQSFLKDDSIDNKVLTRSDKARGKSDNVPSEEVVKKMKNYWRQLLNAKLITQRKFDNLTKAERGGLSELDKAGFIKRQLVETRQITKHVAQILDSRMNTKYDENDKLIREVKVITLKSKLVSDFRKDFQFYKVREINNYHHAHDAYLNAVVGTALIKKYPKLESEFVYGDYKVYDVRKMIAKSEQEIGKATAKYFFYSNIMNFFKTEITLANGEIRKRPLIETNGETGEIVWDKGRDFATVRKVLSMPQVNIVKKTEVQTGGFSKESILPKRNSDKLIARKKDWDPKKYGGFDSPTVAYSVLVVAKVEKGKSKKLKSVKELLGITIMERSSFEKNPIDFLEAKGYKEVKKDLIIKLPKYSLFELENGRKRMLASAGELQKGNELALPSKYVNFLYLASHYEKLKGSPEDNEQKQLFVEQHKHYLDEIIEQISEFSKRVILADANLDKVLSAYNKHRDKPIREQAENIIHLFTLTNLGAPAAFKYFDTTIDRKRYTSTKEVLDATLIHQSITGLYETRIDLSQLGGDGGGSSGGGEAAAKGGMDLLKPLTVERKGVKIKGYWNSQADITCVPKDLLQGEEPVRQQNVTTIHGTQEGDVYYVNLKIDGRRINTEVIGTTLDYAIITPGDVPWILKKPLELTIKLDLEEQQGTLLNNSILSKKGKEELKQLFEKYSALWQSWENQVGHRRIRPHKIATGTVKPTPQKQYHINPKAKPDIQIVINDLLKQGVLIQKESTMNTPVYPVPKPNGRWRMVLDYRAVNKVTPLIAVQNQHSYGILGSLFKGRYKTTIDLSNGFWAHPIVPEDYWITAFTWQGKQYCWTVLPQGFLNSPGLFTGDVVDLLQGIPNVEVYVDDVYISHDSEKEHLEYLDILFNRLKEAGYIISLKKSNIANSIVDFLGFQITNEGRGLTDTFKEKLENITAPTTLKQLQSILGLLNFARNFIPDFTELIAPLYALIPKSTKNYVPWQIEHSTTLETLITKLNGAEYLQGRKGDKTLIMKVNASYTTGYIRYYNEGEKKPISYVSIVFSKTELKFTELEKLLTTVHKGLLKALDLSMGQNIHVYSPIVSMQNIQKTPQTAKKALASRWLSWLSYLEDPRIRFFYDPQMPALKDLPAVDTGKDNKKHPSNFQHIFYTDGSAITSPTKEGHLNAGMGIVYFINKDGNLQKQQEWSISLGNHTAQFAEIAAFEFALKKCLPLGGNILVVTDSNYVAKAYNEELDVWASNGFVNNRKKPLKHISKWKSVADLKRLRPDVVVTHEPGHQKLDSSPHAYGNNLADQLATQASFKVHAGKRTADGSEFEKRTADGSEFESPKKKAKVE

SEQ ID NO: 729 - protein, 2171 aa, synthetic construct
MPAAKRVKLDGGDKKYSIGLDIGTNSVGWAVITDEYKVPSKKFKVLGNTDRHSIKKNLIGALLFDSGETAEATRLKRTARRRYTRRKNRICYLQEIFSNEMAKVDDSFFHRLEESFLVEEDKKHERHPIFGNIVDEVAYHEKYPTIYHLRKKLVDSTDKADLRLIYLALAHMIKFRGHFLIEGDLNPDNSDVDKLFIQLVQTYNQLFEENPINASGVDAKAILSARLSKSRRLENLIAQLPGEKKNGLFGNLIALSLGLTPNFKSNFDLAEDAKLQLSKDTYDDDLDNLLAQIGDQYADLFLAAKNLSDAILLSDILRVNTEITKAPLSASMIKRYDEHHQDLTLLKALVRQQLPEKYKEIFFDQSKNGYAGYIDGGASQEEFYKFIKPILEKMDGTEELLVKLNREDLLRKQRTFDNGSIPHQIHLGELHAILRRQEDFYPFLKDNREKIEKILTFRIPYYVGPLARGNSRFAWMTRKSEETITPWNFEEVVDKGASAQSFIERMTNFDKNLPNEKVLPKHSLLYEYFTVYNELTKVKYVTEGMRKPAFLSGEQKKAIVDLLFKTNRKVTVKQLKEDYFKKIECFDSVEISGVEDRFNASLGTYHDLLKIIKDKDFLDNEENEDILEDIVLTLTLFEDREMIEERLKTYAHLFDDKVMKQLKRRRYTGWGRLSRKLINGIRDKQSGKTILDFLKSDGFANRNFMQLIHDDSLTFKEDIQKAQVSGQGDSLHEHIANLAGSPAIKKGILQTVKVVDELVKVMGRHKPENIVIEMARENQTTQKGQKNSRERMKRIEEGIKELGSQILKEHPVENTQLQNEKLYLYYLQNGRDMYVDQELDINRLSDYDVDHIVPQSFLKDDSIDNKVLTRSDKARGKSDNVPSEEVVKKMKNYWRQLLNAKLITQRKFDNLTKAERGGLSELDKAGFIKRQLVETRQITKHVAQILDSRMNTKYDENDKLIREVKVITLKSKLVSDFRKDFQFYKVREINNYHHAHDAYLNAVVGTALIKKYPKLESEFVYGDYKVYDVRKMIAKSEQEIGKATAKYFFYSNIMNFFKTEITLANGEIRKRPLIETNGETGEIVWDKGRDFATVRKVLSMPQVNIVKKTEVQTGGFSKESILPKRNSDKLIARKKDWDPKKYGGFDSPTVAYSVLVVAKVEKGKSKKLKSVKELLGITIMERSSFEKNPIDFLEAKGYKEVKKDLIIKLPKYSLFELENGRKRMLASAGELQKGNELALPSKYVNFLYLASHYEKLKGSPEDNEQKQLFVEQHKHYLDEIIEQISEFSKRVILADANLDKVLSAYNKHRDKPIREQAENIIHLFTLTNLGAPAAFKYFDTTIDRKRYTSTKEVLDATLIHQSITGLYETRIDLSQLGGDGGGGSGSSGGGGGMDLLKPLTVERKGVKIKGYWNSQADITCVPKDLLQGEEPVRQQNVTTIHGTQEGDVYYVNLKIDGRRINTEVIGTTLDYAIITPGDVPWILKKPLELTIKLDLEEQQGTLLNNSILSKKGKEELKQLFEKYSALWQSWENQVGHRRIRPHKIATGTVKPTPQKQYHINPKAKPDIQIVINDLLKQGVLIQKESTMNTPVYPVPKPNGRWRMVLDYRAVNKVTPLIAVQNQHSYGILGSLFKGRYKTTIDLSNGFWAHPIVPEDYWITAFTWQGKQYCWTVLPQGFLNSPGLFTGDVVDLLQGIPNVEVYVDDVYISHDSEKEHLEYLDILFNRLKEAGYIISLKKSNIANSIVDFLGFQITNEGRGLTDTFKEKLENITAPTTLKQLQSILGLLNFARNFIPDFTELIAPLYALIPKSTKNYVPWQIEHSTTLETLITKLNGAEYLQGRKGDKTLIMKVNASYTTGYIRYYNEGEKKPISYVSIVFSKTELKFTELEKLLTTVHKGLLKALDLSMGQNIHVYSPIVSMQNIQKTPQTAKKALASRWLSWLSYLEDPRIRFFYDPQMPALKDLPAVDTGKDNKKHPSNFQHIFYTDGSAITSPTKEGHLNAGMGIVYFINKDGNLQKQQEWSISLGNHTAQFAEIAAFEFALKKCLPLGGNILVVTDSNYVAKAYNEELDVWASNGFVNNRKKPLKHISKWKSVADLKRLRPDVVVTHEPGHQKLDSSPHAYGNNLADQLATQASFKVHAGKRTADGSEFEKRTADGSEFESPKKKAKVE

SEQ ID NO: 730 - protein, 2173 aa, synthetic construct
MPAAKRVKLDGGDKKYSIGLDIGTNSVGWAVITDEYKVPSKKFKVLGNTDRHSIKKNLIGALLFDSGETAEATRLKRTARRRYTRRKNRICYLQEIFSNEMAKVDDSFFHRLEESFLVEEDKKHERHPIFGNIVDEVAYHEKYPTIYHLRKKLVDSTDKADLRLIYLALAHMIKFRGHFLIEGDLNPDNSDVDKLFIQLVQTYNQLFEENPINASGVDAKAILSARLSKSRRLENLIAQLPGEKKNGLFGNLIALSLGLTPNFKSNFDLAEDAKLQLSKDTYDDDLDNLLAQIGDQYADLFLAAKNLSDAILLSDILRVNTEITKAPLSASMIKRYDEHHQDLTLLKALVRQQLPEKYKEIFFDQSKNGYAGYIDGGASQEEFYKFIKPILEKMDGTEELLVKLNREDLLRKQRTFDNGSIPHQIHLGELHAILRRQEDFYPFLKDNREKIEKILTFRIPYYVGPLARGNSRFAWMTRKSEETITPWNFEEVVDKGASAQSFIERMTNFDKNLPNEKVLPKHSLLYEYFTVYNELTKVKYVTEGMRKPAFLSGEQKKAIVDLLFKTNRKVTVKQLKEDYFKKIECFDSVEISGVEDRFNASLGTYHDLLKIIKDKDFLDNEENEDILEDIVLTLTLFEDREMIEERLKTYAHLFDDKVMKQLKRRRYTGWGRLSRKLINGIRDKQSGKTILDFLKSDGFANRNFMQLIHDDSLTFKEDIQKAQVSGQGDSLHEHIANLAGSPAIKKGILQTVKVVDELVKVMGRHKPENIVIEMARENQTTQKGQKNSRERMKRIEEGIKELGSQILKEHPVENTQLQNEKLYLYYLQNGRDMYVDQELDINRLSDYDVDHIVPQSFLKDDSIDNKVLTRSDKARGKSDNVPSEEVVKKMKNYWRQLLNAKLITQRKFDNLTKAERGGLSELDKAGFIKRQLVETRQITKHVAQILDSRMNTKYDENDKLIREVKVITLKSKLVSDFRKDFQFYKVREINNYHHAHDAYLNAVVGTALIKKYPKLESEFVYGDYKVYDVRKMIAKSEQEIGKATAKYFFYSNIMNFFKTEITLANGEIRKRPLIETNGETGEIVWDKGRDFATVRKVLSMPQVNIVKKTEVQTGGFSKESILPKRNSDKLIARKKDWDPKKYGGFDSPTVAYSVLVVAKVEKGKSKKLKSVKELLGITIMERSSFEKNPIDFLEAKGYKEVKKDLIIKLPKYSLFELENGRKRMLASAGELQKGNELALPSKYVNFLYLASHYEKLKGSPEDNEQKQLFVEQHKHYLDEIIEQISEFSKRVILADANLDKVLSAYNKHRDKPIREQAENIIHLFTLTNLGAPAAFKYFDTTIDRKRYTSTKEVLDATLIHQSITGLYETRIDLSQLGGDGGGSSGGSEAAAKGGMDLLKPLTVERKGVKIKGYWNSQADITCVPKDLLQGEEPVRQQNVTTIHGTQEGDVYYVNLKIDGRRINTEVIGTTLDYAIITPGDVPWILKKPLELTIKLDLEEQQGTLLNNSILSKKGKEELKQLFEKYSALWQSWENQVGHRRIRPHKIATGTVKPTPQKQYHINPKAKPDIQIVINDLLKQGVLIQKESTMNTPVYPVPKPNGRWRMVLDYRAVNKVTPLIAVQNQHSYGILGSLFKGRYKTTIDLSNGFWAHPIVPEDYWITAFTWQGKQYCWTVLPQGFLNSPGLFTGDVVDLLQGIPNVEVYVDDVYISHDSEKEHLEYLDILFNRLKEAGYIISLKKSNIANSIVDFLGFQITNEGRGLTDTFKEKLENITAPTTLKQLQSILGLLNFARNFIPDFTELIAPLYALIPKSTKNYVPWQIEHSTTLETLITKLNGAEYLQGRKGDKTLIMKVNASYTTGYIRYYNEGEKKPISYVSIVFSKTELKFTELEKLLTTVHKGLLKALDLSMGQNIHVYSPIVSMQNIQKTPQTAKKALASRWLSWLSYLEDPRIRFFYDPQMPALKDLPAVDTGKDNKKHPSNFQHIFYTDGSAITSPTKEGHLNAGMGIVYFINKDGNLQKQQEWSISLGNHTAQFAEIAAFEFALKKCLPLGGNILVVTDSNYVAKAYNEELDVWASNGFVNNRKKPLKHISKWKSVADLKRLRPDVVVTHEPGHQKLDSSPHAYGNNLADQLATQASFKVHAGKRTADGSEFEKRTADGSEFESPKKKAKVE

SEQ ID NO: 731 - protein, 2171 aa, synthetic construct
MPAAKRVKLDGGDKKYSIGLDIGTNSVGWAVITDEYKVPSKKFKVLGNTDRHSIKKNLIGALLFDSGETAEATRLKRTARRRYTRRKNRICYLQEIFSNEMAKVDDSFFHRLEESFLVEEDKKHERHPIFGNIVDEVAYHEKYPTIYHLRKKLVDSTDKADLRLIYLALAHMIKFRGHFLIEGDLNPDNSDVDKLFIQLVQTYNQLFEENPINASGVDAKAILSARLSKSRRLENLIAQLPGEKKNGLFGNLIALSLGLTPNFKSNFDLAEDAKLQLSKDTYDDDLDNLLAQIGDQYADLFLAAKNLSDAILLSDILRVNTEITKAPLSASMIKRYDEHHQDLTLLKALVRQQLPEKYKEIFFDQSKNGYAGYIDGGASQEEFYKFIKPILEKMDGTEELLVKLNREDLLRKQRTFDNGSIPHQIHLGELHAILRRQEDFYPFLKDNREKIEKILTFRIPYYVGPLARGNSRFAWMTRKSEETITPWNFEEVVDKGASAQSFIERMTNFDKNLPNEKVLPKHSLLYEYFTVYNELTKVKYVTEGMRKPAFLSGEQKKAIVDLLFKTNRKVTVKQLKEDYFKKIECFDSVEISGVEDRFNASLGTYHDLLKIIKDKDFLDNEENEDILEDIVLTLTLFEDREMIEERLKTYAHLFDDKVMKQLKRRRYTGWGRLSRKLINGIRDKQSGKTILDFLKSDGFANRNFMQLIHDDSLTFKEDIQKAQVSGQGDSLHEHIANLAGSPAIKKGILQTVKVVDELVKVMGRHKPENIVIEMARENQTTQKGQKNSRERMKRIEEGIKELGSQILKEHPVENTQLQNEKLYLYYLQNGRDMYVDQELDINRLSDYDVDHIVPQSFLKDDSIDNKVLTRSDKARGKSDNVPSEEVVKKMKNYWRQLLNAKLITQRKFDNLTKAERGGLSELDKAGFIKRQLVETRQITKHVAQILDSRMNTKYDENDKLIREVKVITLKSKLVSDFRKDFQFYKVREINNYHHAHDAYLNAVVGTALIKKYPKLESEFVYGDYKVYDVRKMIAKSEQEIGKATAKYFFYSNIMNFFKTEITLANGEIRKRPLIETNGETGEIVWDKGRDFATVRKVLSMPQVNIVKKTEVQTGGFSKESILPKRNSDKLIARKKDWDPKKYGGFDSPTVAYSVLVVAKVEKGKSKKLKSVKELLGITIMERSSFEKNPIDFLEAKGYKEVKKDLIIKLPKYSLFELENGRKRMLASAGELQKGNELALPSKYVNFLYLASHYEKLKGSPEDNEQKQLFVEQHKHYLDEIIEQISEFSKRVILADANLDKVLSAYNKHRDKPIREQAENIIHLFTLTNLGAPAAFKYFDTTIDRKRYTSTKEVLDATLIHQSITGLYETRIDLSQLGGDGGGGSGGGPAPGGMDLLKPLTVERKGVKIKGYWNSQADITCVPKDLLQGEEPVRQQNVTTIHGTQEGDVYYVNLKIDGRRINTEVIGTTLDYAIITPGDVPWILKKPLELTIKLDLEEQQGTLLNNSILSKKGKEELKQLFEKYSALWQSWENQVGHRRIRPHKIATGTVKPTPQKQYHINPKAKPDIQIVINDLLKQGVLIQKESTMNTPVYPVPKPNGRWRMVLDYRAVNKVTPLIAVQNQHSYGILGSLFKGRYKTTIDLSNGFWAHPIVPEDYWITAFTWQGKQYCWTVLPQGFLNSPGLFTGDVVDLLQGIPNVEVYVDDVYISHDSEKEHLEYLDILFNRLKEAGYIISLKKSNIANSIVDFLGFQITNEGRGLTDTFKEKLENITAPTTLKQLQSILGLLNFARNFIPDFTELIAPLYALIPKSTKNYVPWQIEHSTTLETLITKLNGAEYLQGRKGDKTLIMKVNASYTTGYIRYYNEGEKKPISYVSIVFSKTELKFTELEKLLTTVHKGLLKALDLSMGQNIHVYSPIVSMQNIQKTPQTAKKALASRWLSWLSYLEDPRIRFFYDPQMPALKDLPAVDTGKDNKKHPSNFQHIFYTDGSAITSPTKEGHLNAGMGIVYFINKDGNLQKQQEWSISLGNHTAQFAEIAAFEFALKKCLPLGGNILVVTDSNYVAKAYNEELDVWASNGFVNNRKKPLKHISKWKSVADLKRLRPDVVVTHEPGHQKLDSSPHAYGNNLADQLATQASFKVHAGKRTADGSEFEKRTADGSEFESPKKKAKVE

SEQ ID NO: 732 - protein, 2173 aa, synthetic construct
MPAAKRVKLDGGDKKYSIGLDIGTNSVGWAVITDEYKVPSKKFKVLGNTDRHSIKKNLIGALLFDSGETAEATRLKRTARRRYTRRKNRICYLQEIFSNEMAKVDDSFFHRLEESFLVEEDKKHERHPIFGNIVDEVAYHEKYPTIYHLRKKLVDSTDKADLRLIYLALAHMIKFRGHFLIEGDLNPDNSDVDKLFIQLVQTYNQLFEENPINASGVDAKAILSARLSKSRRLENLIAQLPGEKKNGLFGNLIALSLGLTPNFKSNFDLAEDAKLQLSKDTYDDDLDNLLAQIGDQYADLFLAAKNLSDAILLSDILRVNTEITKAPLSASMIKRYDEHHQDLTLLKALVRQQLPEKYKEIFFDQSKNGYAGYIDGGASQEEFYKFIKPILEKMDGTEELLVKLNREDLLRKQRTFDNGSIPHQIHLGELHAILRRQEDFYPFLKDNREKIEKILTFRIPYYVGPLARGNSRFAWMTRKSEETITPWNFEEVVDKGASAQSFIERMTNFDKNLPNEKVLPKHSLLYEYFTVYNELTKVKYVTEGMRKPAFLSGEQKKAIVDLLFKTNRKVTVKQLKEDYFKKIECFDSVEISGVEDRFNASLGTYHDLLKIIKDKDFLDNEENEDILEDIVLTLTLFEDREMIEERLKTYAHLFDDKVMKQLKRRRYTGWGRLSRKLINGIRDKQSGKTILDFLKSDGFANRNFMQLIHDDSLTFKEDIQKAQVSGQGDSLHEHIANLAGSPAIKKGILQTVKVVDELVKVMGRHKPENIVIEMARENQTTQKGQKNSRERMKRIEEGIKELGSQILKEHPVENTQLQNEKLYLYYLQNGRDMYVDQELDINRLSDYDVDHIVPQSFLKDDSIDNKVLTRSDKARGKSDNVPSEEVVKKMKNYWRQLLNAKLITQRKFDNLTKAERGGLSELDKAGFIKRQLVETRQITKHVAQILDSRMNTKYDENDKLIREVKVITLKSKLVSDFRKDFQFYKVREINNYHHAHDAYLNAVVGTALIKKYPKLESEFVYGDYKVYDVRKMIAKSEQEIGKATAKYFFYSNIMNFFKTEITLANGEIRKRPLIETNGETGEIVWDKGRDFATVRKVLSMPQVNIVKKTEVQTGGFSKESILPKRNSDKLIARKKDWDPKKYGGFDSPTVAYSVLVVAKVEKGKSKKLKSVKELLGITIMERSSFEKNPIDFLEAKGYKEVKKDLIIKLPKYSLFELENGRKRMLASAGELQKGNELALPSKYVNFLYLASHYEKLKGSPEDNEQKQLFVEQHKHYLDEIIEQISEFSKRVILADANLDKVLSAYNKHRDKPIREQAENIIHLFTLTNLGAPAAFKYFDTTIDRKRYTSTKEVLDATLIHQSITGLYETRIDLSQLGGDGGGGGEAAAKPAPGGMDLLKPLTVERKGVKIKGYWNSQADITCVPKDLLQGEEPVRQQNVTTIHGTQEGDVYYVNLKIDGRRINTEVIGTTLDYAIITPGDVPWILKKPLELTIKLDLEEQQGTLLNNSILSKKGKEELKQLFEKYSALWQSWENQVGHRRIRPHKIATGTVKPTPQKQYHINPKAKPDIQIVINDLLKQGVLIQKESTMNTPVYPVPKPNGRWRMVLDYRAVNKVTPLIAVQNQHSYGILGSLFKGRYKTTIDLSNGFWAHPIVPEDYWITAFTWQGKQYCWTVLPQGFLNSPGLFTGDVVDLLQGIPNVEVYVDDVYISHDSEKEHLEYLDILFNRLKEAGYIISLKKSNIANSIVDFLGFQITNEGRGLTDTFKEKLENITAPTTLKQLQSILGLLNFARNFIPDFTELIAPLYALIPKSTKNYVPWQIEHSTTLETLITKLNGAEYLQGRKGDKTLIMKVNASYTTGYIRYYNEGEKKPISYVSIVFSKTELKFTELEKLLTTVHKGLLKALDLSMGQNIHVYSPIVSMQNIQKTPQTAKKALASRWLSWLSYLEDPRIRFFYDPQMPALKDLPAVDTGKDNKKHPSNFQHIFYTDGSAITSPTKEGHLNAGMGIVYFINKDGNLQKQQEWSISLGNHTAQFAEIAAFEFALKKCLPLGGNILVVTDSNYVAKAYNEELDVWASNGFVNNRKKPLKHISKWKSVADLKRLRPDVVVTHEPGHQKLDSSPHAYGNNLADQLATQASFKVHAGKRTADGSEFEKRTADGSEFESPKKKAKVE

SEQ ID NO: 733 - protein, 2167 aa, synthetic construct
MPAAKRVKLDGGDKKYSIGLDIGTNSVGWAVITDEYKVPSKKFKVLGNTDRHSIKKNLIGALLFDSGETAEATRLKRTARRRYTRRKNRICYLQEIFSNEMAKVDDSFFHRLEESFLVEEDKKHERHPIFGNIVDEVAYHEKYPTIYHLRKKLVDSTDKADLRLIYLALAHMIKFRGHFLIEGDLNPDNSDVDKLFIQLVQTYNQLFEENPINASGVDAKAILSARLSKSRRLENLIAQLPGEKKNGLFGNLIALSLGLTPNFKSNFDLAEDAKLQLSKDTYDDDLDNLLAQIGDQYADLFLAAKNLSDAILLSDILRVNTEITKAPLSASMIKRYDEHHQDLTLLKALVRQQLPEKYKEIFFDQSKNGYAGYIDGGASQEEFYKFIKPILEKMDGTEELLVKLNREDLLRKQRTFDNGSIPHQIHLGELHAILRRQEDFYPFLKDNREKIEKILTFRIPYYVGPLARGNSRFAWMTRKSEETITPWNFEEVVDKGASAQSFIERMTNFDKNLPNEKVLPKHSLLYEYFTVYNELTKVKYVTEGMRKPAFLSGEQKKAIVDLLFKTNRKVTVKQLKEDYFKKIECFDSVEISGVEDRFNASLGTYHDLLKIIKDKDFLDNEENEDILEDIVLTLTLFEDREMIEERLKTYAHLFDDKVMKQLKRRRYTGWGRLSRKLINGIRDKQSGKTILDFLKSDGFANRNFMQLIHDDSLTFKEDIQKAQVSGQGDSLHEHIANLAGSPAIKKGILQTVKVVDELVKVMGRHKPENIVIEMARENQTTQKGQKNSRERMKRIEEGIKELGSQILKEHPVENTQLQNEKLYLYYLQNGRDMYVDQELDINRLSDYDVDHIVPQSFLKDDSIDNKVLTRSDKARGKSDNVPSEEVVKKMKNYWRQLLNAKLITQRKFDNLTKAERGGLSELDKAGFIKRQLVETRQITKHVAQILDSRMNTKYDENDKLIREVKVITLKSKLVSDFRKDFQFYKVREINNYHHAHDAYLNAVVGTALIKKYPKLESEFVYGDYKVYDVRKMIAKSEQEIGKATAKYFFYSNIMNFFKTEITLANGEIRKRPLIETNGETGEIVWDKGRDFATVRKVLSMPQVNIVKKTEVQTGGFSKESILPKRNSDKLIARKKDWDPKKYGGFDSPTVAYSVLVVAKVEKGKSKKLKSVKELLGITIMERSSFEKNPIDFLEAKGYKEVKKDLIIKLPKYSLFELENGRKRMLASAGELQKGNELALPSKYVNFLYLASHYEKLKGSPEDNEQKQLFVEQHKHYLDEIIEQISEFSKRVILADANLDKVLSAYNKHRDKPIREQAENIIHLFTLTNLGAPAAFKYFDTTIDRKRYTSTKEVLDATLIHQSITGLYETRIDLSQLGGDGGGGGGGGGMDLLKPLTVERKGVKIKGYWNSQADITCVPKDLLQGEEPVRQQNVTTIHGTQEGDVYYVNLKIDGRRINTEVIGTTLDYAIITPGDVPWILKKPLELTIKLDLEEQQGTLLNNSILSKKGKEELKQLFEKYSALWQSWENQVGHRRIRPHKIATGTVKPTPQKQYHINPKAKPDIQIVINDLLKQGVLIQKESTMNTPVYPVPKPNGRWRMVLDYRAVNKVTPLIAVQNQHSYGILGSLFKGRYKTTIDLSNGFWAHPIVPEDYWITAFTWQGKQYCWTVLPQGFLNSPGLFTGDVVDLLQGIPNVEVYVDDVYISHDSEKEHLEYLDILFNRLKEAGYIISLKKSNIANSIVDFLGFQITNEGRGLTDTFKEKLENITAPTTLKQLQSILGLLNFARNFIPDFTELIAPLYALIPKSTKNYVPWQIEHSTTLETLITKLNGAEYLQGRKGDKTLIMKVNASYTTGYIRYYNEGEKKPISYVSIVFSKTELKFTELEKLLTTVHKGLLKALDLSMGQNIHVYSPIVSMQNIQKTPQTAKKALASRWLSWLSYLEDPRIRFFYDPQMPALKDLPAVDTGKDNKKHPSNFQHIFYTDGSAITSPTKEGHLNAGMGIVYFINKDGNLQKQQEWSISLGNHTAQFAEIAAFEFALKKCLPLGGNILVVTDSNYVAKAYNEELDVWASNGFVNNRKKPLKHISKWKSVADLKRLRPDVVVTHEPGHQKLDSSPHAYGNNLADQLATQASFKVHAGKRTADGSEFEKRTADGSEFESPKKKAKVE

SEQ ID NO: 734 - protein, 2165 aa, synthetic construct
MPAAKRVKLDGGDKKYSIGLDIGTNSVGWAVITDEYKVPSKKFKVLGNTDRHSIKKNLIGALLFDSGETAEATRLKRTARRRYTRRKNRICYLQEIFSNEMAKVDDSFFHRLEESFLVEEDKKHERHPIFGNIVDEVAYHEKYPTIYHLRKKLVDSTDKADLRLIYLALAHMIKFRGHFLIEGDLNPDNSDVDKLFIQLVQTYNQLFEENPINASGVDAKAILSARLSKSRRLENLIAQLPGEKKNGLFGNLIALSLGLTPNFKSNFDLAEDAKLQLSKDTYDDDLDNLLAQIGDQYADLFLAAKNLSDAILLSDILRVNTEITKAPLSASMIKRYDEHHQDLTLLKALVRQQLPEKYKEIFFDQSKNGYAGYIDGGASQEEFYKFIKPILEKMDGTEELLVKLNREDLLRKQRTFDNGSIPHQIHLGELHAILRRQEDFYPFLKDNREKIEKILTFRIPYYVGPLARGNSRFAWMTRKSEETITPWNFEEVVDKGASAQSFIERMTNFDKNLPNEKVLPKHSLLYEYFTVYNELTKVKYVTEGMRKPAFLSGEQKKAIVDLLFKTNRKVTVKQLKEDYFKKIECFDSVEISGVEDRFNASLGTYHDLLKIIKDKDFLDNEENEDILEDIVLTLTLFEDREMIEERLKTYAHLFDDKVMKQLKRRRYTGWGRLSRKLINGIRDKQSGKTILDFLKSDGFANRNFMQLIHDDSLTFKEDIQKAQVSGQGDSLHEHIANLAGSPAIKKGILQTVKVVDELVKVMGRHKPENIVIEMARENQTTQKGQKNSRERMKRIEEGIKELGSQILKEHPVENTQLQNEKLYLYYLQNGRDMYVDQELDINRLSDYDVDHIVPQSFLKDDSIDNKVLTRSDKARGKSDNVPSEEVVKKMKNYWRQLLNAKLITQRKFDNLTKAERGGLSELDKAGFIKRQLVETRQITKHVAQILDSRMNTKYDENDKLIREVKVITLKSKLVSDFRKDFQFYKVREINNYHHAHDAYLNAVVGTALIKKYPKLESEFVYGDYKVYDVRKMIAKSEQEIGKATAKYFFYSNIMNFFKTEITLANGEIRKRPLIETNGETGEIVWDKGRDFATVRKVLSMPQVNIVKKTEVQTGGFSKESILPKRNSDKLIARKKDWDPKKYGGFDSPTVAYSVLVVAKVEKGKSKKLKSVKELLGITIMERSSFEKNPIDFLEAKGYKEVKKDLIIKLPKYSLFELENGRKRMLASAGELQKGNELALPSKYVNFLYLASHYEKLKGSPEDNEQKQLFVEQHKHYLDEIIEQISEFSKRVILADANLDKVLSAYNKHRDKPIREQAENIIHLFTLTNLGAPAAFKYFDTTIDRKRYTSTKEVLDATLIHQSITGLYETRIDLSQLGGDGGGGGGGMDLLKPLTVERKGVKIKGYWNSQADITCVPKDLLQGEEPVRQQNVTTIHGTQEGDVYYVNLKIDGRRINTEVIGTTLDYAIITPGDVPWILKKPLELTIKLDLEEQQGTLLNNSILSKKGKEELKQLFEKYSALWQSWENQVGHRRIRPHKIATGTVKPTPQKQYHINPKAKPDIQIVINDLLKQGVLIQKESTMNTPVYPVPKPNGRWRMVLDYRAVNKVTPLIAVQNQHSYGILGSLFKGRYKTTIDLSNGFWAHPIVPEDYWITAFTWQGKQYCWTVLPQGFLNSPGLFTGDVVDLLQGIPNVEVYVDDVYISHDSEKEHLEYLDILFNRLKEAGYIISLKKSNIANSIVDFLGFQITNEGRGLTDTFKEKLENITAPTTLKQLQSILGLLNFARNFIPDFTELIAPLYALIPKSTKNYVPWQIEHSTTLETLITKLNGAEYLQGRKGDKTLIMKVNASYTTGYIRYYNEGEKKPISYVSIVFSKTELKFTELEKLLTTVHKGLLKALDLSMGQNIHVYSPIVSMQNIQKTPQTAKKALASRWLSWLSYLEDPRIRFFYDPQMPALKDLPAVDTGKDNKKHPSNFQHIFYTDGSAITSPTKEGHLNAGMGIVYFINKDGNLQKQQEWSISLGNHTAQFAEIAAFEFALKKCLPLGGNILVVTDSNYVAKAYNEELDVWASNGFVNNRKKPLKHISKWKSVADLKRLRPDVVVTHEPGHQKLDSSPHAYGNNLADQLATQASFKVHAGKRTADGSEFEKRTADGSEFESPKKKAKVE

SEQ ID NO: 735 - protein, 2167 aa, synthetic construct
MPAAKRVKLDGGDKKYSIGLDIGTNSVGWAVITDEYKVPSKKFKVLGNTDRHSIKKNLIGALLFDSGETAEATRLKRTARRRYTRRKNRICYLQEIFSNEMAKVDDSFFHRLEESFLVEEDKKHERHPIFGNIVDEVAYHEKYPTIYHLRKKLVDSTDKADLRLIYLALAHMIKFRGHFLIEGDLNPDNSDVDKLFIQLVQTYNQLFEENPINASGVDAKAILSARLSKSRRLENLIAQLPGEKKNGLFGNLIALSLGLTPNFKSNFDLAEDAKLQLSKDTYDDDLDNLLAQIGDQYADLFLAAKNLSDAILLSDILRVNTEITKAPLSASMIKRYDEHHQDLTLLKALVRQQLPEKYKEIFFDQSKNGYAGYIDGGASQEEFYKFIKPILEKMDGTEELLVKLNREDLLRKQRTFDNGSIPHQIHLGELHAILRRQEDFYPFLKDNREKIEKILTFRIPYYVGPLARGNSRFAWMTRKSEETITPWNFEEVVDKGASAQSFIERMTNFDKNLPNEKVLPKHSLLYEYFTVYNELTKVKYVTEGMRKPAFLSGEQKKAIVDLLFKTNRKVTVKQLKEDYFKKIECFDSVEISGVEDRFNASLGTYHDLLKIIKDKDFLDNEENEDILEDIVLTLTLFEDREMIEERLKTYAHLFDDKVMKQLKRRRYTGWGRLSRKLINGIRDKQSGKTILDFLKSDGFANRNFMQLIHDDSLTFKEDIQKAQVSGQGDSLHEHIANLAGSPAIKKGILQTVKVVDELVKVMGRHKPENIVIEMARENQTTQKGQKNSRERMKRIEEGIKELGSQILKEHPVENTQLQNEKLYLYYLQNGRDMYVDQELDINRLSDYDVDHIVPQSFLKDDSIDNKVLTRSDKARGKSDNVPSEEVVKKMKNYWRQLLNAKLITQRKFDNLTKAERGGLSELDKAGFIKRQLVETRQITKHVAQILDSRMNTKYDENDKLIREVKVITLKSKLVSDFRKDFQFYKVREINNYHHAHDAYLNAVVGTALIKKYPKLESEFVYGDYKVYDVRKMIAKSEQEIGKATAKYFFYSNIMNFFKTEITLANGEIRKRPLIETNGETGEIVWDKGRDFATVRKVLSMPQVNIVKKTEVQTGGFSKESILPKRNSDKLIARKKDWDPKKYGGFDSPTVAYSVLVVAKVEKGKSKKLKSVKELLGITIMERSSFEKNPIDFLEAKGYKEVKKDLIIKLPKYSLFELENGRKRMLASAGELQKGNELALPSKYVNFLYLASHYEKLKGSPEDNEQKQLFVEQHKHYLDEIIEQISEFSKRVILADANLDKVLSAYNKHRDKPIREQAENIIHLFTLTNLGAPAAFKYFDTTIDRKRYTSTKEVLDATLIHQSITGLYETRIDLSQLGGDGGPAPAPGGMDLLKPLTVERKGVKIKGYWNSQADITCVPKDLLQGEEPVRQQNVTTIHGTQEGDVYYVNLKIDGRRINTEVIGTTLDYAIITPGDVPWILKKPLELTIKLDLEEQQGTLLNNSILSKKGKEELKQLFEKYSALWQSWENQVGHRRIRPHKIATGTVKPTPQKQYHINPKAKPDIQIVINDLLKQGVLIQKESTMNTPVYPVPKPNGRWRMVLDYRAVNKVTPLIAVQNQHSYGILGSLFKGRYKTTIDLSNGFWAHPIVPEDYWITAFTWQGKQYCWTVLPQGFLNSPGLFTGDVVDLLQGIPNVEVYVDDVYISHDSEKEHLEYLDILFNRLKEAGYIISLKKSNIANSIVDFLGFQITNEGRGLTDTFKEKLENITAPTTLKQLQSILGLLNFARNFIPDFTELIAPLYALIPKSTKNYVPWQIEHSTTLETLITKLNGAEYLQGRKGDKTLIMKVNASYTTGYIRYYNEGEKKPISYVSIVFSKTELKFTELEKLLTTVHKGLLKALDLSMGQNIHVYSPIVSMQNIQKTPQTAKKALASRWLSWLSYLEDPRIRFFYDPQMPALKDLPAVDTGKDNKKHPSNFQHIFYTDGSAITSPTKEGHLNAGMGIVYFINKDGNLQKQQEWSISLGNHTAQFAEIAAFEFALKKCLPLGGNILVVTDSNYVAKAYNEELDVWASNGFVNNRKKPLKHISKWKSVADLKRLRPDVVVTHEPGHQKLDSSPHAYGNNLADQLATQASFKVHAGKRTADGSEFEKRTADGSEFESPKKKAKVE

SEQ ID NO: 736 - protein, 2171 aa, synthetic construct
MPAAKRVKLDGGDKKYSIGLDIGTNSVGWAVITDEYKVPSKKFKVLGNTDRHSIKKNLIGALLFDSGETAEATRLKRTARRRYTRRKNRICYLQEIFSNEMAKVDDSFFHRLEESFLVEEDKKHERHPIFGNIVDEVAYHEKYPTIYHLRKKLVDSTDKADLRLIYLALAHMIKFRGHFLIEGDLNPDNSDVDKLFIQLVQTYNQLFEENPINASGVDAKAILSARLSKSRRLENLIAQLPGEKKNGLFGNLIALSLGLTPNFKSNFDLAEDAKLQLSKDTYDDDLDNLLAQIGDQYADLFLAAKNLSDAILLSDILRVNTEITKAPLSASMIKRYDEHHQDLTLLKALVRQQLPEKYKEIFFDQSKNGYAGYIDGGASQEEFYKFIKPILEKMDGTEELLVKLNREDLLRKQRTFDNGSIPHQIHLGELHAILRRQEDFYPFLKDNREKIEKILTFRIPYYVGPLARGNSRFAWMTRKSEETITPWNFEEVVDKGASAQSFIERMTNFDKNLPNEKVLPKHSLLYEYFTVYNELTKVKYVTEGMRKPAFLSGEQKKAIVDLLFKTNRKVTVKQLKEDYFKKIECFDSVEISGVEDRFNASLGTYHDLLKIIKDKDFLDNEENEDILEDIVLTLTLFEDREMIEERLKTYAHLFDDKVMKQLKRRRYTGWGRLSRKLINGIRDKQSGKTILDFLKSDGFANRNFMQLIHDDSLTFKEDIQKAQVSGQGDSLHEHIANLAGSPAIKKGILQTVKVVDELVKVMGRHKPENIVIEMARENQTTQKGQKNSRERMKRIEEGIKELGSQILKEHPVENTQLQNEKLYLYYLQNGRDMYVDQELDINRLSDYDVDHIVPQSFLKDDSIDNKVLTRSDKARGKSDNVPSEEVVKKMKNYWRQLLNAKLITQRKFDNLTKAERGGLSELDKAGFIKRQLVETRQITKHVAQILDSRMNTKYDENDKLIREVKVITLKSKLVSDFRKDFQFYKVREINNYHHAHDAYLNAVVGTALIKKYPKLESEFVYGDYKVYDVRKMIAKSEQEIGKATAKYFFYSNIMNFFKTEITLANGEIRKRPLIETNGETGEIVWDKGRDFATVRKVLSMPQVNIVKKTEVQTGGFSKESILPKRNSDKLIARKKDWDPKKYGGFDSPTVAYSVLVVAKVEKGKSKKLKSVKELLGITIMERSSFEKNPIDFLEAKGYKEVKKDLIIKLPKYSLFELENGRKRMLASAGELQKGNELALPSKYVNFLYLASHYEKLKGSPEDNEQKQLFVEQHKHYLDEIIEQISEFSKRVILADANLDKVLSAYNKHRDKPIREQAENIIHLFTLTNLGAPAAFKYFDTTIDRKRYTSTKEVLDATLIHQSITGLYETRIDLSQLGGDGGGSSGGGGGSGGMDLLKPLTVERKGVKIKGYWNSQADITCVPKDLLQGEEPVRQQNVTTIHGTQEGDVYYVNLKIDGRRINTEVIGTTLDYAIITPGDVPWILKKPLELTIKLDLEEQQGTLLNNSILSKKGKEELKQLFEKYSALWQSWENQVGHRRIRPHKIATGTVKPTPQKQYHINPKAKPDIQIVINDLLKQGVLIQKESTMNTPVYPVPKPNGRWRMVLDYRAVNKVTPLIAVQNQHSYGILGSLFKGRYKTTIDLSNGFWAHPIVPEDYWITAFTWQGKQYCWTVLPQGFLNSPGLFTGDVVDLLQGIPNVEVYVDDVYISHDSEKEHLEYLDILFNRLKEAGYIISLKKSNIANSIVDFLGFQITNEGRGLTDTFKEKLENITAPTTLKQLQSILGLLNFARNFIPDFTELIAPLYALIPKSTKNYVPWQIEHSTTLETLITKLNGAEYLQGRKGDKTLIMKVNASYTTGYIRYYNEGEKKPISYVSIVFSKTELKFTELEKLLTTVHKGLLKALDLSMGQNIHVYSPIVSMQNIQKTPQTAKKALASRWLSWLSYLEDPRIRFFYDPQMPALKDLPAVDTGKDNKKHPSNFQHIFYTDGSAITSPTKEGHLNAGMGIVYFINKDGNLQKQQEWSISLGNHTAQFAEIAAFEFALKKCLPLGGNILVVTDSNYVAKAYNEELDVWASNGFVNNRKKPLKHISKWKSVADLKRLRPDVVVTHEPGHQKLDSSPHAYGNNLADQLATQASFKVHAGKRTADGSEFEKRTADGSEFESPKKKAKVE

SEQ ID NO: 737 - protein, 2171 aa, synthetic construct
MPAAKRVKLDGGDKKYSIGLDIGTNSVGWAVITDEYKVPSKKFKVLGNTDRHSIKKNLIGALLFDSGETAEATRLKRTARRRYTRRKNRICYLQEIFSNEMAKVDDSFFHRLEESFLVEEDKKHERHPIFGNIVDEVAYHEKYPTIYHLRKKLVDSTDKADLRLIYLALAHMIKFRGHFLIEGDLNPDNSDVDKLFIQLVQTYNQLFEENPINASGVDAKAILSARLSKSRRLENLIAQLPGEKKNGLFGNLIALSLGLTPNFKSNFDLAEDAKLQLSKDTYDDDLDNLLAQIGDQYADLFLAAKNLSDAILLSDILRVNTEITKAPLSASMIKRYDEHHQDLTLLKALVRQQLPEKYKEIFFDQSKNGYAGYIDGGASQEEFYKFIKPILEKMDGTEELLVKLNREDLLRKQRTFDNGSIPHQIHLGELHAILRRQEDFYPFLKDNREKIEKILTFRIPYYVGPLARGNSRFAWMTRKSEETITPWNFEEVVDKGASAQSFIERMTNFDKNLPNEKVLPKHSLLYEYFTVYNELTKVKYVTEGMRKPAFLSGEQKKAIVDLLFKTNRKVTVKQLKEDYFKKIECFDSVEISGVEDRFNASLGTYHDLLKIIKDKDFLDNEENEDILEDIVLTLTLFEDREMIEERLKTYAHLFDDKVMKQLKRRRYTGWGRLSRKLINGIRDKQSGKTILDFLKSDGFANRNFMQLIHDDSLTFKEDIQKAQVSGQGDSLHEHIANLAGSPAIKKGILQTVKVVDELVKVMGRHKPENIVIEMARENQTTQKGQKNSRERMKRIEEGIKELGSQILKEHPVENTQLQNEKLYLYYLQNGRDMYVDQELDINRLSDYDVDHIVPQSFLKDDSIDNKVLTRSDKARGKSDNVPSEEVVKKMKNYWRQLLNAKLITQRKFDNLTKAERGGLSELDKAGFIKRQLVETRQITKHVAQILDSRMNTKYDENDKLIREVKVITLKSKLVSDFRKDFQFYKVREINNYHHAHDAYLNAVVGTALIKKYPKLESEFVYGDYKVYDVRKMIAKSEQEIGKATAKYFFYSNIMNFFKTEITLANGEIRKRPLIETNGETGEIVWDKGRDFATVRKVLSMPQVNIVKKTEVQTGGFSKESILPKRNSDKLIARKKDWDPKKYGGFDSPTVAYSVLVVAKVEKGKSKKLKSVKELLGITIMERSSFEKNPIDFLEAKGYKEVKKDLIIKLPKYSLFELENGRKRMLASAGELQKGNELALPSKYVNFLYLASHYEKLKGSPEDNEQKQLFVEQHKHYLDEIIEQISEFSKRVILADANLDKVLSAYNKHRDKPIREQAENIIHLFTLTNLGAPAAFKYFDTTIDRKRYTSTKEVLDATLIHQSITGLYETRIDLSQLGGDGGPAPGGSGSSGGMDLLKPLTVERKGVKIKGYWNSQADITCVPKDLLQGEEPVRQQNVTTIHGTQEGDVYYVNLKIDGRRINTEVIGTTLDYAIITPGDVPWILKKPLELTIKLDLEEQQGTLLNNSILSKKGKEELKQLFEKYSALWQSWENQVGHRRIRPHKIATGTVKPTPQKQYHINPKAKPDIQIVINDLLKQGVLIQKESTMNTPVYPVPKPNGRWRMVLDYRAVNKVTPLIAVQNQHSYGILGSLFKGRYKTTIDLSNGFWAHPIVPEDYWITAFTWQGKQYCWTVLPQGFLNSPGLFTGDVVDLLQGIPNVEVYVDDVYISHDSEKEHLEYLDILFNRLKEAGYIISLKKSNIANSIVDFLGFQITNEGRGLTDTFKEKLENITAPTTLKQLQSILGLLNFARNFIPDFTELIAPLYALIPKSTKNYVPWQIEHSTTLETLITKLNGAEYLQGRKGDKTLIMKVNASYTTGYIRYYNEGEKKPISYVSIVFSKTELKFTELEKLLTTVHKGLLKALDLSMGQNIHVYSPIVSMQNIQKTPQTAKKALASRWLSWLSYLEDPRIRFFYDPQMPALKDLPAVDTGKDNKKHPSNFQHIFYTDGSAITSPTKEGHLNAGMGIVYFINKDGNLQKQQEWSISLGNHTAQFAEIAAFEFALKKCLPLGGNILVVTDSNYVAKAYNEELDVWASNGFVNNRKKPLKHISKWKSVADLKRLRPDVVVTHEPGHQKLDSSPHAYGNNLADQLATQASFKVHAGKRTADGSEFEKRTADGSEFESPKKKAKVE

SEQ ID NO: 738 - protein, 2185 aa, synthetic construct
MPAAKRVKLDGGDKKYSIGLDIGTNSVGWAVITDEYKVPSKKFKVLGNTDRHSIKKNLIGALLFDSGETAEATRLKRTARRRYTRRKNRICYLQEIFSNEMAKVDDSFFHRLEESFLVEEDKKHERHPIFGNIVDEVAYHEKYPTIYHLRKKLVDSTDKADLRLIYLALAHMIKFRGHFLIEGDLNPDNSDVDKLFIQLVQTYNQLFEENPINASGVDAKAILSARLSKSRRLENLIAQLPGEKKNGLFGNLIALSLGLTPNFKSNFDLAEDAKLQLSKDTYDDDLDNLLAQIGDQYADLFLAAKNLSDAILLSDILRVNTEITKAPLSASMIKRYDEHHQDLTLLKALVRQQLPEKYKEIFFDQSKNGYAGYIDGGASQEEFYKFIKPILEKMDGTEELLVKLNREDLLRKQRTFDNGSIPHQIHLGELHAILRRQEDFYPFLKDNREKIEKILTFRIPYYVGPLARGNSRFAWMTRKSEETITPWNFEEVVDKGASAQSFIERMTNFDKNLPNEKVLPKHSLLYEYFTVYNELTKVKYVTEGMRKPAFLSGEQKKAIVDLLFKTNRKVTVKQLKEDYFKKIECFDSVEISGVEDRFNASLGTYHDLLKIIKDKDFLDNEENEDILEDIVLTLTLFEDREMIEERLKTYAHLFDDKVMKQLKRRRYTGWGRLSRKLINGIRDKQSGKTILDFLKSDGFANRNFMQLIHDDSLTFKEDIQKAQVSGQGDSLHEHIANLAGSPAIKKGILQTVKVVDELVKVMGRHKPENIVIEMARENQTTQKGQKNSRERMKRIEEGIKELGSQILKEHPVENTQLQNEKLYLYYLQNGRDMYVDQELDINRLSDYDVDHIVPQSFLKDDSIDNKVLTRSDKARGKSDNVPSEEVVKKMKNYWRQLLNAKLITQRKFDNLTKAERGGLSELDKAGFIKRQLVETRQITKHVAQILDSRMNTKYDENDKLIREVKVITLKSKLVSDFRKDFQFYKVREINNYHHAHDAYLNAVVGTALIKKYPKLESEFVYGDYKVYDVRKMIAKSEQEIGKATAKYFFYSNIMNFFKTEITLANGEIRKRPLIETNGETGEIVWDKGRDFATVRKVLSMPQVNIVKKTEVQTGGFSKESILPKRNSDKLIARKKDWDPKKYGGFDSPTVAYSVLVVAKVEKGKSKKLKSVKELLGITIMERSSFEKNPIDFLEAKGYKEVKKDLIIKLPKYSLFELENGRKRMLASAGELQKGNELALPSKYVNFLYLASHYEKLKGSPEDNEQKQLFVEQHKHYLDEIIEQISEFSKRVILADANLDKVLSAYNKHRDKPIREQAENIIHLFTLTNLGAPAAFKYFDTTIDRKRYTSTKEVLDATLIHQSITGLYETRIDLSQLGGDGGGGGGSGGGGSGGGGSGGGGSGGMNPLQLLQPLPAEVKGTKLLAHWNSGATITCIPESFLEDEQPIKQTLIKTIHGEKQQNVYYLTFKVKGRKVEAEVIASPYEYILLSPTDVPWLTQQPLQLTILVPLQEYQDRILNKTALPEEQKQQLKALFTKYDNLWQHWENQVGHRKIRPHNIATGDYPPRPQKQYPINPKAKPSIQIVIDDLLKQGVLTPQNSTMNTPVYPVPKPDGRWRMVLDYREVNKTIPLTAAQNQHSAGILATIVRQKYKTTLDLANGFWAHPITPDSYWLTAFTWQGKQYCWTRLPQGFLNSPALFNADAVDLLKEVPNVQVYVDDIYLSHDNPHEHIQQLEKVFQILLQAGYVVSLKKSEIGQRTVEFLGFNITKEGRGLTDTFKTKLLNVTPPKDLKQLQSILGKLNFARNFIPNFAELVQTLYNLIASSPGKYIEWTEDNTKQLNKVIEALNTASNLEERLPDQRLVIKVNTSPSAGYVRYYNESGKKPIMYLNYVFSKAELKFSMLEKLLTTMHKALIKAMDLAMGQEILVYSPIVSMTKIQKTPLPERKALPIRWITWMTYLEDPRIQFHYDKTLPELKHIPDVYTSSIPPLKHPSQYEGVFCTDGSAIKSPDPTKSNNAGMGIVHAIYNPEYKILNQWSIPLGHHTAQMAEIAAVEFACKKALKVPGPVLVITDSFYVAESANKELPYWKSNGFVNNKKEPLKHISKWKSIAECLSIKPDITIQHEKGHQPINTSIHTEGNALADKLATQGSYVVNAGKRTADGSEFEKRTADGSEFESPKKKAKVE

SEQ ID NO: 739 - protein, 2175 aa, synthetic construct
MPAAKRVKLDGGDKKYSIGLDIGTNSVGWAVITDEYKVPSKKFKVLGNTDRHSIKKNLIGALLFDSGETAEATRLKRTARRRYTRRKNRICYLQEIFSNEMAKVDDSFFHRLEESFLVEEDKKHERHPIFGNIVDEVAYHEKYPTIYHLRKKLVDSTDKADLRLIYLALAHMIKFRGHFLIEGDLNPDNSDVDKLFIQLVQTYNQLFEENPINASGVDAKAILSARLSKSRRLENLIAQLPGEKKNGLFGNLIALSLGLTPNFKSNFDLAEDAKLQLSKDTYDDDLDNLLAQIGDQYADLFLAAKNLSDAILLSDILRVNTEITKAPLSASMIKRYDEHHQDLTLLKALVRQQLPEKYKEIFFDQSKNGYAGYIDGGASQEEFYKFIKPILEKMDGTEELLVKLNREDLLRKQRTFDNGSIPHQIHLGELHAILRRQEDFYPFLKDNREKIEKILTFRIPYYVGPLARGNSRFAWMTRKSEETITPWNFEEVVDKGASAQSFIERMTNFDKNLPNEKVLPKHSLLYEYFTVYNELTKVKYVTEGMRKPAFLSGEQKKAIVDLLFKTNRKVTVKQLKEDYFKKIECFDSVEISGVEDRFNASLGTYHDLLKIIKDKDFLDNEENEDILEDIVLTLTLFEDREMIEERLKTYAHLFDDKVMKQLKRRRYTGWGRLSRKLINGIRDKQSGKTILDFLKSDGFANRNFMQLIHDDSLTFKEDIQKAQVSGQGDSLHEHIANLAGSPAIKKGILQTVKVVDELVKVMGRHKPENIVIEMARENQTTQKGQKNSRERMKRIEEGIKELGSQILKEHPVENTQLQNEKLYLYYLQNGRDMYVDQELDINRLSDYDVDHIVPQSFLKDDSIDNKVLTRSDKARGKSDNVPSEEVVKKMKNYWRQLLNAKLITQRKFDNLTKAERGGLSELDKAGFIKRQLVETRQITKHVAQILDSRMNTKYDENDKLIREVKVITLKSKLVSDFRKDFQFYKVREINNYHHAHDAYLNAVVGTALIKKYPKLESEFVYGDYKVYDVRKMIAKSEQEIGKATAKYFFYSNIMNFFKTEITLANGEIRKRPLIETNGETGEIVWDKGRDFATVRKVLSMPQVNIVKKTEVQTGGFSKESILPKRNSDKLIARKKDWDPKKYGGFDSPTVAYSVLVVAKVEKGKSKKLKSVKELLGITIMERSSFEKNPIDFLEAKGYKEVKKDLIIKLPKYSLFELENGRKRMLASAGELQKGNELALPSKYVNFLYLASHYEKLKGSPEDNEQKQLFVEQHKHYLDEIIEQISEFSKRVILADANLDKVLSAYNKHRDKPIREQAENIIHLFTLTNLGAPAAFKYFDTTIDRKRYTSTKEVLDATLIHQSITGLYETRIDLSQLGGDGGGGGGSGGGGSGGMNPLQLLQPLPAEVKGTKLLAHWNSGATITCIPESFLEDEQPIKQTLIKTIHGEKQQNVYYLTFKVKGRKVEAEVIASPYEYILLSPTDVPWLTQQPLQLTILVPLQEYQDRILNKTALPEEQKQQLKALFTKYDNLWQHWENQVGHRKIRPHNIATGDYPPRPQKQYPINPKAKPSIQIVIDDLLKQGVLTPQNSTMNTPVYPVPKPDGRWRMVLDYREVNKTIPLTAAQNQHSAGILATIVRQKYKTTLDLANGFWAHPITPDSYWLTAFTWQGKQYCWTRLPQGFLNSPALFNADAVDLLKEVPNVQVYVDDIYLSHDNPHEHIQQLEKVFQILLQAGYVVSLKKSEIGQRTVEFLGFNITKEGRGLTDTFKTKLLNVTPPKDLKQLQSILGKLNFARNFIPNFAELVQTLYNLIASSPGKYIEWTEDNTKQLNKVIEALNTASNLEERLPDQRLVIKVNTSPSAGYVRYYNESGKKPIMYLNYVFSKAELKFSMLEKLLTTMHKALIKAMDLAMGQEILVYSPIVSMTKIQKTPLPERKALPIRWITWMTYLEDPRIQFHYDKTLPELKHIPDVYTSSIPPLKHPSQYEGVFCTDGSAIKSPDPTKSNNAGMGIVHAIYNPEYKILNQWSIPLGHHTAQMAEIAAVEFACKKALKVPGPVLVITDSFYVAESANKELPYWKSNGFVNNKKEPLKHISKWKSIAECLSIKPDITIQHEKGHQPINTSIHTEGNALADKLATQGSYVVNAGKRTADGSEFEKRTADGSEFESPKKKAKVE

SEQ ID NO: 740 - protein, 2176 aa, synthetic construct
MPAAKRVKLDGGDKKYSIGLDIGTNSVGWAVITDEYKVPSKKFKVLGNTDRHSIKKNLIGALLFDSGETAEATRLKRTARRRYTRRKNRICYLQEIFSNEMAKVDDSFFHRLEESFLVEEDKKHERHPIFGNIVDEVAYHEKYPTIYHLRKKLVDSTDKADLRLIYLALAHMIKFRGHFLIEGDLNPDNSDVDKLFIQLVQTYNQLFEENPINASGVDAKAILSARLSKSRRLENLIAQLPGEKKNGLFGNLIALSLGLTPNFKSNFDLAEDAKLQLSKDTYDDDLDNLLAQIGDQYADLFLAAKNLSDAILLSDILRVNTEITKAPLSASMIKRYDEHHQDLTLLKALVRQQLPEKYKEIFFDQSKNGYAGYIDGGASQEEFYKFIKPILEKMDGTEELLVKLNREDLLRKQRTFDNGSIPHQIHLGELHAILRRQEDFYPFLKDNREKIEKILTFRIPYYVGPLARGNSRFAWMTRKSEETITPWNFEEVVDKGASAQSFIERMTNFDKNLPNEKVLPKHSLLYEYFTVYNELTKVKYVTEGMRKPAFLSGEQKKAIVDLLFKTNRKVTVKQLKEDYFKKIECFDSVEISGVEDRFNASLGTYHDLLKIIKDKDFLDNEENEDILEDIVLTLTLFEDREMIEERLKTYAHLFDDKVMKQLKRRRYTGWGRLSRKLINGIRDKQSGKTILDFLKSDGFANRNFMQLIHDDSLTFKEDIQKAQVSGQGDSLHEHIANLAGSPAIKKGILQTVKVVDELVKVMGRHKPENIVIEMARENQTTQKGQKNSRERMKRIEEGIKELGSQILKEHPVENTQLQNEKLYLYYLQNGRDMYVDQELDINRLSDYDVDHIVPQSFLKDDSIDNKVLTRSDKARGKSDNVPSEEVVKKMKNYWRQLLNAKLITQRKFDNLTKAERGGLSELDKAGFIKRQLVETRQITKHVAQILDSRMNTKYDENDKLIREVKVITLKSKLVSDFRKDFQFYKVREINNYHHAHDAYLNAVVGTALIKKYPKLESEFVYGDYKVYDVRKMIAKSEQEIGKATAKYFFYSNIMNFFKTEITLANGEIRKRPLIETNGETGEIVWDKGRDFATVRKVLSMPQVNIVKKTEVQTGGFSKESILPKRNSDKLIARKKDWDPKKYGGFDSPTVAYSVLVVAKVEKGKSKKLKSVKELLGITIMERSSFEKNPIDFLEAKGYKEVKKDLIIKLPKYSLFELENGRKRMLASAGELQKGNELALPSKYVNFLYLASHYEKLKGSPEDNEQKQLFVEQHKHYLDEIIEQISEFSKRVILADANLDKVLSAYNKHRDKPIREQAENIIHLFTLTNLGAPAAFKYFDTTIDRKRYTSTKEVLDATLIHQSITGLYETRIDLSQLGGDGGGGGEAAAKGGSGGMNPLQLLQPLPAEVKGTKLLAHWNSGATITCIPESFLEDEQPIKQTLIKTIHGEKQQNVYYLTFKVKGRKVEAEVIASPYEYILLSPTDVPWLTQQPLQLTILVPLQEYQDRILNKTALPEEQKQQLKALFTKYDNLWQHWENQVGHRKIRPHNIATGDYPPRPQKQYPINPKAKPSIQIVIDDLLKQGVLTPQNSTMNTPVYPVPKPDGRWRMVLDYREVNKTIPLTAAQNQHSAGILATIVRQKYKTTLDLANGFWAHPITPDSYWLTAFTWQGKQYCWTRLPQGFLNSPALFNADAVDLLKEVPNVQVYVDDIYLSHDNPHEHIQQLEKVFQILLQAGYVVSLKKSEIGQRTVEFLGFNITKEGRGLTDTFKTKLLNVTPPKDLKQLQSILGKLNFARNFIPNFAELVQTLYNLIASSPGKYIEWTEDNTKQLNKVIEALNTASNLEERLPDQRLVIKVNTSPSAGYVRYYNESGKKPIMYLNYVFSKAELKFSMLEKLLTTMHKALIKAMDLAMGQEILVYSPIVSMTKIQKTPLPERKALPIRWITWMTYLEDPRIQFHYDKTLPELKHIPDVYTSSIPPLKHPSQYEGVFCTDGSAIKSPDPTKSNNAGMGIVHAIYNPEYKILNQWSIPLGHHTAQMAEIAAVEFACKKALKVPGPVLVITDSFYVAESANKELPYWKSNGFVNNKKEPLKHISKWKSIAECLSIKPDITIQHEKGHQPINTSIHTEGNALADKLATQGSYVVNAGKRTADGSEFEKRTADGSEFESPKKKAKVE

SEQ ID NO: 741 - protein, 2012 aa, synthetic construct
MPAAKRVKLDGGDKKYSIGLDIGTNSVGWAVITDEYKVPSKKFKVLGNTDRHSIKKNLIGALLFDSGETAEATRLKRTARRRYTRRKNRICYLQEIFSNEMAKVDDSFFHRLEESFLVEEDKKHERHPIFGNIVDEVAYHEKYPTIYHLRKKLVDSTDKADLRLIYLALAHMIKFRGHFLIEGDLNPDNSDVDKLFIQLVQTYNQLFEENPINASGVDAKAILSARLSKSRRLENLIAQLPGEKKNGLFGNLIALSLGLTPNFKSNFDLAEDAKLQLSKDTYDDDLDNLLAQIGDQYADLFLAAKNLSDAILLSDILRVNTEITKAPLSASMIKRYDEHHQDLTLLKALVRQQLPEKYKEIFFDQSKNGYAGYIDGGASQEEFYKFIKPILEKMDGTEELLVKLNREDLLRKQRTFDNGSIPHQIHLGELHAILRRQEDFYPFLKDNREKIEKILTFRIPYYVGPLARGNSRFAWMTRKSEETITPWNFEEVVDKGASAQSFIERMTNFDKNLPNEKVLPKHSLLYEYFTVYNELTKVKYVTEGMRKPAFLSGEQKKAIVDLLFKTNRKVTVKQLKEDYFKKIECFDSVEISGVEDRFNASLGTYHDLLKIIKDKDFLDNEENEDILEDIVLTLTLFEDREMIEERLKTYAHLFDDKVMKQLKRRRYTGWGRLSRKLINGIRDKQSGKTILDFLKSDGFANRNFMQLIHDDSLTFKEDIQKAQVSGQGDSLHEHIANLAGSPAIKKGILQTVKVVDELVKVMGRHKPENIVIEMARENQTTQKGQKNSRERMKRIEEGIKELGSQILKEHPVENTQLQNEKLYLYYLQNGRDMYVDQELDINRLSDYDVDHIVPQSFLKDDSIDNKVLTRSDKARGKSDNVPSEEVVKKMKNYWRQLLNAKLITQRKFDNLTKAERGGLSELDKAGFIKRQLVETRQITKHVAQILDSRMNTKYDENDKLIREVKVITLKSKLVSDFRKDFQFYKVREINNYHHAHDAYLNAVVGTALIKKYPKLESEFVYGDYKVYDVRKMIAKSEQEIGKATAKYFFYSNIMNFFKTEITLANGEIRKRPLIETNGETGEIVWDKGRDFATVRKVLSMPQVNIVKKTEVQTGGFSKESILPKRNSDKLIARKKDWDPKKYGGFDSPTVAYSVLVVAKVEKGKSKKLKSVKELLGITIMERSSFEKNPIDFLEAKGYKEVKKDLIIKLPKYSLFELENGRKRMLASAGELQKGNELALPSKYVNFLYLASHYEKLKGSPEDNEQKQLFVEQHKHYLDEIIEQISEFSKRVILADANLDKVLSAYNKHRDKPIREQAENIIHLFTLTNLGAPAAFKYFDTTIDRKRYTSTKEVLDATLIHQSITGLYETRIDLSQLGGDGGPAPGGGGGPRSRAIDIPVPHADKISWKITDPVWVDQWPLTYEKTLAAIALVQEQLAAGHIEPTNSPWNTPIFIIKKKSGSWRLLQDLRAVNKVMVPMGALQPGLPSPVAIPLNYHKIVIDLKDCFFTIPLHPEDRPYFAFSVPQINFQSPMPRYQWKVLPQGMANSPTLCQKFVAAAIAPVRSQWPEAYILHYMDDILLACDSAEAAKACYAHIISCLTSYGLKIAPDKVQVSEPFSYLGFELHHQQVFTPRVCLKTDHLKTLNDFQKLLGDIQWLRPYLKLPTSALVPLNNILKGDPNPLSVRALTPEAKQSLALINKAIQNQSVQQISYNLPLVLLLLPTPHTPTAVFWQPNGTDPTKNGSPLLWLHLPASPSKVLLTYPSLLAMLIIKGRYTGRQLFGRDPHSIIIPYTQDQLTWLLQTSDEWAIALSSFTGDIDNHYPSDPVIQFAKLHQFIFPKITKCAPIPQATLVFTDGSSNGIAAYVIDNQPISIKSPYLSAQLVELYAILQVFTVLAHQPFNLYTDSAYIAQSVPLLETVPFIKSSTNATPLFSKLQQLILNRQHPFFIGHLRAHLNLPGPLAEGNALADAATQIFPIISDAGKRTADGSEFEKRTADGSEFESPKKKAKVE

SEQ ID NO: 742 - protein, 2012 aa, synthetic construct
MPAAKRVKLDGGDKKYSIGLDIGTNSVGWAVITDEYKVPSKKFKVLGNTDRHSIKKNLIGALLFDSGETAEATRLKRTARRRYTRRKNRICYLQEIFSNEMAKVDDSFFHRLEESFLVEEDKKHERHPIFGNIVDEVAYHEKYPTIYHLRKKLVDSTDKADLRLIYLALAHMIKFRGHFLIEGDLNPDNSDVDKLFIQLVQTYNQLFEENPINASGVDAKAILSARLSKSRRLENLIAQLPGEKKNGLFGNLIALSLGLTPNFKSNFDLAEDAKLQLSKDTYDDDLDNLLAQIGDQYADLFLAAKNLSDAILLSDILRVNTEITKAPLSASMIKRYDEHHQDLTLLKALVRQQLPEKYKEIFFDQSKNGYAGYIDGGASQEEFYKFIKPILEKMDGTEELLVKLNREDLLRKQRTFDNGSIPHQIHLGELHAILRRQEDFYPFLKDNREKIEKILTFRIPYYVGPLARGNSRFAWMTRKSEETITPWNFEEVVDKGASAQSFIERMTNFDKNLPNEKVLPKHSLLYEYFTVYNELTKVKYVTEGMRKPAFLSGEQKKAIVDLLFKTNRKVTVKQLKEDYFKKIECFDSVEISGVEDRFNASLGTYHDLLKIIKDKDFLDNEENEDILEDIVLTLTLFEDREMIEERLKTYAHLFDDKVMKQLKRRRYTGWGRLSRKLINGIRDKQSGKTILDFLKSDGFANRNFMQLIHDDSLTFKEDIQKAQVSGQGDSLHEHIANLAGSPAIKKGILQTVKVVDELVKVMGRHKPENIVIEMARENQTTQKGQKNSRERMKRIEEGIKELGSQILKEHPVENTQLQNEKLYLYYLQNGRDMYVDQELDINRLSDYDVDHIVPQSFLKDDSIDNKVLTRSDKARGKSDNVPSEEVVKKMKNYWRQLLNAKLITQRKFDNLTKAERGGLSELDKAGFIKRQLVETRQITKHVAQILDSRMNTKYDENDKLIREVKVITLKSKLVSDFRKDFQFYKVREINNYHHAHDAYLNAVVGTALIKKYPKLESEFVYGDYKVYDVRKMIAKSEQEIGKATAKYFFYSNIMNFFKTEITLANGEIRKRPLIETNGETGEIVWDKGRDFATVRKVLSMPQVNIVKKTEVQTGGFSKESILPKRNSDKLIARKKDWDPKKYGGFDSPTVAYSVLVVAKVEKGKSKKLKSVKELLGITIMERSSFEKNPIDFLEAKGYKEVKKDLIIKLPKYSLFELENGRKRMLASAGELQKGNELALPSKYVNFLYLASHYEKLKGSPEDNEQKQLFVEQHKHYLDEIIEQISEFSKRVILADANLDKVLSAYNKHRDKPIREQAENIIHLFTLTNLGAPAAFKYFDTTIDRKRYTSTKEVLDATLIHQSITGLYETRIDLSQLGGDGGGGGGGGGGPRSRAIDIPVPHADKISWKITDPVWVDQWPLTYEKTLAAIALVQEQLAAGHIEPTNSPWNTPIFIIKKKSGSWRLLQDLRAVNKVMVPMGALQPGLPSPVAIPLNYHKIVIDLKDCFFTIPLHPEDRPYFAFSVPQINFQSPMPRYQWKVLPQGMANSPTLCQKFVAAAIAPVRSQWPEAYILHYMDDILLACDSAEAAKACYAHIISCLTSYGLKIAPDKVQVSEPFSYLGFELHHQQVFTPRVCLKTDHLKTLNDFQKLLGDIQWLRPYLKLPTSALVPLNNILKPDPNPLSVRALTPEAKQSLALINKAIQNQSVQQISYNLPLVLLLLPTPHTPTAVFWQPNGTDPTKNGSPLLWLHLPASPSKVLLTYPSLLAMLIIKGRYTGRQLFGRDPHSIIIPYTQDQLTWLLQTSDEWAIALSSFTGDIDNHYPSDPVIQFAKLHQFIFPKITKCAPIPQATLVFTDGSSNGIAAYVIDNQPISIKSPYLSAQLVELYAILQVFTVLAHQPFNLYTDSAYIAQSVPLLETVPFIKSSTNATPLFSKLQQLILNRQHPFFIGHLRAHLNLPGPLAEGNALADAATQIFPIISDAGKRTADGSEFEKRTADGSEFESPKKKAKVE

SEQ ID NO: 743 - protein, 2021 aa, synthetic construct
MPAAKRVKLDGGDKKYSIGLDIGTNSVGWAVITDEYKVPSKKFKVLGNTDRHSIKKNLIGALLFDSGETAEATRLKRTARRRYTRRKNRICYLQEIFSNEMAKVDDSFFHRLEESFLVEEDKKHERHPIFGNIVDEVAYHEKYPTIYHLRKKLVDSTDKADLRLIYLALAHMIKFRGHFLIEGDLNPDNSDVDKLFIQLVQTYNQLFEENPINASGVDAKAILSARLSKSRRLENLIAQLPGEKKNGLFGNLIALSLGLTPNFKSNFDLAEDAKLQLSKDTYDDDLDNLLAQIGDQYADLFLAAKNLSDAILLSDILRVNTEITKAPLSASMIKRYDEHHQDLTLLKALVRQQLPEKYKEIFFDQSKNGYAGYIDGGASQEEFYKFIKPILEKMDGTEELLVKLNREDLLRKQRTFDNGSIPHQIHLGELHAILRRQEDFYPFLKDNREKIEKILTFRIPYYVGPLARGNSRFAWMTRKSEETITPWNFEEVVDKGASAQSFIERMTNFDKNLPNEKVLPKHSLLYEYFTVYNELTKVKYVTEGMRKPAFLSGEQKKAIVDLLFKTNRKVTVKQLKEDYFKKIECFDSVEISGVEDRFNASLGTYHDLLKIIKDKDFLDNEENEDILEDIVLTLTLFEDREMIEERLKTYAHLFDDKVMKQLKRRRYTGWGRLSRKLINGIRDKQSGKTILDFLKSDGFANRNFMQLIHDDSLTFKEDIQKAQVSGQGDSLHEHIANLAGSPAIKKGILQTVKVVDELVKVMGRHKPENIVIEMARENQTTQKGQKNSRERMKRIEEGIKELGSQILKEHPVENTQLQNEKLYLYYLQNGRDMYVDQELDINRLSDYDVDHIVPQSFLKDDSIDNKVLTRSDKARGKSDNVPSEEVVKKMKNYWRQLLNAKLITQRKFDNLTKAERGGLSELDKAGFIKRQLVETRQITKHVAQILDSRMNTKYDENDKLIREVKVITLKSKLVSDFRKDFQFYKVREINNYHHAHDAYLNAVVGTALIKKYPKLESEFVYGDYKVYDVRKMIAKSEQEIGKATAKYFFYSNIMNFFKTEITLANGEIRKRPLIETNGETGEIVWDKGRDFATVRKVLSMPQVNIVKKTEVQTGGFSKESILPKRNSDKLIARKKDWDPKKYGGFDSPTVAYSVLVVAKVEKGKSKKLKSVKELLGITIMERSSFEKNPIDFLEAKGYKEVKKDLIIKLPKYSLFELENGRKRMLASAGELQKGNELALPSKYVNFLYLASHYEKLKGSPEDNEQKQLFVEQHKHYLDEIIEQISEFSKRVILADANLDKVLSAYNKHRDKPIREQAENIIHLFTLTNLGAPAAFKYFDTTIDRKRYTSTKEVLDATLIHQSITGLYETRIDLSQLGGDGGGGSGGSGGSGGSGGSGGPRSRAIDIPVPHADKISWKITDPVWVDQWPLTYEKTLAAIALVQEQLAAGHIEPTNSPWNTPIFIIKKKSGSWRLLQDLRAVNKVMVPMGALQPGLPSPVAPPLNYHKIVIDLKDCFFTIPLHPEDRPYFAFSVPQINFQSPMPRYQWKVLPQGMANSPTLCQKFVAAAIAPVRSQWPEAYILHYMDDILLACDSAEAAKACYAHIISCLTSYGLKIAPDKVQVSEPFSYLGFELHHQQVFTPRVCLKTDHLKTLNDFQKLLGDIQWLRPYLKLPTSALVPLNNILKPDPNPLSVRALTPEAKQSLALINKAIQNQSVQQISYNLPLVLLLLPTPHTPTAVFWQPNGTDPTKNGSPLLWLHLPASPSKVLLTYPSLLAMLIIKGRYTGRQLFGRDPHSIIIPYTQDQLTWLLQTSDEWAIALSSFTGDIDNHYPSDPVIQFAKLHQFIFPKITKCAPIPQATLVFTDGSSNGIAAYVIDNQPISIKSPYLSAQLVELYAILQVFTVLAHQPFNLYTDSAYIAQSVPLLETVPFIKSSTNATPLFSKLQQLILNRQHPFFIGHLRAHLNLPGPLAEGNALADAATQIFPIISDAGKRTADGSEFEKRTADGSEFESPKKKAKVE

SEQ ID NO: 744 - protein, 2017 aa, synthetic construct
MPAAKRVKLDGGDKKYSIGLDIGTNSVGWAVITDEYKVPSKKFKVLGNTDRHSIKKNLIGALLFDSGETAEATRLKRTARRRYTRRKNRICYLQEIFSNEMAKVDDSFFHRLEESFLVEEDKKHERHPIFGNIVDEVAYHEKYPTIYHLRKKLVDSTDKADLRLIYLALAHMIKFRGHFLIEGDLNPDNSDVDKLFIQLVQTYNQLFEENPINASGVDAKAILSARLSKSRRLENLIAQLPGEKKNGLFGNLIALSLGLTPNFKSNFDLAEDAKLQLSKDTYDDDLDNLLAQIGDQYADLFLAAKNLSDAILLSDILRVNTEITKAPLSASMIKRYDEHHQDLTLLKALVRQQLPEKYKEIFFDQSKNGYAGYIDGGASQEEFYKFIKPILEKMDGTEELLVKLNREDLLRKQRTFDNGSIPHQIHLGELHAILRRQEDFYPFLKDNREKIEKILTFRIPYYVGPLARGNSRFAWMTRKSEETITPWNFEEVVDKGASAQSFIERMTNFDKNLPNEKVLPKHSLLYEYFTVYNELTKVKYVTEGMRKPAFLSGEQKKAIVDLLFKTNRKVTVKQLKEDYFKKIECFDSVEISGVEDRFNASLGTYHDLLKIIKDKDFLDNEENEDILEDIVLTLTLFEDREMIEERLKTYAHLFDDKVMKQLKRRRYTGWGRLSRKLINGIRDKQSGKTILDFLKSDGFANRNFMQLIHDDSLTFKEDIQKAQVSGQGDSLHEHIANLAGSPAIKKGILQTVKVVDELVKVMGRHKPENIVIEMARENQTTQKGQKNSRERMKRIEEGIKELGSQILKEHPVENTQLQNEKLYLYYLQNGRDMYVDQELDINRLSDYDVDHIVPQSFLKDDSIDNKVLTRSDKARGKSDNVPSEEVVKKMKNYWRQLLNAKLITQRKFDNLTKAERGGLSELDKAGFIKRQLVETRQITKHVAQILDSRMNTKYDENDKLIREVKVITLKSKLVSDFRKDFQFYKVREINNYHHAHDAYLNAVVGTALIKKYPKLESEFVYGDYKVYDVRKMIAKSEQEIGKATAKYFFYSNIMNFFKTEITLANGEIRKRPLIETNGETGEIVWDKGRDFATVRKVLSMPQVNIVKKTEVQTGGFSKESILPKRNSDKLIARKKDWDPKKYGGFDSPTVAYSVLVVAKVEKGKSKKLKSVKELLGITIMERSSFEKNPIDFLEAKGYKEVKKDLIIKLPKYSLFELENGRKRMLASAGELQKGNELALPSKYVNFLYLASHYEKLKGSPEDNEQKQLFVEQHKHYLDEIIEQISEFSKRVILADANLDKVLSAYNKHRDKPIREQAENIIHLFTLTNLGAPAAFKYFDTTIDRKRYTSTKEVLDATLIHQSITGLYETRIDLSQLGGDGGGSSPAPEAAAKGGPRSRAIDIPVPHADKISWKITDPVWVDQWPLTYEKTLAAIALVQEQLAAGHIEPTNSPWNTPIFIIKKKSGSWRLLQDLRAVNKVMVPMGALQPGLPSPVAPPLNYHKIVIDLKDCFFTIPLHPEDRPYFAFSVPQINFQSPMPRYQWKVLPQGMANSPTLCQKFVAAAIAPVRSQWPEAYILHYMDDILLACDSAEAAKACYAHIISCLTSYGLKIAPDKVQVSEPFSYLGFELHHQQVFTPRVCLKTDHLKTLNDFQKLLGDIQWLRPYLKLPTSALVPLNNILKPDPNPLSVRALTPEAKQSLALINKAIQNQSVQQISYNLPLVLLLLPTPHTPTAVFWQPNGTDPTKNGSPLLWLHLPASPSKVLLTYPSLLAMLIIKGRYTGRQLFGRDPHSIIIPYTQDQLTWLLQTSDEWAIALSSFTGDIDNHYPSDPVIQFAKLHQFIFPKITKCAPIPQATLVFTDGSSNGIAAYVIDNQPISIKSPYLSAQLVELYAILQVFTVLAHQPFNLYTDSAYIAQSVPLLETVPFIKSSTNATPLFSKLQQLILNRQHPFFIGHLRAHLNLPGPLAEGNALADAATQIFPIISDAGKRTADGSEFEKRTADGSEFESPKKKAKVE

SEQ ID NO: 745 - protein, 2032 aa, synthetic construct
MPAAKRVKLDGGDKKYSIGLDIGTNSVGWAVITDEYKVPSKKFKVLGNTDRHSIKKNLIGALLFDSGETAEATRLKRTARRRYTRRKNRICYLQEIFSNEMAKVDDSFFHRLEESFLVEEDKKHERHPIFGNIVDEVAYHEKYPTIYHLRKKLVDSTDKADLRLIYLALAHMIKFRGHFLIEGDLNPDNSDVDKLFIQLVQTYNQLFEENPINASGVDAKAILSARLSKSRRLENLIAQLPGEKKNGLFGNLIALSLGLTPNFKSNFDLAEDAKLQLSKDTYDDDLDNLLAQIGDQYADLFLAAKNLSDAILLSDILRVNTEITKAPLSASMIKRYDEHHQDLTLLKALVRQQLPEKYKEIFFDQSKNGYAGYIDGGASQEEFYKFIKPILEKMDGTEELLVKLNREDLLRKQRTFDNGSIPHQIHLGELHAILRRQEDFYPFLKDNREKIEKILTFRIPYYVGPLARGNSRFAWMTRKSEETITPWNFEEVVDKGASAQSFIERMTNFDKNLPNEKVLPKHSLLYEYFTVYNELTKVKYVTEGMRKPAFLSGEQKKAIVDLLFKTNRKVTVKQLKEDYFKKIECFDSVEISGVEDRFNASLGTYHDLLKIIKDKDFLDNEENEDILEDIVLTLTLFEDREMIEERLKTYAHLFDDKVMKQLKRRRYTGWGRLSRKLINGIRDKQSGKTILDFLKSDGFANRNFMQLIHDDSLTFKEDIQKAQVSGQGDSLHEHIANLAGSPAIKKGILQTVKVVDELVKVMGRHKPENIVIEMARENQTTQKGQKNSRERMKRIEEGIKELGSQILKEHPVENTQLQNEKLYLYYLQNGRDMYVDQELDINRLSDYDVDHIVPQSFLKDDSIDNKVLTRSDKARGKSDNVPSEEVVKKMKNYWRQLLNAKLITQRKFDNLTKAERGGLSELDKAGFIKRQLVETRQITKHVAQILDSRMNTKYDENDKLIREVKVITLKSKLVSDFRKDFQFYKVREINNYHHAHDAYLNAVVGTALIKKYPKLESEFVYGDYKVYDVRKMIAKSEQEIGKATAKYFFYSNIMNFFKTEITLANGEIRKRPLIETNGETGEIVWDKGRDFATVRKVLSMPQVNIVKKTEVQTGGFSKESILPKRNSDKLIARKKDWDPKKYGGFDSPTVAYSVLVVAKVEKGKSKKLKSVKELLGITIMERSSFEKNPIDFLEAKGYKEVKKDLIIKLPKYSLFELENGRKRMLASAGELQKGNELALPSKYVNFLYLASHYEKLKGSPEDNEQKQLFVEQHKHYLDEIIEQISEFSKRVILADANLDKVLSAYNKHRDKPIREQAENIIHLFTLTNLGAPAAFKYFDTTIDRKRYTSTKEVLDATLIHQSITGLYETRIDLSQLGGDGGSGGSSGGSSGSETPGTSESATPESSGGSSGGSSGGLATAVDILAPQRYADPITWKSDEPVWVDQWPLTQEKLAAAQQLVQEQLQAGHIIESNSPWNTPIFVIKKKSGKWRLLQDLRAVNATMVLMGALQPGLPSPVAIPQGYFKIVIDLKDCFFTIPLQPVDQKRFAFSLPSTNFKQPMKRYQWKVLPQGMANSPTLCQKYVAAAIEPVRKSWAQMYIIHYMDDILIAGKLGEQVLQCFAQLKQALTTTGLQIAPEKVQLQDPYTYLGFQINGPKITNQKAVIRRDKLQTLNDFQKLLGDINWLRPYLHLTTGDLKPLFDILKGDSNPNSPRSLSEAALASLQKVETAIAEQFVTQIDYTQPLTFLIFNTTLTPTGLFWQNNPVMWVHLPASPKKVLLPYYDAIADLIILGRDNSKKYFGLEPSTIIQPYSKSQIHWLMQNTETWPIACASYAGNIDNHYPPNKLIQFCKLHAVVFPRIISKTPLDNALLVFTDGSSTGIAAYTFEKTTVRFKTSHTSAQLVELQALIAVLSAFPHRALNVYTDSAYLAHSIPLLETVSHIKHISDTAKFFLQCQQLIYNRSIPFYLGHIRAHSGLPGPLSQGNHITDLATKVVATTLTTAGKRTADGSEFEKRTADGSEFESPKKKAKVE

SEQ ID NO: 746 - protein, 2045 aa, synthetic construct
MPAAKRVKLDGGDKKYSIGLDIGTNSVGWAVITDEYKVPSKKFKVLGNTDRHSIKKNLIGALLFDSGETAEATRLKRTARRRYTRRKNRICYLQEIFSNEMAKVDDSFFHRLEESFLVEEDKKHERHPIFGNIVDEVAYHEKYPTIYHLRKKLVDSTDKADLRLIYLALAHMIKFRGHFLIEGDLNPDNSDVDKLFIQLVQTYNQLFEENPINASGVDAKAILSARLSKSRRLENLIAQLPGEKKNGLFGNLIALSLGLTPNFKSNFDLAEDAKLQLSKDTYDDDLDNLLAQIGDQYADLFLAAKNLSDAILLSDILRVNTEITKAPLSASMIKRYDEHHQDLTLLKALVRQQLPEKYKEIFFDQSKNGYAGYIDGGASQEEFYKFIKPILEKMDGTEELLVKLNREDLLRKQRTFDNGSIPHQIHLGELHAILRRQEDFYPFLKDNREKIEKILTFRIPYYVGPLARGNSRFAWMTRKSEETITPWNFEEVVDKGASAQSFIERMTNFDKNLPNEKVLPKHSLLYEYFTVYNELTKVKYVTEGMRKPAFLSGEQKKAIVDLLFKTNRKVTVKQLKEDYFKKIECFDSVEISGVEDRFNASLGTYHDLLKIIKDKDFLDNEENEDILEDIVLTLTLFEDREMIEERLKTYAHLFDDKVMKQLKRRRYTGWGRLSRKLINGIRDKQSGKTILDFLKSDGFANRNFMQLIHDDSLTFKEDIQKAQVSGQGDSLHEHIANLAGSPAIKKGILQTVKVVDELVKVMGRHKPENIVIEMARENQTTQKGQKNSRERMKRIEEGIKELGSQILKEHPVENTQLQNEKLYLYYLQNGRDMYVDQELDINRLSDYDVDHIVPQSFLKDDSIDNKVLTRSDKARGKSDNVPSEEVVKKMKNYWRQLLNAKLITQRKFDNLTKAERGGLSELDKAGFIKRQLVETRQITKHVAQILDSRMNTKYDENDKLIREVKVITLKSKLVSDFRKDFQFYKVREINNYHHAHDAYLNAVVGTALIKKYPKLESEFVYGDYKVYDVRKMIAKSEQEIGKATAKYFFYSNIMNFFKTEITLANGEIRKRPLIETNGETGEIVWDKGRDFATVRKVLSMPQVNIVKKTEVQTGGFSKESILPKRNSDKLIARKKDWDPKKYGGFDSPTVAYSVLVVAKVEKGKSKKLKSVKELLGITIMERSSFEKNPIDFLEAKGYKEVKKDLIIKLPKYSLFELENGRKRMLASAGELQKGNELALPSKYVNFLYLASHYEKLKGSPEDNEQKQLFVEQHKHYLDEIIEQISEFSKRVILADANLDKVLSAYNKHRDKPIREQAENIIHLFTLTNLGAPAAFKYFDTTIDRKRYTSTKEVLDATLIHQSITGLYETRIDLSQLGGDGGAEAAAKEAAAKEAAAKEAAAKALEAEAAAKEAAAKEAAAKEAAAKAGGLATAVDILAPQRYADPITWKSDEPVWVDQWPLTQEKLAAAQQLVQEQLQAGHIIESNSPWNTPIFVIKKKSGKWRLLQDLRAVNATMVLMGALQPGLPSPVAIPQGYFKIVIDLKDCFFTIPLQPVDQKRFAFSLPSTNFKQPMKRYQWKVLPQGMANSPTLCQKYVAAAIEPVRKSWAQMYIIHYMDDILIAGKLGEQVLQCFAQLKQALTTTGLQIAPEKVQLQDPYTYLGFQINGPKITNQKAVIRRDKLQTLNDFQKLLGDINWLRPYLHLTTGDLKPLFDILKGDSNPNSPRSLSEAALASLQKVETAIAEQFVTQIDYTQPLTFLIFNTTLTPTGLFWQNNPVMWVHLPASPKKVLLPYYDAIADLIILGRDNSKKYFGLEPSTIIQPYSKSQIHWLMQNTETWPIACASYAGNIDNHYPPNKLIQFCKLHAVVFPRIISKTPLDNALLVFTDGSSTGIAAYTFEKTTVRFKTSHTSAQLVELQALIAVLSAFPHRALNVYTDSAYLAHSIPLLETVSHIKHISDTAKFFLQCQQLIYNRSIPFYLGHIRAHSGLPGPLSQGNHITDLATKVVATTLTTAGKRTADGSEFEKRTADGSEFESPKKKAKVE

SEQ ID NO: 747 - protein, 2029 aa, synthetic construct
MPAAKRVKLDGGDKKYSIGLDIGTNSVGWAVITDEYKVPSKKFKVLGNTDRHSIKKNLIGALLFDSGETAEATRLKRTARRRYTRRKNRICYLQEIFSNEMAKVDDSFFHRLEESFLVEEDKKHERHPIFGNIVDEVAYHEKYPTIYHLRKKLVDSTDKADLRLIYLALAHMIKFRGHFLIEGDLNPDNSDVDKLFIQLVQTYNQLFEENPINASGVDAKAILSARLSKSRRLENLIAQLPGEKKNGLFGNLIALSLGLTPNFKSNFDLAEDAKLQLSKDTYDDDLDNLLAQIGDQYADLFLAAKNLSDAILLSDILRVNTEITKAPLSASMIKRYDEHHQDLTLLKALVRQQLPEKYKEIFFDQSKNGYAGYIDGGASQEEFYKFIKPILEKMDGTEELLVKLNREDLLRKQRTFDNGSIPHQIHLGELHAILRRQEDFYPFLKDNREKIEKILTFRIPYYVGPLARGNSRFAWMTRKSEETITPWNFEEVVDKGASAQSFIERMTNFDKNLPNEKVLPKHSLLYEYFTVYNELTKVKYVTEGMRKPAFLSGEQKKAIVDLLFKTNRKVTVKQLKEDYFKKIECFDSVEISGVEDRFNASLGTYHDLLKIIKDKDFLDNEENEDILEDIVLTLTLFEDREMIEERLKTYAHLFDDKVMKQLKRRRYTGWGRLSRKLINGIRDKQSGKTILDFLKSDGFANRNFMQLIHDDSLTFKEDIQKAQVSGQGDSLHEHIANLAGSPAIKKGILQTVKVVDELVKVMGRHKPENIVIEMARENQTTQKGQKNSRERMKRIEEGIKELGSQILKEHPVENTQLQNEKLYLYYLQNGRDMYVDQELDINRLSDYDVDHIVPQSFLKDDSIDNKVLTRSDKARGKSDNVPSEEVVKKMKNYWRQLLNAKLITQRKFDNLTKAERGGLSELDKAGFIKRQLVETRQITKHVAQILDSRMNTKYDENDKLIREVKVITLKSKLVSDFRKDFQFYKVREINNYHHAHDAYLNAVVGTALIKKYPKLESEFVYGDYKVYDVRKMIAKSEQEIGKATAKYFFYSNIMNFFKTEITLANGEIRKRPLIETNGETGEIVWDKGRDFATVRKVLSMPQVNIVKKTEVQTGGFSKESILPKRNSDKLIARKKDWDPKKYGGFDSPTVAYSVLVVAKVEKGKSKKLKSVKELLGITIMERSSFEKNPIDFLEAKGYKEVKKDLIIKLPKYSLFELENGRKRMLASAGELQKGNELALPSKYVNFLYLASHYEKLKGSPEDNEQKQLFVEQHKHYLDEIIEQISEFSKRVILADANLDKVLSAYNKHRDKPIREQAENIIHLFTLTNLGAPAAFKYFDTTIDRKRYTSTKEVLDATLIHQSITGLYETRIDLSQLGGDGGEAAAKEAAAKEAAAKEAAAKEAAAKEAAAKGGLATAVDILAPQRYADPITWKSDEPVWVDQWPLTQEKLAAAQQLVQEQLQAGHIIESNSPWNTPIFVIKKKSGKWRLLQDLRAVNATMVLMGALQPGLPSPVAIPQGYFKIVIDLKDCFFTIPLQPVDQKRFAFSLPSTNFKQPMKRYQWKVLPQGMANSPTLCQKYVAAAIEPVRKSWAQMYIIHYMDDILIAGKLGEQVLQCFAQLKQALTTTGLQIAPEKVQLQDPYTYLGFQINGPKITNQKAVIRRDKLQTLNDFQKLLGDINWLRPYLHLTTGDLKPLFDILKGDSNPNSPRSLSEAALASLQKVETAIAEQFVTQIDYTQPLTFLIFNTTLTPTGLFWQNNPVMWVHLPASPKKVLLPYYDAIADLIILGRDNSKKYFGLEPSTIIQPYSKSQIHWLMQNTETWPIACASYAGNIDNHYPPNKLIQFCKLHAVVFPRIISKTPLDNALLVFTDGSSTGIAAYTFEKTTVRFKTSHTSAQLVELQALIAVLSAFPHRALNVYTDSAYLAHSIPLLETVSHIKHISDTAKFFLQCQQLIYNRSIPFYLGHIRAHSGLPGPLSQGNHITDLATKVVATTLTTAGKRTADGSEFEKRTADGSEFESPKKKAKVE

SEQ ID NO: 748 - protein, 2024 aa, synthetic construct
MPAAKRVKLDGGDKKYSIGLDIGTNSVGWAVITDEYKVPSKKFKVLGNTDRHSIKKNLIGALLFDSGETAEATRLKRTARRRYTRRKNRICYLQEIFSNEMAKVDDSFFHRLEESFLVEEDKKHERHPIFGNIVDEVAYHEKYPTIYHLRKKLVDSTDKADLRLIYLALAHMIKFRGHFLIEGDLNPDNSDVDKLFIQLVQTYNQLFEENPINASGVDAKAILSARLSKSRRLENLIAQLPGEKKNGLFGNLIALSLGLTPNFKSNFDLAEDAKLQLSKDTYDDDLDNLLAQIGDQYADLFLAAKNLSDAILLSDILRVNTEITKAPLSASMIKRYDEHHQDLTLLKALVRQQLPEKYKEIFFDQSKNGYAGYIDGGASQEEFYKFIKPILEKMDGTEELLVKLNREDLLRKQRTFDNGSIPHQIHLGELHAILRRQEDFYPFLKDNREKIEKILTFRIPYYVGPLARGNSRFAWMTRKSEETITPWNFEEVVDKGASAQSFIERMTNFDKNLPNEKVLPKHSLLYEYFTVYNELTKVKYVTEGMRKPAFLSGEQKKAIVDLLFKTNRKVTVKQLKEDYFKKIECFDSVEISGVEDRFNASLGTYHDLLKIIKDKDFLDNEENEDILEDIVLTLTLFEDREMIEERLKTYAHLFDDKVMKQLKRRRYTGWGRLSRKLINGIRDKQSGKTILDFLKSDGFANRNFMQLIHDDSLTFKEDIQKAQVSGQGDSLHEHIANLAGSPAIKKGILQTVKVVDELVKVMGRHKPENIVIEMARENQTTQKGQKNSRERMKRIEEGIKELGSQILKEHPVENTQLQNEKLYLYYLQNGRDMYVDQELDINRLSDYDVDHIVPQSFLKDDSIDNKVLTRSDKARGKSDNVPSEEVVKKMKNYWRQLLNAKLITQRKFDNLTKAERGGLSELDKAGFIKRQLVETRQITKHVAQILDSRMNTKYDENDKLIREVKVITLKSKLVSDFRKDFQFYKVREINNYHHAHDAYLNAVVGTALIKKYPKLESEFVYGDYKVYDVRKMIAKSEQEIGKATAKYFFYSNIMNFFKTEITLANGEIRKRPLIETNGETGEIVWDKGRDFATVRKVLSMPQVNIVKKTEVQTGGFSKESILPKRNSDKLIARKKDWDPKKYGGFDSPTVAYSVLVVAKVEKGKSKKLKSVKELLGITIMERSSFEKNPIDFLEAKGYKEVKKDLIIKLPKYSLFELENGRKRMLASAGELQKGNELALPSKYVNFLYLASHYEKLKGSPEDNEQKQLFVEQHKHYLDEIIEQISEFSKRVILADANLDKVLSAYNKHRDKPIREQAENIIHLFTLTNLGAPAAFKYFDTTIDRKRYTSTKEVLDATLIHQSITGLYETRIDLSQLGGDGGEAAAKEAAAKEAAAKEAAAKEAAAKGGLATAVDILAPQRYADPITWKSDEPVWVDQWPLTQEKLAAAQQLVQEQLQAGHIIESNSPWNTPIFVIKKKSGKWRLLQDLRAVNATMVLMGALQPGLPSPVAIPQGYFKIVIDLKDCFFTIPLQPVDQKRFAFSLPSTNFKQPMKRYQWKVLPQGMANSPTLCQKYVAAAIEPVRKSWAQMYIIHYMDDILIAGKLGEQVLQCFAQLKQALTTTGLQIAPEKVQLQDPYTYLGFQINGPKITNQKAVIRRDKLQTLNDFQKLLGDINWLRPYLHLTTGDLKPLFDILKGDSNPNSPRSLSEAALASLQKVETAIAEQFVTQIDYTQPLTFLIFNTTLTPTGLFWQNNPVMWVHLPASPKKVLLPYYDAIADLIILGRDNSKKYFGLEPSTIIQPYSKSQIHWLMQNTETWPIACASYAGNIDNHYPPNKLIQFCKLHAVVFPRIISKTPLDNALLVFTDGSSTGIAAYTFEKTTVRFKTSHTSAQLVELQALIAVLSAFPHRALNVYTDSAYLAHSIPLLETVSHIKHISDTAKFFLQCQQLIYNRSIPFYLGHIRAHSGLPGPLSQGNHITDLATKVVATTLTTAGKRTADGSEFEKRTADGSEFESPKKKAKVE

SEQ ID NO: 749 - protein, 2012 aa, synthetic construct
MPAAKRVKLDGGDKKYSIGLDIGTNSVGWAVITDEYKVPSKKFKVLGNTDRHSIKKNLIGALLFDSGETAEATRLKRTARRRYTRRKNRICYLQEIFSNEMAKVDDSFFHRLEESFLVEEDKKHERHPIFGNIVDEVAYHEKYPTIYHLRKKLVDSTDKADLRLIYLALAHMIKFRGHFLIEGDLNPDNSDVDKLFIQLVQTYNQLFEENPINASGVDAKAILSARLSKSRRLENLIAQLPGEKKNGLFGNLIALSLGLTPNFKSNFDLAEDAKLQLSKDTYDDDLDNLLAQIGDQYADLFLAAKNLSDAILLSDILRVNTEITKAPLSASMIKRYDEHHQDLTLLKALVRQQLPEKYKEIFFDQSKNGYAGYIDGGASQEEFYKFIKPILEKMDGTEELLVKLNREDLLRKQRTFDNGSIPHQIHLGELHAILRRQEDFYPFLKDNREKIEKILTFRIPYYVGPLARGNSRFAWMTRKSEETITPWNFEEVVDKGASAQSFIERMTNFDKNLPNEKVLPKHSLLYEYFTVYNELTKVKYVTEGMRKPAFLSGEQKKAIVDLLFKTNRKVTVKQLKEDYFKKIECFDSVEISGVEDRFNASLGTYHDLLKIIKDKDFLDNEENEDILEDIVLTLTLFEDREMIEERLKTYAHLFDDKVMKQLKRRRYTGWGRLSRKLINGIRDKQSGKTILDFLKSDGFANRNFMQLIHDDSLTFKEDIQKAQVSGQGDSLHEHIANLAGSPAIKKGILQTVKVVDELVKVMGRHKPENIVIEMARENQTTQKGQKNSRERMKRIEEGIKELGSQILKEHPVENTQLQNEKLYLYYLQNGRDMYVDQELDINRLSDYDVDHIVPQSFLKDDSIDNKVLTRSDKARGKSDNVPSEEVVKKMKNYWRQLLNAKLITQRKFDNLTKAERGGLSELDKAGFIKRQLVETRQITKHVAQILDSRMNTKYDENDKLIREVKVITLKSKLVSDFRKDFQFYKVREINNYHHAHDAYLNAVVGTALIKKYPKLESEFVYGDYKVYDVRKMIAKSEQEIGKATAKYFFYSNIMNFFKTEITLANGEIRKRPLIETNGETGEIVWDKGRDFATVRKVLSMPQVNIVKKTEVQTGGFSKESILPKRNSDKLIARKKDWDPKKYGGFDSPTVAYSVLVVAKVEKGKSKKLKSVKELLGITIMERSSFEKNPIDFLEAKGYKEVKKDLIIKLPKYSLFELENGRKRMLASAGELQKGNELALPSKYVNFLYLASHYEKLKGSPEDNEQKQLFVEQHKHYLDEIIEQISEFSKRVILADANLDKVLSAYNKHRDKPIREQAENIIHLFTLTNLGAPAAFKYFDTTIDRKRYTSTKEVLDATLIHQSITGLYETRIDLSQLGGDGGPAPAPAPAPAPAPGGLATAVDILAPQRYADPITWKSDEPVWVDQWPLTQEKLAAAQQLVQEQLQAGHIIESNSPWNTPIFVIKKKSGKWRLLQDLRAVNATMVLMGALQPGLPSPVAIPQGYFKIVIDLKDCFFTIPLQPVDQKRFAFSLPSTNFKQPMKRYQWKVLPQGMANSPTLCQKYVAAAIEPVRKSWAQMYIIHYMDDILIAGKLGEQVLQCFAQLKQALTTTGLQIAPEKVQLQDPYTYLGFQINGPKITNQKAVIRRDKLQTLNDFQKLLGDINWLRPYLHLTTGDLKPLFDILKGDSNPNSPRSLSEAALASLQKVETAIAEQFVTQIDYTQPLTFLIFNTTLTPTGLFWQNNPVMWVHLPASPKKVLLPYYDAIADLIILGRDNSKKYFGLEPSTIIQPYSKSQIHWLMQNTETWPIACASYAGNIDNHYPPNKLIQFCKLHAVVFPRIISKTPLDNALLVFTDGSSTGIAAYTFEKTTVRFKTSHTSAQLVELQALIAVLSAFPHRALNVYTDSAYLAHSIPLLETVSHIKHISDTAKFFLQCQQLIYNRSIPFYLGHIRAHSGLPGPLSQGNHITDLATKVVATTLTTAGKRTADGSEFEKRTADGSEFESPKKKAKVE

SEQ ID NO: 750 - protein, 2010 aa, synthetic construct
MPAAKRVKLDGGDKKYSIGLDIGTNSVGWAVITDEYKVPSKKFKVLGNTDRHSIKKNLIGALLFDSGETAEATRLKRTARRRYTRRKNRICYLQEIFSNEMAKVDDSFFHRLEESFLVEEDKKHERHPIFGNIVDEVAYHEKYPTIYHLRKKLVDSTDKADLRLIYLALAHMIKFRGHFLIEGDLNPDNSDVDKLFIQLVQTYNQLFEENPINASGVDAKAILSARLSKSRRLENLIAQLPGEKKNGLFGNLIALSLGLTPNFKSNFDLAEDAKLQLSKDTYDDDLDNLLAQIGDQYADLFLAAKNLSDAILLSDILRVNTEITKAPLSASMIKRYDEHHQDLTLLKALVRQQLPEKYKEIFFDQSKNGYAGYIDGGASQEEFYKFIKPILEKMDGTEELLVKLNREDLLRKQRTFDNGSIPHQIHLGELHAILRRQEDFYPFLKDNREKIEKILTFRIPYYVGPLARGNSRFAWMTRKSEETITPWNFEEVVDKGASAQSFIERMTNFDKNLPNEKVLPKHSLLYEYFTVYNELTKVKYVTEGMRKPAFLSGEQKKAIVDLLFKTNRKVTVKQLKEDYFKKIECFDSVEISGVEDRFNASLGTYHDLLKIIKDKDFLDNEENEDILEDIVLTLTLFEDREMIEERLKTYAHLFDDKVMKQLKRRRYTGWGRLSRKLINGIRDKQSGKTILDFLKSDGFANRNFMQLIHDDSLTFKEDIQKAQVSGQGDSLHEHIANLAGSPAIKKGILQTVKVVDELVKVMGRHKPENIVIEMARENQTTQKGQKNSRERMKRIEEGIKELGSQILKEHPVENTQLQNEKLYLYYLQNGRDMYVDQELDINRLSDYDVDHIVPQSFLKDDSIDNKVLTRSDKARGKSDNVPSEEVVKKMKNYWRQLLNAKLITQRKFDNLTKAERGGLSELDKAGFIKRQLVETRQITKHVAQILDSRMNTKYDENDKLIREVKVITLKSKLVSDFRKDFQFYKVREINNYHHAHDAYLNAVVGTALIKKYPKLESEFVYGDYKVYDVRKMIAKSEQEIGKATAKYFFYSNIMNFFKTEITLANGEIRKRPLIETNGETGEIVWDKGRDFATVRKVLSMPQVNIVKKTEVQTGGFSKESILPKRNSDKLIARKKDWDPKKYGGFDSPTVAYSVLVVAKVEKGKSKKLKSVKELLGITIMERSSFEKNPIDFLEAKGYKEVKKDLIIKLPKYSLFELENGRKRMLASAGELQKGNELALPSKYVNFLYLASHYEKLKGSPEDNEQKQLFVEQHKHYLDEIIEQISEFSKRVILADANLDKVLSAYNKHRDKPIREQAENIIHLFTLTNLGAPAAFKYFDTTIDRKRYTSTKEVLDATLIHQSITGLYETRIDLSQLGGDGGPAPAPAPAPAPGGLATAVDILAPQRYADPITWKSDEPVWVDQWPLTQEKLAAAQQLVQEQLQAGHIIESNSPWNTPIFVIKKKSGKWRLLQDLRAVNATMVLMGALQPGLPSPVAIPQGYFKIVIDLKDCFFTIPLQPVDQKRFAFSLPSTNFKQPMKRYQWKVLPQGMANSPTLCQKYVAAAIEPVRKSWAQMYIIHYMDDILIAGKLGEQVLQCFAQLKQALTTTGLQIAPEKVQLQDPYTYLGFQINGPKITNQKAVIRRDKLQTLNDFQKLLGDINWLRPYLHLTTGDLKPLFDILKGDSNPNSPRSLSEAALASLQKVETAIAEQFVTQIDYTQPLTFLIFNTTLTPTGLFWQNNPVMWVHLPASPKKVLLPYYDAIADLIILGRDNSKKYFGLEPSTIIQPYSKSQIHWLMQNTETWPIACASYAGNIDNHYPPNKLIQFCKLHAVVFPRIISKTPLDNALLVFTDGSSTGIAAYTFEKTTVRFKTSHTSAQLVELQALIAVLSAFPHRALNVYTDSAYLAHSIPLLETVSHIKHISDTAKFFLQCQQLIYNRSIPFYLGHIRAHSGLPGPLSQGNHITDLATKVVATTLTTAGKRTADGSEFEKRTADGSEFESPKKKAKVE

SEQ ID NO: 751 - protein, 2014 aa, synthetic construct
MPAAKRVKLDGGDKKYSIGLDIGTNSVGWAVITDEYKVPSKKFKVLGNTDRHSIKKNLIGALLFDSGETAEATRLKRTARRRYTRRKNRICYLQEIFSNEMAKVDDSFFHRLEESFLVEEDKKHERHPIFGNIVDEVAYHEKYPTIYHLRKKLVDSTDKADLRLIYLALAHMIKFRGHFLIEGDLNPDNSDVDKLFIQLVQTYNQLFEENPINASGVDAKAILSARLSKSRRLENLIAQLPGEKKNGLFGNLIALSLGLTPNFKSNFDLAEDAKLQLSKDTYDDDLDNLLAQIGDQYADLFLAAKNLSDAILLSDILRVNTEITKAPLSASMIKRYDEHHQDLTLLKALVRQQLPEKYKEIFFDQSKNGYAGYIDGGASQEEFYKFIKPILEKMDGTEELLVKLNREDLLRKQRTFDNGSIPHQIHLGELHAILRRQEDFYPFLKDNREKIEKILTFRIPYYVGPLARGNSRFAWMTRKSEETITPWNFEEVVDKGASAQSFIERMTNFDKNLPNEKVLPKHSLLYEYFTVYNELTKVKYVTEGMRKPAFLSGEQKKAIVDLLFKTNRKVTVKQLKEDYFKKIECFDSVEISGVEDRFNASLGTYHDLLKIIKDKDFLDNEENEDILEDIVLTLTLFEDREMIEERLKTYAHLFDDKVMKQLKRRRYTGWGRLSRKLINGIRDKQSGKTILDFLKSDGFANRNFMQLIHDDSLTFKEDIQKAQVSGQGDSLHEHIANLAGSPAIKKGILQTVKVVDELVKVMGRHKPENIVIEMARENQTTQKGQKNSRERMKRIEEGIKELGSQILKEHPVENTQLQNEKLYLYYLQNGRDMYVDQELDINRLSDYDVDHIVPQSFLKDDSIDNKVLTRSDKARGKSDNVPSEEVVKKMKNYWRQLLNAKLITQRKFDNLTKAERGGLSELDKAGFIKRQLVETRQITKHVAQILDSRMNTKYDENDKLIREVKVITLKSKLVSDFRKDFQFYKVREINNYHHAHDAYLNAVVGTALIKKYPKLESEFVYGDYKVYDVRKMIAKSEQEIGKATAKYFFYSNIMNFFKTEITLANGEIRKRPLIETNGETGEIVWDKGRDFATVRKVLSMPQVNIVKKTEVQTGGFSKESILPKRNSDKLIARKKDWDPKKYGGFDSPTVAYSVLVVAKVEKGKSKKLKSVKELLGITIMERSSFEKNPIDFLEAKGYKEVKKDLIIKLPKYSLFELENGRKRMLASAGELQKGNELALPSKYVNFLYLASHYEKLKGSPEDNEQKQLFVEQHKHYLDEIIEQISEFSKRVILADANLDKVLSAYNKHRDKPIREQAENIIHLFTLTNLGAPAAFKYFDTTIDRKRYTSTKEVLDATLIHQSITGLYETRIDLSQLGGDGGGSSGSSGSSGSSGSSGGLATAVDILAPQRYADPITWKSDEPVWVDQWPLTQEKLAAAQQLVQEQLQAGHIIESNSPWNTPIFVIKKKSGKWRLLQDLRAVNATMVLMGALQPGLPSPVAIPQGYFKIVIDLKDCFFTIPLQPVDQKRFAFSLPSTNFKQPMKRYQWKVLPQGMANSPTLCQKYVAAAIEPVRKSWAQMYIIHYMDDILIAGKLGEQVLQCFAQLKQALTTTGLQIAPEKVQLQDPYTYLGFQINGPKITNQKAVIRRDKLQTLNDFQKLLGDINWLRPYLHLTTGDLKPLFDILKGDSNPNSPRSLSEAALASLQKVETAIAEQFVTQIDYTQPLTFLIFNTTLTPTGLFWQNNPVMWVHLPASPKKVLLPYYDAIADLIILGRDNSKKYFGLEPSTIIQPYSKSQIHWLMQNTETWPIACASYAGNIDNHYPPNKLIQFCKLHAVVFPRIISKTPLDNALLVFTDGSSTGIAAYTFEKTTVRFKTSHTSAQLVELQALIAVLSAFPHRALNVYTDSAYLAHSIPLLETVSHIKHISDTAKFFLQCQQLIYNRSIPFYLGHIRAHSGLPGPLSQGNHITDLATKVVATTLTTAGKRTADGSEFEKRTADGSEFESPKKKAKVE

SEQ ID NO: 752 - protein, 2015 aa, synthetic construct
MPAAKRVKLDGGDKKYSIGLDIGTNSVGWAVITDEYKVPSKKFKVLGNTDRHSIKKNLIGALLFDSGETAEATRLKRTARRRYTRRKNRICYLQEIFSNEMAKVDDSFFHRLEESFLVEEDKKHERHPIFGNIVDEVAYHEKYPTIYHLRKKLVDSTDKADLRLIYLALAHMIKFRGHFLIEGDLNPDNSDVDKLFIQLVQTYNQLFEENPINASGVDAKAILSARLSKSRRLENLIAQLPGEKKNGLFGNLIALSLGLTPNFKSNFDLAEDAKLQLSKDTYDDDLDNLLAQIGDQYADLFLAAKNLSDAILLSDILRVNTEITKAPLSASMIKRYDEHHQDLTLLKALVRQQLPEKYKEIFFDQSKNGYAGYIDGGASQEEFYKFIKPILEKMDGTEELLVKLNREDLLRKQRTFDNGSIPHQIHLGELHAILRRQEDFYPFLKDNREKIEKILTFRIPYYVGPLARGNSRFAWMTRKSEETITPWNFEEVVDKGASAQSFIERMTNFDKNLPNEKVLPKHSLLYEYFTVYNELTKVKYVTEGMRKPAFLSGEQKKAIVDLLFKTNRKVTVKQLKEDYFKKIECFDSVEISGVEDRFNASLGTYHDLLKIIKDKDFLDNEENEDILEDIVLTLTLFEDREMIEERLKTYAHLFDDKVMKQLKRRRYTGWGRLSRKLINGIRDKQSGKTILDFLKSDGFANRNFMQLIHDDSLTFKEDIQKAQVSGQGDSLHEHIANLAGSPAIKKGILQTVKVVDELVKVMGRHKPENIVIEMARENQTTQKGQKNSRERMKRIEEGIKELGSQILKEHPVENTQLQNEKLYLYYLQNGRDMYVDQELDINRLSDYDVDHIVPQSFLKDDSIDNKVLTRSDKARGKSDNVPSEEVVKKMKNYWRQLLNAKLITQRKFDNLTKAERGGLSELDKAGFIKRQLVETRQITKHVAQILDSRMNTKYDENDKLIREVKVITLKSKLVSDFRKDFQFYKVREINNYHHAHDAYLNAVVGTALIKKYPKLESEFVYGDYKVYDVRKMIAKSEQEIGKATAKYFFYSNIMNFFKTEITLANGEIRKRPLIETNGETGEIVWDKGRDFATVRKVLSMPQVNIVKKTEVQTGGFSKESILPKRNSDKLIARKKDWDPKKYGGFDSPTVAYSVLVVAKVEKGKSKKLKSVKELLGITIMERSSFEKNPIDFLEAKGYKEVKKDLIIKLPKYSLFELENGRKRMLASAGELQKGNELALPSKYVNFLYLASHYEKLKGSPEDNEQKQLFVEQHKHYLDEIIEQISEFSKRVILADANLDKVLSAYNKHRDKPIREQAENIIHLFTLTNLGAPAAFKYFDTTIDRKRYTSTKEVLDATLIHQSITGLYETRIDLSQLGGDGGSGSETPGTSESATPESGGLATAVDILAPQRYADPITWKSDEPVWVDQWPLTQEKLAAAQQLVQEQLQAGHIIESNSPWNTPIFVIKKKSGKWRLLQDLRAVNATMVLMGALQPGLPSPVAIPQGYFKIVIDLKDCFFTIPLQPVDQKRFAFSLPSTNFKQPMKRYQWKVLPQGMANSPTLCQKYVAAAIEPVRKSWAQMYIIHYMDDILIAGKLGEQVLQCFAQLKQALTTTGLQIAPEKVQLQDPYTYLGFQINGPKITNQKAVIRRDKLQTLNDFQKLLGDINWLRPYLHLTTGDLKPLFDILKGDSNPNSPRSLSEAALASLQKVETAIAEQFVTQIDYTQPLTFLIFNTTLTPTGLFWQNNPVMWVHLPASPKKVLLPYYDAIADLIILGRDNSKKYFGLEPSTIIQPYSKSQIHWLMQNTETWPIACASYAGNIDNHYPPNKLIQFCKLHAVVFPRIISKTPLDNALLVFTDGSSTGIAAYTFEKTTVRFKTSHTSAQLVELQALIAVLSAFPHRALNVYTDSAYLAHSIPLLETVSHIKHISDTAKFFLQCQQLIYNRSIPFYLGHIRAHSGLPGPLSQGNHITDLATKVVATTLTTAGKRTADGSEFEKRTADGSEFESPKKKAKVE

SEQ ID NO: 753 - protein, 2010 aa, synthetic construct
MPAAKRVKLDGGDKKYSIGLDIGTNSVGWAVITDEYKVPSKKFKVLGNTDRHSIKKNLIGALLFDSGETAEATRLKRTARRRYTRRKNRICYLQEIFSNEMAKVDDSFFHRLEESFLVEEDKKHERHPIFGNIVDEVAYHEKYPTIYHLRKKLVDSTDKADLRLIYLALAHMIKFRGHFLIEGDLNPDNSDVDKLFIQLVQTYNQLFEENPINASGVDAKAILSARLSKSRRLENLIAQLPGEKKNGLFGNLIALSLGLTPNFKSNFDLAEDAKLQLSKDTYDDDLDNLLAQIGDQYADLFLAAKNLSDAILLSDILRVNTEITKAPLSASMIKRYDEHHQDLTLLKALVRQQLPEKYKEIFFDQSKNGYAGYIDGGASQEEFYKFIKPILEKMDGTEELLVKLNREDLLRKQRTFDNGSIPHQIHLGELHAILRRQEDFYPFLKDNREKIEKILTFRIPYYVGPLARGNSRFAWMTRKSEETITPWNFEEVVDKGASAQSFIERMTNFDKNLPNEKVLPKHSLLYEYFTVYNELTKVKYVTEGMRKPAFLSGEQKKAIVDLLFKTNRKVTVKQLKEDYFKKIECFDSVEISGVEDRFNASLGTYHDLLKIIKDKDFLDNEENEDILEDIVLTLTLFEDREMIEERLKTYAHLFDDKVMKQLKRRRYTGWGRLSRKLINGIRDKQSGKTILDFLKSDGFANRNFMQLIHDDSLTFKEDIQKAQVSGQGDSLHEHIANLAGSPAIKKGILQTVKVVDELVKVMGRHKPENIVIEMARENQTTQKGQKNSRERMKRIEEGIKELGSQILKEHPVENTQLQNEKLYLYYLQNGRDMYVDQELDINRLSDYDVDHIVPQSFLKDDSIDNKVLTRSDKARGKSDNVPSEEVVKKMKNYWRQLLNAKLITQRKFDNLTKAERGGLSELDKAGFIKRQLVETRQITKHVAQILDSRMNTKYDENDKLIREVKVITLKSKLVSDFRKDFQFYKVREINNYHHAHDAYLNAVVGTALIKKYPKLESEFVYGDYKVYDVRKMIAKSEQEIGKATAKYFFYSNIMNFFKTEITLANGEIRKRPLIETNGETGEIVWDKGRDFATVRKVLSMPQVNIVKKTEVQTGGFSKESILPKRNSDKLIARKKDWDPKKYGGFDSPTVAYSVLVVAKVEKGKSKKLKSVKELLGITIMERSSFEKNPIDFLEAKGYKEVKKDLIIKLPKYSLFELENGRKRMLASAGELQKGNELALPSKYVNFLYLASHYEKLKGSPEDNEQKQLFVEQHKHYLDEIIEQISEFSKRVILADANLDKVLSAYNKHRDKPIREQAENIIHLFTLTNLGAPAAFKYFDTTIDRKRYTSTKEVLDATLIHQSITGLYETRIDLSQLGGDGGGSSPAPEAAAKGGLATAVDILAPQRYADPITWKSDEPVWVDQWPLTQEKLAAAQQLVQEQLQAGHIIESNSPWNTPIFVIKKKSGKWRLLQDLRAVNATMVLMGALQPGLPSPVAIPQGYFKIVIDLKDCFFTIPLQPVDQKRFAFSLPSTNFKQPMKRYQWKVLPQGMANSPTLCQKYVAAAIEPVRKSWAQMYIIHYMDDILIAGKLGEQVLQCFAQLKQALTTTGLQIAPEKVQLQDPYTYLGFQINGPKITNQKAVIRRDKLQTLNDFQKLLGDINWLRPYLHLTTGDLKPLFDILKGDSNPNSPRSLSEAALASLQKVETAIAEQFVTQIDYTQPLTFLIFNTTLTPTGLFWQNNPVMWVHLPASPKKVLLPYYDAIADLIILGRDNSKKYFGLEPSTIIQPYSKSQIHWLMQNTETWPIACASYAGNIDNHYPPNKLIQFCKLHAVVFPRIISKTPLDNALLVFTDGSSTGIAAYTFEKTTVRFKTSHTSAQLVELQALIAVLSAFPHRALNVYTDSAYLAHSIPLLETVSHIKHISDTAKFFLQCQQLIYNRSIPFYLGHIRAHSGLPGPLSQGNHITDLATKVVATTLTTAGKRTADGSEFEKRTADGSEFESPKKKAKVE

SEQ ID NO: 754 - protein, 2010 aa, synthetic construct
MPAAKRVKLDGGDKKYSIGLDIGTNSVGWAVITDEYKVPSKKFKVLGNTDRHSIKKNLIGALLFDSGETAEATRLKRTARRRYTRRKNRICYLQEIFSNEMAKVDDSFFHRLEESFLVEEDKKHERHPIFGNIVDEVAYHEKYPTIYHLRKKLVDSTDKADLRLIYLALAHMIKFRGHFLIEGDLNPDNSDVDKLFIQLVQTYNQLFEENPINASGVDAKAILSARLSKSRRLENLIAQLPGEKKNGLFGNLIALSLGLTPNFKSNFDLAEDAKLQLSKDTYDDDLDNLLAQIGDQYADLFLAAKNLSDAILLSDILRVNTEITKAPLSASMIKRYDEHHQDLTLLKALVRQQLPEKYKEIFFDQSKNGYAGYIDGGASQEEFYKFIKPILEKMDGTEELLVKLNREDLLRKQRTFDNGSIPHQIHLGELHAILRRQEDFYPFLKDNREKIEKILTFRIPYYVGPLARGNSRFAWMTRKSEETITPWNFEEVVDKGASAQSFIERMTNFDKNLPNEKVLPKHSLLYEYFTVYNELTKVKYVTEGMRKPAFLSGEQKKAIVDLLFKTNRKVTVKQLKEDYFKKIECFDSVEISGVEDRFNASLGTYHDLLKIIKDKDFLDNEENEDILEDIVLTLTLFEDREMIEERLKTYAHLFDDKVMKQLKRRRYTGWGRLSRKLINGIRDKQSGKTILDFLKSDGFANRNFMQLIHDDSLTFKEDIQKAQVSGQGDSLHEHIANLAGSPAIKKGILQTVKVVDELVKVMGRHKPENIVIEMARENQTTQKGQKNSRERMKRIEEGIKELGSQILKEHPVENTQLQNEKLYLYYLQNGRDMYVDQELDINRLSDYDVDHIVPQSFLKDDSIDNKVLTRSDKARGKSDNVPSEEVVKKMKNYWRQLLNAKLITQRKFDNLTKAERGGLSELDKAGFIKRQLVETRQITKHVAQILDSRMNTKYDENDKLIREVKVITLKSKLVSDFRKDFQFYKVREINNYHHAHDAYLNAVVGTALIKKYPKLESEFVYGDYKVYDVRKMIAKSEQEIGKATAKYFFYSNIMNFFKTEITLANGEIRKRPLIETNGETGEIVWDKGRDFATVRKVLSMPQVNIVKKTEVQTGGFSKESILPKRNSDKLIARKKDWDPKKYGGFDSPTVAYSVLVVAKVEKGKSKKLKSVKELLGITIMERSSFEKNPIDFLEAKGYKEVKKDLIIKLPKYSLFELENGRKRMLASAGELQKGNELALPSKYVNFLYLASHYEKLKGSPEDNEQKQLFVEQHKHYLDEIIEQISEFSKRVILADANLDKVLSAYNKHRDKPIREQAENIIHLFTLTNLGAPAAFKYFDTTIDRKRYTSTKEVLDATLIHQSITGLYETRIDLSQLGGDGGGSSGGSEAAAKGGLATAVDILAPQRYADPITWKSDEPVWVDQWPLTQEKLAAAQQLVQEQLQAGHIIESNSPWNTPIFVIKKKSGKWRLLQDLRAVNATMVLMGALQPGLPSPVAIPQGYFKIVIDLKDCFFTIPLQPVDQKRFAFSLPSTNFKQPMKRYQWKVLPQGMANSPTLCQKYVAAAIEPVRKSWAQMYIIHYMDDILIAGKLGEQVLQCFAQLKQALTTTGLQIAPEKVQLQDPYTYLGFQINGPKITNQKAVIRRDKLQTLNDFQKLLGDINWLRPYLHLTTGDLKPLFDILKGDSNPNSPRSLSEAALASLQKVETAIAEQFVTQIDYTQPLTFLIFNTTLTPTGLFWQNNPVMWVHLPASPKKVLLPYYDAIADLIILGRDNSKKYFGLEPSTIIQPYSKSQIHWLMQNTETWPIACASYAGNIDNHYPPNKLIQFCKLHAVVFPRIISKTPLDNALLVFTDGSSTGIAAYTFEKTTVRFKTSHTSAQLVELQALIAVLSAFPHRALNVYTDSAYLAHSIPLLETVSHIKHISDTAKFFLQCQQLIYNRSIPFYLGHIRAHSGLPGPLSQGNHITDLATKVVATTLTTAGKRTADGSEFEKRTADGSEFESPKKKAKVE

SEQ ID NO: 755 - protein, 2008 aa, synthetic construct
MPAAKRVKLDGGDKKYSIGLDIGTNSVGWAVITDEYKVPSKKFKVLGNTDRHSIKKNLIGALLFDSGETAEATRLKRTARRRYTRRKNRICYLQEIFSNEMAKVDDSFFHRLEESFLVEEDKKHERHPIFGNIVDEVAYHEKYPTIYHLRKKLVDSTDKADLRLIYLALAHMIKFRGHFLIEGDLNPDNSDVDKLFIQLVQTYNQLFEENPINASGVDAKAILSARLSKSRRLENLIAQLPGEKKNGLFGNLIALSLGLTPNFKSNFDLAEDAKLQLSKDTYDDDLDNLLAQIGDQYADLFLAAKNLSDAILLSDILRVNTEITKAPLSASMIKRYDEHHQDLTLLKALVRQQLPEKYKEIFFDQSKNGYAGYIDGGASQEEFYKFIKPILEKMDGTEELLVKLNREDLLRKQRTFDNGSIPHQIHLGELHAILRRQEDFYPFLKDNREKIEKILTFRIPYYVGPLARGNSRFAWMTRKSEETITPWNFEEVVDKGASAQSFIERMTNFDKNLPNEKVLPKHSLLYEYFTVYNELTKVKYVTEGMRKPAFLSGEQKKAIVDLLFKTNRKVTVKQLKEDYFKKIECFDSVEISGVEDRFNASLGTYHDLLKIIKDKDFLDNEENEDILEDIVLTLTLFEDREMIEERLKTYAHLFDDKVMKQLKRRRYTGWGRLSRKLINGIRDKQSGKTILDFLKSDGFANRNFMQLIHDDSLTFKEDIQKAQVSGQGDSLHEHIANLAGSPAIKKGILQTVKVVDELVKVMGRHKPENIVIEMARENQTTQKGQKNSRERMKRIEEGIKELGSQILKEHPVENTQLQNEKLYLYYLQNGRDMYVDQELDINRLSDYDVDHIVPQSFLKDDSIDNKVLTRSDKARGKSDNVPSEEVVKKMKNYWRQLLNAKLITQRKFDNLTKAERGGLSELDKAGFIKRQLVETRQITKHVAQILDSRMNTKYDENDKLIREVKVITLKSKLVSDFRKDFQFYKVREINNYHHAHDAYLNAVVGTALIKKYPKLESEFVYGDYKVYDVRKMIAKSEQEIGKATAKYFFYSNIMNFFKTEITLANGEIRKRPLIETNGETGEIVWDKGRDFATVRKVLSMPQVNIVKKTEVQTGGFSKESILPKRNSDKLIARKKDWDPKKYGGFDSPTVAYSVLVVAKVEKGKSKKLKSVKELLGITIMERSSFEKNPIDFLEAKGYKEVKKDLIIKLPKYSLFELENGRKRMLASAGELQKGNELALPSKYVNFLYLASHYEKLKGSPEDNEQKQLFVEQHKHYLDEIIEQISEFSKRVILADANLDKVLSAYNKHRDKPIREQAENIIHLFTLTNLGAPAAFKYFDTTIDRKRYTSTKEVLDATLIHQSITGLYETRIDLSQLGGDGGPAPGGGGGSGGLATAVDILAPQRYADPITWKSDEPVWVDQWPLTQEKLAAAQQLVQEQLQAGHIIESNSPWNTPIFVIKKKSGKWRLLQDLRAVNATMVLMGALQPGLPSPVAIPQGYFKIVIDLKDCFFTIPLQPVDQKRFAFSLPSTNFKQPMKRYQWKVLPQGMANSPTLCQKYVAAAIEPVRKSWAQMYIIHYMDDILIAGKLGEQVLQCFAQLKQALTTTGLQIAPEKVQLQDPYTYLGFQINGPKITNQKAVIRRDKLQTLNDFQKLLGDINWLRPYLHLTTGDLKPLFDILKGDSNPNSPRSLSEAALASLQKVETAIAEQFVTQIDYTQPLTFLIFNTTLTPTGLFWQNNPVMWVHLPASPKKVLLPYYDAIADLIILGRDNSKKYFGLEPSTIIQPYSKSQIHWLMQNTETWPIACASYAGNIDNHYPPNKLIQFCKLHAVVFPRIISKTPLDNALLVFTDGSSTGIAAYTFEKTTVRFKTSHTSAQLVELQALIAVLSAFPHRALNVYTDSAYLAHSIPLLETVSHIKHISDTAKFFLQCQQLIYNRSIPFYLGHIRAHSGLPGPLSQGNHITDLATKVVATTLTTAGKRTADGSEFEKRTADGSEFESPKKKAKVE

SEQ ID NO: 756 - protein, 2005 aa, synthetic construct
MPAAKRVKLDGGDKKYSIGLDIGTNSVGWAVITDEYKVPSKKFKVLGNTDRHSIKKNLIGALLFDSGETAEATRLKRTARRRYTRRKNRICYLQEIFSNEMAKVDDSFFHRLEESFLVEEDKKHERHPIFGNIVDEVAYHEKYPTIYHLRKKLVDSTDKADLRLIYLALAHMIKFRGHFLIEGDLNPDNSDVDKLFIQLVQTYNQLFEENPINASGVDAKAILSARLSKSRRLENLIAQLPGEKKNGLFGNLIALSLGLTPNFKSNFDLAEDAKLQLSKDTYDDDLDNLLAQIGDQYADLFLAAKNLSDAILLSDILRVNTEITKAPLSASMIKRYDEHHQDLTLLKALVRQQLPEKYKEIFFDQSKNGYAGYIDGGASQEEFYKFIKPILEKMDGTEELLVKLNREDLLRKQRTFDNGSIPHQIHLGELHAILRRQEDFYPFLKDNREKIEKILTFRIPYYVGPLARGNSRFAWMTRKSEETITPWNFEEVVDKGASAQSFIERMTNFDKNLPNEKVLPKHSLLYEYFTVYNELTKVKYVTEGMRKPAFLSGEQKKAIVDLLFKTNRKVTVKQLKEDYFKKIECFDSVEISGVEDRFNASLGTYHDLLKIIKDKDFLDNEENEDILEDIVLTLTLFEDREMIEERLKTYAHLFDDKVMKQLKRRRYTGWGRLSRKLINGIRDKQSGKTILDFLKSDGFANRNFMQLIHDDSLTFKEDIQKAQVSGQGDSLHEHIANLAGSPAIKKGILQTVKVVDELVKVMGRHKPENIVIEMARENQTTQKGQKNSRERMKRIEEGIKELGSQILKEHPVENTQLQNEKLYLYYLQNGRDMYVDQELDINRLSDYDVDHIVPQSFLKDDSIDNKVLTRSDKARGKSDNVPSEEVVKKMKNYWRQLLNAKLITQRKFDNLTKAERGGLSELDKAGFIKRQLVETRQITKHVAQILDSRMNTKYDENDKLIREVKVITLKSKLVSDFRKDFQFYKVREINNYHHAHDAYLNAVVGTALIKKYPKLESEFVYGDYKVYDVRKMIAKSEQEIGKATAKYFFYSNIMNFFKTEITLANGEIRKRPLIETNGETGEIVWDKGRDFATVRKVLSMPQVNIVKKTEVQTGGFSKESILPKRNSDKLIARKKDWDPKKYGGFDSPTVAYSVLVVAKVEKGKSKKLKSVKELLGITIMERSSFEKNPIDFLEAKGYKEVKKDLIIKLPKYSLFELENGRKRMLASAGELQKGNELALPSKYVNFLYLASHYEKLKGSPEDNEQKQLFVEQHKHYLDEIIEQISEFSKRVILADANLDKVLSAYNKHRDKPIREQAENIIHLFTLTNLGAPAAFKYFDTTIDRKRYTSTKEVLDATLIHQSITGLYETRIDLSQLGGDGGGGGGGSGGLATAVDILAPQRYADPITWKSDEPVWVDQWPLTQEKLAAAQQLVQEQLQAGHIIESNSPWNTPIFVIKKKSGKWRLLQDLRAVNATMVLMGALQPGLPSPVAIPQGYFKIVIDLKDCFFTIPLQPVDQKRFAFSLPSTNFKQPMKRYQWKVLPQGMANSPTLCQKYVAAAIEPVRKSWAQMYIIHYMDDILIAGKLGEQVLQCFAQLKQALTTTGLQIAPEKVQLQDPYTYLGFQINGPKITNQKAVIRRDKLQTLNDFQKLLGDINWLRPYLHLTTGDLKPLFDILKGDSNPNSPRSLSEAALASLQKVETAIAEQFVTQIDYTQPLTFLIFNTTLTPTGLFWQNNPVMWVHLPASPKKVLLPYYDAIADLIILGRDNSKKYFGLEPSTIIQPYSKSQIHWLMQNTETWPIACASYAGNIDNHYPPNKLIQFCKLHAVVFPRIISKTPLDNALLVFTDGSSTGIAAYTFEKTTVRFKTSHTSAQLVELQALIAVLSAFPHRALNVYTDSAYLAHSIPLLETVSHIKHISDTAKFFLQCQQLIYNRSIPFYLGHIRAHSGLPGPLSQGNHITDLATKVVATTLTTAGKRTADGSEFEKRTADGSEFESPKKKAKVE

SEQ ID NO: 757 - protein, 2014 aa, synthetic construct
MPAAKRVKLDGGDKKYSIGLDIGTNSVGWAVITDEYKVPSKKFKVLGNTDRHSIKKNLIGALLFDSGETAEATRLKRTARRRYTRRKNRICYLQEIFSNEMAKVDDSFFHRLEESFLVEEDKKHERHPIFGNIVDEVAYHEKYPTIYHLRKKLVDSTDKADLRLIYLALAHMIKFRGHFLIEGDLNPDNSDVDKLFIQLVQTYNQLFEENPINASGVDAKAILSARLSKSRRLENLIAQLPGEKKNGLFGNLIALSLGLTPNFKSNFDLAEDAKLQLSKDTYDDDLDNLLAQIGDQYADLFLAAKNLSDAILLSDILRVNTEITKAPLSASMIKRYDEHHQDLTLLKALVRQQLPEKYKEIFFDQSKNGYAGYIDGGASQEEFYKFIKPILEKMDGTEELLVKLNREDLLRKQRTFDNGSIPHQIHLGELHAILRRQEDFYPFLKDNREKIEKILTFRIPYYVGPLARGNSRFAWMTRKSEETITPWNFEEVVDKGASAQSFIERMTNFDKNLPNEKVLPKHSLLYEYFTVYNELTKVKYVTEGMRKPAFLSGEQKKAIVDLLFKTNRKVTVKQLKEDYFKKIECFDSVEISGVEDRFNASLGTYHDLLKIIKDKDFLDNEENEDILEDIVLTLTLFEDREMIEERLKTYAHLFDDKVMKQLKRRRYTGWGRLSRKLINGIRDKQSGKTILDFLKSDGFANRNFMQLIHDDSLTFKEDIQKAQVSGQGDSLHEHIANLAGSPAIKKGILQTVKVVDELVKVMGRHKPENIVIEMARENQTTQKGQKNSRERMKRIEEGIKELGSQILKEHPVENTQLQNEKLYLYYLQNGRDMYVDQELDINRLSDYDVDHIVPQSFLKDDSIDNKVLTRSDKARGKSDNVPSEEVVKKMKNYWRQLLNAKLITQRKFDNLTKAERGGLSELDKAGFIKRQLVETRQITKHVAQILDSRMNTKYDENDKLIREVKVITLKSKLVSDFRKDFQFYKVREINNYHHAHDAYLNAVVGTALIKKYPKLESEFVYGDYKVYDVRKMIAKSEQEIGKATAKYFFYSNIMNFFKTEITLANGEIRKRPLIETNGETGEIVWDKGRDFATVRKVLSMPQVNIVKKTEVQTGGFSKESILPKRNSDKLIARKKDWDPKKYGGFDSPTVAYSVLVVAKVEKGKSKKLKSVKELLGITIMERSSFEKNPIDFLEAKGYKEVKKDLIIKLPKYSLFELENGRKRMLASAGELQKGNELALPSKYVNFLYLASHYEKLKGSPEDNEQKQLFVEQHKHYLDEIIEQISEFSKRVILADANLDKVLSAYNKHRDKPIREQAENIIHLFTLTNLGAPAAFKYFDTTIDRKRYTSTKEVLDATLIHQSITGLYETRIDLSQLGGDGGGSSGSSGSSGSSGSSGGLATAVDILAPQRYADPITWKSDEPVWVDQWPLTQEKLAAAQQLVQEQLQAGHIIESNSPWNTPIFVIKKKSGKWRLLQDLRAVNATMVLMGALQPGLPSPVAPPQGYFKIVIDLKDCFFTIPLQPVDQKRFAFSLPSTNFKQPMKRYQWKVLPQGMANSPTLCQKYVAAAIEPVRKSWAQMYIIHYMDDILIAGKLGEQVLQCFAQLKQALTTTGLQIAPEKVQLQDPYTYLGFQINGPKITNQKAVIRRDKLQTLNDFQKLLGDINWLRPYLHLTTGDLKPLFDILKGDSNPNSPRSLSEAALASLQKVETAIAEQFVTQIDYTQPLTFLIFNTTLTPTGLFWQNNPVMWVHLPASPKKVLLPYYDAIADLIILGRDNSKKYFGLEPSTIIQPYSKSQIHWLMQNTETWPIACASYAGNIDNHYPPNKLIQFCKLHAVVFPRIISKTPLDNALLVFTDGSSTGIAAYTFEKTTVRFKTSHTSAQLVELQALIAVLSAFPHRALNVYTDSAYLAHSIPLLETVSHIKHISDTAKFFLQCQQLIYNRSIPFYLGHIRAHSGLPGPLSQGNHITDLATKVVATTLTTAGKRTADGSEFEKRTADGSEFESPKKKAKVE

SEQ ID NO: 758 - protein, 2010 aa, synthetic construct
MPAAKRVKLDGGDKKYSIGLDIGTNSVGWAVITDEYKVPSKKFKVLGNTDRHSIKKNLIGALLFDSGETAEATRLKRTARRRYTRRKNRICYLQEIFSNEMAKVDDSFFHRLEESFLVEEDKKHERHPIFGNIVDEVAYHEKYPTIYHLRKKLVDSTDKADLRLIYLALAHMIKFRGHFLIEGDLNPDNSDVDKLFIQLVQTYNQLFEENPINASGVDAKAILSARLSKSRRLENLIAQLPGEKKNGLFGNLIALSLGLTPNFKSNFDLAEDAKLQLSKDTYDDDLDNLLAQIGDQYADLFLAAKNLSDAILLSDILRVNTEITKAPLSASMIKRYDEHHQDLTLLKALVRQQLPEKYKEIFFDQSKNGYAGYIDGGASQEEFYKFIKPILEKMDGTEELLVKLNREDLLRKQRTFDNGSIPHQIHLGELHAILRRQEDFYPFLKDNREKIEKILTFRIPYYVGPLARGNSRFAWMTRKSEETITPWNFEEVVDKGASAQSFIERMTNFDKNLPNEKVLPKHSLLYEYFTVYNELTKVKYVTEGMRKPAFLSGEQKKAIVDLLFKTNRKVTVKQLKEDYFKKIECFDSVEISGVEDRFNASLGTYHDLLKIIKDKDFLDNEENEDILEDIVLTLTLFEDREMIEERLKTYAHLFDDKVMKQLKRRRYTGWGRLSRKLINGIRDKQSGKTILDFLKSDGFANRNFMQLIHDDSLTFKEDIQKAQVSGQGDSLHEHIANLAGSPAIKKGILQTVKVVDELVKVMGRHKPENIVIEMARENQTTQKGQKNSRERMKRIEEGIKELGSQILKEHPVENTQLQNEKLYLYYLQNGRDMYVDQELDINRLSDYDVDHIVPQSFLKDDSIDNKVLTRSDKARGKSDNVPSEEVVKKMKNYWRQLLNAKLITQRKFDNLTKAERGGLSELDKAGFIKRQLVETRQITKHVAQILDSRMNTKYDENDKLIREVKVITLKSKLVSDFRKDFQFYKVREINNYHHAHDAYLNAVVGTALIKKYPKLESEFVYGDYKVYDVRKMIAKSEQEIGKATAKYFFYSNIMNFFKTEITLANGEIRKRPLIETNGETGEIVWDKGRDFATVRKVLSMPQVNIVKKTEVQTGGFSKESILPKRNSDKLIARKKDWDPKKYGGFDSPTVAYSVLVVAKVEKGKSKKLKSVKELLGITIMERSSFEKNPIDFLEAKGYKEVKKDLIIKLPKYSLFELENGRKRMLASAGELQKGNELALPSKYVNFLYLASHYEKLKGSPEDNEQKQLFVEQHKHYLDEIIEQISEFSKRVILADANLDKVLSAYNKHRDKPIREQAENIIHLFTLTNLGAPAAFKYFDTTIDRKRYTSTKEVLDATLIHQSITGLYETRIDLSQLGGDGGGSSPAPEAAAKGGLATAVDILAPQRYADPITWKSDEPVWVDQWPLTQEKLAAAQQLVQEQLQAGHIIESNSPWNTPIFVIKKKSGKWRLLQDLRAVNATMVLMGALQPGLPSPVAPPQGYFKIVIDLKDCFFTIPLQPVDQKRFAFSLPSTNFKQPMKRYQWKVLPQGMANSPTLCQKYVAAAIEPVRKSWAQMYIIHYMDDILIAGKLGEQVLQCFAQLKQALTTTGLQIAPEKVQLQDPYTYLGFQINGPKITNQKAVIRRDKLQTLNDFQKLLGDINWLRPYLHLTTGDLKPLFDILKGDSNPNSPRSLSEAALASLQKVETAIAEQFVTQIDYTQPLTFLIFNTTLTPTGLFWQNNPVMWVHLPASPKKVLLPYYDAIADLIILGRDNSKKYFGLEPSTIIQPYSKSQIHWLMQNTETWPIACASYAGNIDNHYPPNKLIQFCKLHAVVFPRIISKTPLDNALLVFTDGSSTGIAAYTFEKTTVRFKTSHTSAQLVELQALIAVLSAFPHRALNVYTDSAYLAHSIPLLETVSHIKHISDTAKFFLQCQQLIYNRSIPFYLGHIRAHSGLPGPLSQGNHITDLATKVVATTLTTAGKRTADGSEFEKRTADGSEFESPKKKAKVE

SEQ ID NO: 759 - protein, 2072 aa, synthetic construct
MPAAKRVKLDGGDKKYSIGLDIGTNSVGWAVITDEYKVPSKKFKVLGNTDRHSIKKNLIGALLFDSGETAEATRLKRTARRRYTRRKNRICYLQEIFSNEMAKVDDSFFHRLEESFLVEEDKKHERHPIFGNIVDEVAYHEKYPTIYHLRKKLVDSTDKADLRLIYLALAHMIKFRGHFLIEGDLNPDNSDVDKLFIQLVQTYNQLFEENPINASGVDAKAILSARLSKSRRLENLIAQLPGEKKNGLFGNLIALSLGLTPNFKSNFDLAEDAKLQLSKDTYDDDLDNLLAQIGDQYADLFLAAKNLSDAILLSDILRVNTEITKAPLSASMIKRYDEHHQDLTLLKALVRQQLPEKYKEIFFDQSKNGYAGYIDGGASQEEFYKFIKPILEKMDGTEELLVKLNREDLLRKQRTFDNGSIPHQIHLGELHAILRRQEDFYPFLKDNREKIEKILTFRIPYYVGPLARGNSRFAWMTRKSEETITPWNFEEVVDKGASAQSFIERMTNFDKNLPNEKVLPKHSLLYEYFTVYNELTKVKYVTEGMRKPAFLSGEQKKAIVDLLFKTNRKVTVKQLKEDYFKKIECFDSVEISGVEDRFNASLGTYHDLLKIIKDKDFLDNEENEDILEDIVLTLTLFEDREMIEERLKTYAHLFDDKVMKQLKRRRYTGWGRLSRKLINGIRDKQSGKTILDFLKSDGFANRNFMQLIHDDSLTFKEDIQKAQVSGQGDSLHEHIANLAGSPAIKKGILQTVKVVDELVKVMGRHKPENIVIEMARENQTTQKGQKNSRERMKRIEEGIKELGSQILKEHPVENTQLQNEKLYLYYLQNGRDMYVDQELDINRLSDYDVDHIVPQSFLKDDSIDNKVLTRSDKARGKSDNVPSEEVVKKMKNYWRQLLNAKLITQRKFDNLTKAERGGLSELDKAGFIKRQLVETRQITKHVAQILDSRMNTKYDENDKLIREVKVITLKSKLVSDFRKDFQFYKVREINNYHHAHDAYLNAVVGTALIKKYPKLESEFVYGDYKVYDVRKMIAKSEQEIGKATAKYFFYSNIMNFFKTEITLANGEIRKRPLIETNGETGEIVWDKGRDFATVRKVLSMPQVNIVKKTEVQTGGFSKESILPKRNSDKLIARKKDWDPKKYGGFDSPTVAYSVLVVAKVEKGKSKKLKSVKELLGITIMERSSFEKNPIDFLEAKGYKEVKKDLIIKLPKYSLFELENGRKRMLASAGELQKGNELALPSKYVNFLYLASHYEKLKGSPEDNEQKQLFVEQHKHYLDEIIEQISEFSKRVILADANLDKVLSAYNKHRDKPIREQAENIIHLFTLTNLGAPAAFKYFDTTIDRKRYTSTKEVLDATLIHQSITGLYETRIDLSQLGGDGGPAPEAAAKGGSCQTKNTLNIDEYLLQFPDQLWASLPTDIGRMLVPPITIKIKDNASLPSIRQYPLPKDKTEGLRPLISSLENQGILIKCHSPCNTPIFPIKKAGRDEYRMIHDLRAINNIVAPLTAVVASPTTVLSNLAPSLHWFTVIDLSNAFFSVPIHKDSQYLFAFTFEGHQYTWTVLPQGFIHSPTLFSQALYQSLHKIKFKISSEICIYMDDVLIASKDRDTNLKDTAVMLQHLASEGHKVSKKKLQLCQQEVVYLGQLLTPEGRKILPDRKVTVSQFQQPTTIRQIRAFLGLVGYCRHWIPEFSIHSKFLEKQLKKDTAEPFQLDDQQVEAFNKLKHAITTAPVLVVPDPAKPFQLYTSHSEHASIAVLTQKHAGRTRPIAFLSSKFDAIESGLPPCLKACASIHRSLTQADSFILGAPLIIYTTHAICTLLQRDRSQLVTASRFSKWEADLLRPELTFVACSAVSPAHLYMQSCENNIPPHDCVLLTHTISRPRPDLSDLPIPDPDMTLFSDGSYTTGRGGAAVVMHRPVTDDFIIIHQQPGGASAQTAELLALAAACHLATDKTVNIYTDSRYAYGVVHDFGHLWMHRGFVTSAGTPIKNHKEIEYLLKQIMKPKQVSVIKIEAHTKGVSMEVRGNAAADEAAKNAVFLVQRAGKRTADGSEFEKRTADGSEFESPKKKAKVE

SEQ ID NO: 760 - protein, 2070 aa, synthetic construct
MPAAKRVKLDGGDKKYSIGLDIGTNSVGWAVITDEYKVPSKKFKVLGNTDRHSIKKNLIGALLFDSGETAEATRLKRTARRRYTRRKNRICYLQEIFSNEMAKVDDSFFHRLEESFLVEEDKKHERHPIFGNIVDEVAYHEKYPTIYHLRKKLVDSTDKADLRLIYLALAHMIKFRGHFLIEGDLNPDNSDVDKLFIQLVQTYNQLFEENPINASGVDAKAILSARLSKSRRLENLIAQLPGEKKNGLFGNLIALSLGLTPNFKSNFDLAEDAKLQLSKDTYDDDLDNLLAQIGDQYADLFLAAKNLSDAILLSDILRVNTEITKAPLSASMIKRYDEHHQDLTLLKALVRQQLPEKYKEIFFDQSKNGYAGYIDGGASQEEFYKFIKPILEKMDGTEELLVKLNREDLLRKQRTFDNGSIPHQIHLGELHAILRRQEDFYPFLKDNREKIEKILTFRIPYYVGPLARGNSRFAWMTRKSEETITPWNFEEVVDKGASAQSFIERMTNFDKNLPNEKVLPKHSLLYEYFTVYNELTKVKYVTEGMRKPAFLSGEQKKAIVDLLFKTNRKVTVKQLKEDYFKKIECFDSVEISGVEDRFNASLGTYHDLLKIIKDKDFLDNEENEDILEDIVLTLTLFEDREMIEERLKTYAHLFDDKVMKQLKRRRYTGWGRLSRKLINGIRDKQSGKTILDFLKSDGFANRNFMQLIHDDSLTFKEDIQKAQVSGQGDSLHEHIANLAGSPAIKKGILQTVKVVDELVKVMGRHKPENIVIEMARENQTTQKGQKNSRERMKRIEEGIKELGSQILKEHPVENTQLQNEKLYLYYLQNGRDMYVDQELDINRLSDYDVDHIVPQSFLKDDSIDNKVLTRSDKARGKSDNVPSEEVVKKMKNYWRQLLNAKLITQRKFDNLTKAERGGLSELDKAGFIKRQLVETRQITKHVAQILDSRMNTKYDENDKLIREVKVITLKSKLVSDFRKDFQFYKVREINNYHHAHDAYLNAVVGTALIKKYPKLESEFVYGDYKVYDVRKMIAKSEQEIGKATAKYFFYSNIMNFFKTEITLANGEIRKRPLIETNGETGEIVWDKGRDFATVRKVLSMPQVNIVKKTEVQTGGFSKESILPKRNSDKLIARKKDWDPKKYGGFDSPTVAYSVLVVAKVEKGKSKKLKSVKELLGITIMERSSFEKNPIDFLEAKGYKEVKKDLIIKLPKYSLFELENGRKRMLASAGELQKGNELALPSKYVNFLYLASHYEKLKGSPEDNEQKQLFVEQHKHYLDEIIEQISEFSKRVILADANLDKVLSAYNKHRDKPIREQAENIIHLFTLTNLGAPAAFKYFDTTIDRKRYTSTKEVLDATLIHQSITGLYETRIDLSQLGGDGGGGGGGGGGSCQTKNTLNIDEYLLQFPDQLWASLPTDIGRMLVPPITIKIKDNASLPSIRQYPLPKDKTEGLRPLISSLENQGILIKCHSPCNTPIFPIKKAGRDEYRMIHDLRAINNIVAPLTAVVASPTTVLSNLAPSLHWFTVIDLSNAFFSVPIHKDSQYLFAFTFEGHQYTWTVLPQGFIHSPTLFSQALYQSLHKIKFKISSEICIYMDDVLIASKDRDTNLKDTAVMLQHLASEGHKVSKKKLQLCQQEVVYLGQLLTPEGRKILPDRKVTVSQFQQPTTIRQIRAFLGLVGYCRHWIPEFSIHSKFLEKQLKKDTAEPFQLDDQQVEAFNKLKHAITTAPVLVVPDPAKPFQLYTSHSEHASIAVLTQKHAGRTRPIAFLSSKFDAIESGLPPCLKACASIHRSLTQADSFILGAPLIIYTTHAICTLLQRDRSQLVTASRFSKWEADLLRPELTFVACSAVSPAHLYMQSCENNIPPHDCVLLTHTISRPRPDLSDLPIPDPDMTLFSDGSYTTGRGGAAVVMHRPVTDDFIIIHQQPGGASAQTAELLALAAACHLATDKTVNIYTDSRYAYGVVHDFGHLWMHRGFVTSAGTPIKNHKEIEYLLKQIMKPKQVSVIKIEAHTKGVSMEVRGNAAADEAAKNAVFLVQRAGKRTADGSEFEKRTADGSEFESPKKKAKVE

SEQ ID NO: 761 - protein, 2077 aa, synthetic construct
MPAAKRVKLDGGDKKYSIGLDIGTNSVGWAVITDEYKVPSKKFKVLGNTDRHSIKKNLIGALLFDSGETAEATRLKRTARRRYTRRKNRICYLQEIFSNEMAKVDDSFFHRLEESFLVEEDKKHERHPIFGNIVDEVAYHEKYPTIYHLRKKLVDSTDKADLRLIYLALAHMIKFRGHFLIEGDLNPDNSDVDKLFIQLVQTYNQLFEENPINASGVDAKAILSARLSKSRRLENLIAQLPGEKKNGLFGNLIALSLGLTPNFKSNFDLAEDAKLQLSKDTYDDDLDNLLAQIGDQYADLFLAAKNLSDAILLSDILRVNTEITKAPLSASMIKRYDEHHQDLTLLKALVRQQLPEKYKEIFFDQSKNGYAGYIDGGASQEEFYKFIKPILEKMDGTEELLVKLNREDLLRKQRTFDNGSIPHQIHLGELHAILRRQEDFYPFLKDNREKIEKILTFRIPYYVGPLARGNSRFAWMTRKSEETITPWNFEEVVDKGASAQSFIERMTNFDKNLPNEKVLPKHSLLYEYFTVYNELTKVKYVTEGMRKPAFLSGEQKKAIVDLLFKTNRKVTVKQLKEDYFKKIECFDSVEISGVEDRFNASLGTYHDLLKIIKDKDFLDNEENEDILEDIVLTLTLFEDREMIEERLKTYAHLFDDKVMKQLKRRRYTGWGRLSRKLINGIRDKQSGKTILDFLKSDGFANRNFMQLIHDDSLTFKEDIQKAQVSGQGDSLHEHIANLAGSPAIKKGILQTVKVVDELVKVMGRHKPENIVIEMARENQTTQKGQKNSRERMKRIEEGIKELGSQILKEHPVENTQLQNEKLYLYYLQNGRDMYVDQELDINRLSDYDVDHIVPQSFLKDDSIDNKVLTRSDKARGKSDNVPSEEVVKKMKNYWRQLLNAKLITQRKFDNLTKAERGGLSELDKAGFIKRQLVETRQITKHVAQILDSRMNTKYDENDKLIREVKVITLKSKLVSDFRKDFQFYKVREINNYHHAHDAYLNAVVGTALIKKYPKLESEFVYGDYKVYDVRKMIAKSEQEIGKATAKYFFYSNIMNFFKTEITLANGEIRKRPLIETNGETGEIVWDKGRDFATVRKVLSMPQVNIVKKTEVQTGGFSKESILPKRNSDKLIARKKDWDPKKYGGFDSPTVAYSVLVVAKVEKGKSKKLKSVKELLGITIMERSSFEKNPIDFLEAKGYKEVKKDLIIKLPKYSLFELENGRKRMLASAGELQKGNELALPSKYVNFLYLASHYEKLKGSPEDNEQKQLFVEQHKHYLDEIIEQISEFSKRVILADANLDKVLSAYNKHRDKPIREQAENIIHLFTLTNLGAPAAFKYFDTTIDRKRYTSTKEVLDATLIHQSITGLYETRIDLSQLGGDGGPAPAPAPAPAPAPGGSCQTKNTLNIDEYLLQFPDQLWASLPTDIGRMLVPPITIKIKDNASLPSIRQYPLPKDKTEGLRPLISSLENQGILIKCHSPCNTPIFPIKKAGRDEYRMIHDLRAINNIVAPLTAVVASPTTVLSNLAPSLHWFTVIDLSNAFFSVPIHKDSQYLFAFTFEGHQYTWTVLPQGFIHSPTLFSQALYQSLHKIKFKISSEICIYMDDVLIASKDRDTNLKDTAVMLQHLASEGHKVSKKKLQLCQQEVVYLGQLLTPEGRKILPDRKVTVSQFQQPTTIRQIRAFLGLVGYCRHWIPEFSIHSKFLEKQLKKDTAEPFQLDDQQVEAFNKLKHAITTAPVLVVPDPAKPFQLYTSHSEHASIAVLTQKHAGRTRPIAFLSSKFDAIESGLPPCLKACASIHRSLTQADSFILGAPLIIYTTHAICTLLQRDRSQLVTASRFSKWEADLLRPELTFVACSAVSPAHLYMQSCENNIPPHDCVLLTHTISRPRPDLSDLPIPDPDMTLFSDGSYTTGRGGAAVVMHRPVTDDFIIIHQQPGGASAQTAELLALAAACHLATDKTVNIYTDSRYAYGVVHDFGHLWMHRGFVTSAGTPIKNHKEIEYLLKQIMKPKQVSVIKIEAHTKGVSMEVRGNAAADEAAKNAVFLVQRAGKRTADGSEFEKRTADGSEFESPKKKAKVE

SEQ ID NO: 762 - protein, 2079 aa, synthetic construct
MPAAKRVKLDGGDKKYSIGLDIGTNSVGWAVITDEYKVPSKKFKVLGNTDRHSIKKNLIGALLFDSGETAEATRLKRTARRRYTRRKNRICYLQEIFSNEMAKVDDSFFHRLEESFLVEEDKKHERHPIFGNIVDEVAYHEKYPTIYHLRKKLVDSTDKADLRLIYLALAHMIKFRGHFLIEGDLNPDNSDVDKLFIQLVQTYNQLFEENPINASGVDAKAILSARLSKSRRLENLIAQLPGEKKNGLFGNLIALSLGLTPNFKSNFDLAEDAKLQLSKDTYDDDLDNLLAQIGDQYADLFLAAKNLSDAILLSDILRVNTEITKAPLSASMIKRYDEHHQDLTLLKALVRQQLPEKYKEIFFDQSKNGYAGYIDGGASQEEFYKFIKPILEKMDGTEELLVKLNREDLLRKQRTFDNGSIPHQIHLGELHAILRRQEDFYPFLKDNREKIEKILTFRIPYYVGPLARGNSRFAWMTRKSEETITPWNFEEVVDKGASAQSFIERMTNFDKNLPNEKVLPKHSLLYEYFTVYNELTKVKYVTEGMRKPAFLSGEQKKAIVDLLFKTNRKVTVKQLKEDYFKKIECFDSVEISGVEDRFNASLGTYHDLLKIIKDKDFLDNEENEDILEDIVLTLTLFEDREMIEERLKTYAHLFDDKVMKQLKRRRYTGWGRLSRKLINGIRDKQSGKTILDFLKSDGFANRNFMQLIHDDSLTFKEDIQKAQVSGQGDSLHEHIANLAGSPAIKKGILQTVKVVDELVKVMGRHKPENIVIEMARENQTTQKGQKNSRERMKRIEEGIKELGSQILKEHPVENTQLQNEKLYLYYLQNGRDMYVDQELDINRLSDYDVDHIVPQSFLKDDSIDNKVLTRSDKARGKSDNVPSEEVVKKMKNYWRQLLNAKLITQRKFDNLTKAERGGLSELDKAGFIKRQLVETRQITKHVAQILDSRMNTKYDENDKLIREVKVITLKSKLVSDFRKDFQFYKVREINNYHHAHDAYLNAVVGTALIKKYPKLESEFVYGDYKVYDVRKMIAKSEQEIGKATAKYFFYSNIMNFFKTEITLANGEIRKRPLIETNGETGEIVWDKGRDFATVRKVLSMPQVNIVKKTEVQTGGFSKESILPKRNSDKLIARKKDWDPKKYGGFDSPTVAYSVLVVAKVEKGKSKKLKSVKELLGITIMERSSFEKNPIDFLEAKGYKEVKKDLIIKLPKYSLFELENGRKRMLASAGELQKGNELALPSKYVNFLYLASHYEKLKGSPEDNEQKQLFVEQHKHYLDEIIEQISEFSKRVILADANLDKVLSAYNKHRDKPIREQAENIIHLFTLTNLGAPAAFKYFDTTIDRKRYTSTKEVLDATLIHQSITGLYETRIDLSQLGGDGGGGGGSEAAAKGGGGSGGSCQTKNTLNIDEYLLQFPDQLWASLPTDIGRMLVPPITIKIKDNASLPSIRQYPLPKDKTEGLRPLISSLENQGILIKCHSPCNTPIFPIKKAGRDEYRMIHDLRAINNIVAPLTAVVASPTTVLSNLAPSLHWFTVIDLSNAFFSVPIHKDSQYLFAFTFEGHQYTWTVLPQGFIHSPTLFNQALYQSLHKIKFKISSEICIYMDDVLIASKDRDTNLKDTAVMLQHLASEGHKVSKKKLQLCQQEVVYLGQLLTPEGRKILPDRKVTVSQFQQPTTIRQIRAFLGLVGYCRHWIPEFSIHSKFLEKQLKPDTAEPFQLDDQQVEAFNKLKHAITTAPVLVVPDPAKPFQLYTSHSEHASIAVLTQKHAGRTRPIAFLSSKFDAIESGLPPCLKACASIHRSLTQADSFILGAPLIIYTTHAICTLLQRDRSQLVTASRFSKWEADLLRPELTFVACSAVSPAHLYMQSCENNIPPHDCVLLTHTISRPRPDLSDLPIPDPDMTLFSDGSYTTGRGGAAVVMHRPVTDDFIIIHQQPGGASAQTAELLALAAACHLATDKTVNIYTDSRYAYGVVHDFGHLWMHRGFVTSAGTPIKNHKEIEYLLKQIMKPKQVSVIKIEAHTKGVSMEVRGNAAADEAAKNAVFLVQRAGKRTADGSEFEKRTADGSEFESPKKKAKVE

SEQ ID NO: 763 - protein, 2110 aa, synthetic construct
MPAAKRVKLDGGDKKYSIGLDIGTNSVGWAVITDEYKVPSKKFKVLGNTDRHSIKKNLIGALLFDSGETAEATRLKRTARRRYTRRKNRICYLQEIFSNEMAKVDDSFFHRLEESFLVEEDKKHERHPIFGNIVDEVAYHEKYPTIYHLRKKLVDSTDKADLRLIYLALAHMIKFRGHFLIEGDLNPDNSDVDKLFIQLVQTYNQLFEENPINASGVDAKAILSARLSKSRRLENLIAQLPGEKKNGLFGNLIALSLGLTPNFKSNFDLAEDAKLQLSKDTYDDDLDNLLAQIGDQYADLFLAAKNLSDAILLSDILRVNTEITKAPLSASMIKRYDEHHQDLTLLKALVRQQLPEKYKEIFFDQSKNGYAGYIDGGASQEEFYKFIKPILEKMDGTEELLVKLNREDLLRKQRTFDNGSIPHQIHLGELHAILRRQEDFYPFLKDNREKIEKILTFRIPYYVGPLARGNSRFAWMTRKSEETITPWNFEEVVDKGASAQSFIERMTNFDKNLPNEKVLPKHSLLYEYFTVYNELTKVKYVTEGMRKPAFLSGEQKKAIVDLLFKTNRKVTVKQLKEDYFKKIECFDSVEISGVEDRFNASLGTYHDLLKIIKDKDFLDNEENEDILEDIVLTLTLFEDREMIEERLKTYAHLFDDKVMKQLKRRRYTGWGRLSRKLINGIRDKQSGKTILDFLKSDGFANRNFMQLIHDDSLTFKEDIQKAQVSGQGDSLHEHIANLAGSPAIKKGILQTVKVVDELVKVMGRHKPENIVIEMARENQTTQKGQKNSRERMKRIEEGIKELGSQILKEHPVENTQLQNEKLYLYYLQNGRDMYVDQELDINRLSDYDVDHIVPQSFLKDDSIDNKVLTRSDKARGKSDNVPSEEVVKKMKNYWRQLLNAKLITQRKFDNLTKAERGGLSELDKAGFIKRQLVETRQITKHVAQILDSRMNTKYDENDKLIREVKVITLKSKLVSDFRKDFQFYKVREINNYHHAHDAYLNAVVGTALIKKYPKLESEFVYGDYKVYDVRKMIAKSEQEIGKATAKYFFYSNIMNFFKTEITLANGEIRKRPLIETNGETGEIVWDKGRDFATVRKVLSMPQVNIVKKTEVQTGGFSKESILPKRNSDKLIARKKDWDPKKYGGFDSPTVAYSVLVVAKVEKGKSKKLKSVKELLGITIMERSSFEKNPIDFLEAKGYKEVKKDLIIKLPKYSLFELENGRKRMLASAGELQKGNELALPSKYVNFLYLASHYEKLKGSPEDNEQKQLFVEQHKHYLDEIIEQISEFSKRVILADANLDKVLSAYNKHRDKPIREQAENIIHLFTLTNLGAPAAFKYFDTTIDRKRYTSTKEVLDATLIHQSITGLYETRIDLSQLGGDGGAEAAAKEAAAKEAAAKEAAAKALEAEAAAKEAAAKEAAAKEAAAKAGGSCQTKNTLNIDEYLLQFPDQLWASLPTDIGRMLVPPITIKIKDNASLPSIRQYPLPKDKTEGLRPLISSLENQGILIKCHSPCNTPIFPIKKAGRDEYRMIHDLRAINNIVAPLTAVVASPTTVLSNLAPSLHWFTVIDLSNAFFSVPIHKDSQYLFAFTFEGHQYTWTVLPQGFIHSPTLFNQALYQSLHKIKFKISSEICIYMDDVLIASKDRDTNLKDTAVMLQHLASEGHKVSKKKLQLCQQEVVYLGQLLTPEGRKILPDRKVTVSQFQQPTTIRQIRAFLGLVGYCRHWIPEFSIHSKFLEKQLKPDTAEPFQLDDQQVEAFNKLKHAITTAPVLVVPDPAKPFQLYTSHSEHASIAVLTQKHAGRTRPIAFLSSKFDAIESGLPPCLKACASIHRSLTQADSFILGAPLIIYTTHAICTLLQRDRSQLVTASRFSKWEADLLRPELTFVACSAVSPAHLYMQSCENNIPPHDCVLLTHTISRPRPDLSDLPIPDPDMTLFSDGSYTTGRGGAAVVMHRPVTDDFIIIHQQPGGASAQTAELLALAAACHLATDKTVNIYTDSRYAYGVVHDFGHLWMHRGFVTSAGTPIKNHKEIEYLLKQIMKPKQVSVIKIEAHTKGVSMEVRGNAAADEAAKNAVFLVQRAGKRTADGSEFEKRTADGSEFESPKKKAKVE

SEQ ID NO: 764 - protein, 2073 aa, synthetic construct
MPAAKRVKLDGGDKKYSIGLDIGTNSVGWAVITDEYKVPSKKFKVLGNTDRHSIKKNLIGALLFDSGETAEATRLKRTARRRYTRRKNRICYLQEIFSNEMAKVDDSFFHRLEESFLVEEDKKHERHPIFGNIVDEVAYHEKYPTIYHLRKKLVDSTDKADLRLIYLALAHMIKFRGHFLIEGDLNPDNSDVDKLFIQLVQTYNQLFEENPINASGVDAKAILSARLSKSRRLENLIAQLPGEKKNGLFGNLIALSLGLTPNFKSNFDLAEDAKLQLSKDTYDDDLDNLLAQIGDQYADLFLAAKNLSDAILLSDILRVNTEITKAPLSASMIKRYDEHHQDLTLLKALVRQQLPEKYKEIFFDQSKNGYAGYIDGGASQEEFYKFIKPILEKMDGTEELLVKLNREDLLRKQRTFDNGSIPHQIHLGELHAILRRQEDFYPFLKDNREKIEKILTFRIPYYVGPLARGNSRFAWMTRKSEETITPWNFEEVVDKGASAQSFIERMTNFDKNLPNEKVLPKHSLLYEYFTVYNELTKVKYVTEGMRKPAFLSGEQKKAIVDLLFKTNRKVTVKQLKEDYFKKIECFDSVEISGVEDRFNASLGTYHDLLKIIKDKDFLDNEENEDILEDIVLTLTLFEDREMIEERLKTYAHLFDDKVMKQLKRRRYTGWGRLSRKLINGIRDKQSGKTILDFLKSDGFANRNFMQLIHDDSLTFKEDIQKAQVSGQGDSLHEHIANLAGSPAIKKGILQTVKVVDELVKVMGRHKPENIVIEMARENQTTQKGQKNSRERMKRIEEGIKELGSQILKEHPVENTQLQNEKLYLYYLQNGRDMYVDQELDINRLSDYDVDHIVPQSFLKDDSIDNKVLTRSDKARGKSDNVPSEEVVKKMKNYWRQLLNAKLITQRKFDNLTKAERGGLSELDKAGFIKRQLVETRQITKHVAQILDSRMNTKYDENDKLIREVKVITLKSKLVSDFRKDFQFYKVREINNYHHAHDAYLNAVVGTALIKKYPKLESEFVYGDYKVYDVRKMIAKSEQEIGKATAKYFFYSNIMNFFKTEITLANGEIRKRPLIETNGETGEIVWDKGRDFATVRKVLSMPQVNIVKKTEVQTGGFSKESILPKRNSDKLIARKKDWDPKKYGGFDSPTVAYSVLVVAKVEKGKSKKLKSVKELLGITIMERSSFEKNPIDFLEAKGYKEVKKDLIIKLPKYSLFELENGRKRMLASAGELQKGNELALPSKYVNFLYLASHYEKLKGSPEDNEQKQLFVEQHKHYLDEIIEQISEFSKRVILADANLDKVLSAYNKHRDKPIREQAENIIHLFTLTNLGAPAAFKYFDTTIDRKRYTSTKEVLDATLIHQSITGLYETRIDLSQLGGDGGGSSGGSGGGGGSCQTKNTLNIDEYLLQFPDQLWASLPTDIGRMLVPPITIKIKDNASLPSIRQYPLPKDKTEGLRPLISSLENQGILIKCHSPCNTPIFPIKKAGRDEYRMIHDLRAINNIVAPLTAVVASPTTVLSNLAPSLHWFTVIDLSNAFFSVPIHKDSQYLFAFTFEGHQYTWTVLPQGFIHSPTLFNQALYQSLHKIKFKISSEICIYMDDVLIASKDRDTNLKDTAVMLQHLASEGHKVSKKKLQLCQQEVVYLGQLLTPEGRKILPDRKVTVSQFQQPTTIRQIRAFLGLVGYCRHWIPEFSIHSKFLEKQLKPDTAEPFQLDDQQVEAFNKLKHAITTAPVLVVPDPAKPFQLYTSHSEHASIAVLTQKHAGRTRPIAFLSSKFDAIESGLPPCLKACASIHRSLTQADSFILGAPLIIYTTHAICTLLQRDRSQLVTASRFSKWEADLLRPELTFVACSAVSPAHLYMQSCENNIPPHDCVLLTHTISRPRPDLSDLPIPDPDMTLFSDGSYTTGRGGAAVVMHRPVTDDFIIIHQQPGGASAQTAELLALAAACHLATDKTVNIYTDSRYAYGVVHDFGHLWMHRGFVTSAGTPIKNHKEIEYLLKQIMKPKQVSVIKIEAHTKGVSMEVRGNAAADEAAKNAVFLVQRAGKRTADGSEFEKRTADGSEFESPKKKAKVE

SEQ ID NO: 765 - protein, 2087 aa, synthetic construct
MPAAKRVKLDGGDKKYSIGLDIGTNSVGWAVITDEYKVPSKKFKVLGNTDRHSIKKNLIGALLFDSGETAEATRLKRTARRRYTRRKNRICYLQEIFSNEMAKVDDSFFHRLEESFLVEEDKKHERHPIFGNIVDEVAYHEKYPTIYHLRKKLVDSTDKADLRLIYLALAHMIKFRGHFLIEGDLNPDNSDVDKLFIQLVQTYNQLFEENPINASGVDAKAILSARLSKSRRLENLIAQLPGEKKNGLFGNLIALSLGLTPNFKSNFDLAEDAKLQLSKDTYDDDLDNLLAQIGDQYADLFLAAKNLSDAILLSDILRVNTEITKAPLSASMIKRYDEHHQDLTLLKALVRQQLPEKYKEIFFDQSKNGYAGYIDGGASQEEFYKFIKPILEKMDGTEELLVKLNREDLLRKQRTFDNGSIPHQIHLGELHAILRRQEDFYPFLKDNREKIEKILTFRIPYYVGPLARGNSRFAWMTRKSEETITPWNFEEVVDKGASAQSFIERMTNFDKNLPNEKVLPKHSLLYEYFTVYNELTKVKYVTEGMRKPAFLSGEQKKAIVDLLFKTNRKVTVKQLKEDYFKKIECFDSVEISGVEDRFNASLGTYHDLLKIIKDKDFLDNEENEDILEDIVLTLTLFEDREMIEERLKTYAHLFDDKVMKQLKRRRYTGWGRLSRKLINGIRDKQSGKTILDFLKSDGFANRNFMQLIHDDSLTFKEDIQKAQVSGQGDSLHEHIANLAGSPAIKKGILQTVKVVDELVKVMGRHKPENIVIEMARENQTTQKGQKNSRERMKRIEEGIKELGSQILKEHPVENTQLQNEKLYLYYLQNGRDMYVDQELDINRLSDYDVDHIVPQSFLKDDSIDNKVLTRSDKARGKSDNVPSEEVVKKMKNYWRQLLNAKLITQRKFDNLTKAERGGLSELDKAGFIKRQLVETRQITKHVAQILDSRMNTKYDENDKLIREVKVITLKSKLVSDFRKDFQFYKVREINNYHHAHDAYLNAVVGTALIKKYPKLESEFVYGDYKVYDVRKMIAKSEQEIGKATAKYFFYSNIMNFFKTEITLANGEIRKRPLIETNGETGEIVWDKGRDFATVRKVLSMPQVNIVKKTEVQTGGFSKESILPKRNSDKLIARKKDWDPKKYGGFDSPTVAYSVLVVAKVEKGKSKKLKSVKELLGITIMERSSFEKNPIDFLEAKGYKEVKKDLIIKLPKYSLFELENGRKRMLASAGELQKGNELALPSKYVNFLYLASHYEKLKGSPEDNEQKQLFVEQHKHYLDEIIEQISEFSKRVILADANLDKVLSAYNKHRDKPIREQAENIIHLFTLTNLGAPAAFKYFDTTIDRKRYTSTKEVLDATLIHQSITGLYETRIDLSQLGGDGGEAAAKGGSPAPGGVPWILKKPLELTIKLDLEEQQGTLLNNSILSKKGKEELKQLFEKYSALWQSWENQVGHRRIRPHKIATGTVKPTPQKQYHINPKAKPDIQIVINDLLKQGVLIQKESTMNTPVYPVPKPNGRWRMVLDYRAVNKVTPLIAVQNQHSYGILGSLFKGRYKTTIDLSNGFWAHPIVPEDYWITAFTWQGKQYCWTVLPQGFLNSPGLFTGDVVDLLQGIPNVEVYVDDVYISHDSEKEHLEYLDILFNRLKEAGYIISLKKSNIANSIVDFLGFQITNEGRGLTDTFKEKLENITAPTTLKQLQSILGLLNFARNFIPDFTELIAPLYALIPKSTKNYVPWQIEHSTTLETLITKLNGAEYLQGRKGDKTLIMKVNASYTTGYIRYYNEGEKKPISYVSIVFSKTELKFTELEKLLTTVHKGLLKALDLSMGQNIHVYSPIVSMQNIQKTPQTAKKALASRWLSWLSYLEDPRIRFFYDPQMPALKDLPAVDTGKDNKKHPSNFQHIFYTDGSAITSPTKEGHLNAGMGIVYFINKDGNLQKQQEWSISLGNHTAQFAEIAAFEFALKKCLPLGGNILVVTDSNYVAKAYNEELDVWASNGFVNNRKKPLKHISKWKSVADLKRLRPDVVVTHEPGHQKLDSSPHAYGNNLADQLATQASFKVHAGKRTADGSEFEKRTADGSEFESPKKKAKVE

SEQ ID NO: 766 - protein, 2085 aa, synthetic construct
MPAAKRVKLDGGDKKYSIGLDIGTNSVGWAVITDEYKVPSKKFKVLGNTDRHSIKKNLIGALLFDSGETAEATRLKRTARRRYTRRKNRICYLQEIFSNEMAKVDDSFFHRLEESFLVEEDKKHERHPIFGNIVDEVAYHEKYPTIYHLRKKLVDSTDKADLRLIYLALAHMIKFRGHFLIEGDLNPDNSDVDKLFIQLVQTYNQLFEENPINASGVDAKAILSARLSKSRRLENLIAQLPGEKKNGLFGNLIALSLGLTPNFKSNFDLAEDAKLQLSKDTYDDDLDNLLAQIGDQYADLFLAAKNLSDAILLSDILRVNTEITKAPLSASMIKRYDEHHQDLTLLKALVRQQLPEKYKEIFFDQSKNGYAGYIDGGASQEEFYKFIKPILEKMDGTEELLVKLNREDLLRKQRTFDNGSIPHQIHLGELHAILRRQEDFYPFLKDNREKIEKILTFRIPYYVGPLARGNSRFAWMTRKSEETITPWNFEEVVDKGASAQSFIERMTNFDKNLPNEKVLPKHSLLYEYFTVYNELTKVKYVTEGMRKPAFLSGEQKKAIVDLLFKTNRKVTVKQLKEDYFKKIECFDSVEISGVEDRFNASLGTYHDLLKIIKDKDFLDNEENEDILEDIVLTLTLFEDREMIEERLKTYAHLFDDKVMKQLKRRRYTGWGRLSRKLINGIRDKQSGKTILDFLKSDGFANRNFMQLIHDDSLTFKEDIQKAQVSGQGDSLHEHIANLAGSPAIKKGILQTVKVVDELVKVMGRHKPENIVIEMARENQTTQKGQKNSRERMKRIEEGIKELGSQILKEHPVENTQLQNEKLYLYYLQNGRDMYVDQELDINRLSDYDVDHIVPQSFLKDDSIDNKVLTRSDKARGKSDNVPSEEVVKKMKNYWRQLLNAKLITQRKFDNLTKAERGGLSELDKAGFIKRQLVETRQITKHVAQILDSRMNTKYDENDKLIREVKVITLKSKLVSDFRKDFQFYKVREINNYHHAHDAYLNAVVGTALIKKYPKLESEFVYGDYKVYDVRKMIAKSEQEIGKATAKYFFYSNIMNFFKTEITLANGEIRKRPLIETNGETGEIVWDKGRDFATVRKVLSMPQVNIVKKTEVQTGGFSKESILPKRNSDKLIARKKDWDPKKYGGFDSPTVAYSVLVVAKVEKGKSKKLKSVKELLGITIMERSSFEKNPIDFLEAKGYKEVKKDLIIKLPKYSLFELENGRKRMLASAGELQKGNELALPSKYVNFLYLASHYEKLKGSPEDNEQKQLFVEQHKHYLDEIIEQISEFSKRVILADANLDKVLSAYNKHRDKPIREQAENIIHLFTLTNLGAPAAFKYFDTTIDRKRYTSTKEVLDATLIHQSITGLYETRIDLSQLGGDGGGSSGGGGGSGGVPWILKKPLELTIKLDLEEQQGTLLNNSILSKKGKEELKQLFEKYSALWQSWENQVGHRRIRPHKIATGTVKPTPQKQYHINPKAKPDIQIVINDLLKQGVLIQKESTMNTPVYPVPKPNGRWRMVLDYRAVNKVTPLIAVQNQHSYGILGSLFKGRYKTTIDLSNGFWAHPIVPEDYWITAFTWQGKQYCWTVLPQGFLNSPGLFTGDVVDLLQGIPNVEVYVDDVYISHDSEKEHLEYLDILFNRLKEAGYIISLKKSNIANSIVDFLGFQITNEGRGLTDTFKEKLENITAPTTLKQLQSILGLLNFARNFIPDFTELIAPLYALIPKSTKNYVPWQIEHSTTLETLITKLNGAEYLQGRKGDKTLIMKVNASYTTGYIRYYNEGEKKPISYVSIVFSKTELKFTELEKLLTTVHKGLLKALDLSMGQNIHVYSPIVSMQNIQKTPQTAKKALASRWLSWLSYLEDPRIRFFYDPQMPALKDLPAVDTGKDNKKHPSNFQHIFYTDGSAITSPTKEGHLNAGMGIVYFINKDGNLQKQQEWSISLGNHTAQFAEIAAFEFALKKCLPLGGNILVVTDSNYVAKAYNEELDVWASNGFVNNRKKPLKHISKWKSVADLKRLRPDVVVTHEPGHQKLDSSPHAYGNNLADQLATQASFKVHAGKRTADGSEFEKRTADGSEFESPKKKAKVE

SEQ ID NO: 767 - protein, 2087 aa, synthetic construct
MPAAKRVKLDGGDKKYSIGLDIGTNSVGWAVITDEYKVPSKKFKVLGNTDRHSIKKNLIGALLFDSGETAEATRLKRTARRRYTRRKNRICYLQEIFSNEMAKVDDSFFHRLEESFLVEEDKKHERHPIFGNIVDEVAYHEKYPTIYHLRKKLVDSTDKADLRLIYLALAHMIKFRGHFLIEGDLNPDNSDVDKLFIQLVQTYNQLFEENPINASGVDAKAILSARLSKSRRLENLIAQLPGEKKNGLFGNLIALSLGLTPNFKSNFDLAEDAKLQLSKDTYDDDLDNLLAQIGDQYADLFLAAKNLSDAILLSDILRVNTEITKAPLSASMIKRYDEHHQDLTLLKALVRQQLPEKYKEIFFDQSKNGYAGYIDGGASQEEFYKFIKPILEKMDGTEELLVKLNREDLLRKQRTFDNGSIPHQIHLGELHAILRRQEDFYPFLKDNREKIEKILTFRIPYYVGPLARGNSRFAWMTRKSEETITPWNFEEVVDKGASAQSFIERMTNFDKNLPNEKVLPKHSLLYEYFTVYNELTKVKYVTEGMRKPAFLSGEQKKAIVDLLFKTNRKVTVKQLKEDYFKKIECFDSVEISGVEDRFNASLGTYHDLLKIIKDKDFLDNEENEDILEDIVLTLTLFEDREMIEERLKTYAHLFDDKVMKQLKRRRYTGWGRLSRKLINGIRDKQSGKTILDFLKSDGFANRNFMQLIHDDSLTFKEDIQKAQVSGQGDSLHEHIANLAGSPAIKKGILQTVKVVDELVKVMGRHKPENIVIEMARENQTTQKGQKNSRERMKRIEEGIKELGSQILKEHPVENTQLQNEKLYLYYLQNGRDMYVDQELDINRLSDYDVDHIVPQSFLKDDSIDNKVLTRSDKARGKSDNVPSEEVVKKMKNYWRQLLNAKLITQRKFDNLTKAERGGLSELDKAGFIKRQLVETRQITKHVAQILDSRMNTKYDENDKLIREVKVITLKSKLVSDFRKDFQFYKVREINNYHHAHDAYLNAVVGTALIKKYPKLESEFVYGDYKVYDVRKMIAKSEQEIGKATAKYFFYSNIMNFFKTEITLANGEIRKRPLIETNGETGEIVWDKGRDFATVRKVLSMPQVNIVKKTEVQTGGFSKESILPKRNSDKLIARKKDWDPKKYGGFDSPTVAYSVLVVAKVEKGKSKKLKSVKELLGITIMERSSFEKNPIDFLEAKGYKEVKKDLIIKLPKYSLFELENGRKRMLASAGELQKGNELALPSKYVNFLYLASHYEKLKGSPEDNEQKQLFVEQHKHYLDEIIEQISEFSKRVILADANLDKVLSAYNKHRDKPIREQAENIIHLFTLTNLGAPAAFKYFDTTIDRKRYTSTKEVLDATLIHQSITGLYETRIDLSQLGGDGGPAPEAAAKGSSGGVPWILKKPLELTIKLDLEEQQGTLLNNSILSKKGKEELKQLFEKYSALWQSWENQVGHRRIRPHKIATGTVKPTPQKQYHINPKAKPDIQIVINDLLKQGVLIQKESTMNTPVYPVPKPNGRWRMVLDYRAVNKVTPLIAVQNQHSYGILGSLFKGRYKTTIDLSNGFWAHPIVPEDYWITAFTWQGKQYCWTVLPQGFLNSPGLFTGDVVDLLQGIPNVEVYVDDVYISHDSEKEHLEYLDILFNRLKEAGYIISLKKSNIANSIVDFLGFQITNEGRGLTDTFKEKLENITAPTTLKQLQSILGLLNFARNFIPDFTELIAPLYALIPKSTKNYVPWQIEHSTTLETLITKLNGAEYLQGRKGDKTLIMKVNASYTTGYIRYYNEGEKKPISYVSIVFSKTELKFTELEKLLTTVHKGLLKALDLSMGQNIHVYSPIVSMQNIQKTPQTAKKALASRWLSWLSYLEDPRIRFFYDPQMPALKDLPAVDTGKDNKKHPSNFQHIFYTDGSAITSPTKEGHLNAGMGIVYFINKDGNLQKQQEWSISLGNHTAQFAEIAAFEFALKKCLPLGGNILVVTDSNYVAKAYNEELDVWASNGFVNNRKKPLKHISKWKSVADLKRLRPDVVVTHEPGHQKLDSSPHAYGNNLADQLATQASFKVHAGKRTADGSEFEKRTADGSEFESPKKKAKVE

SEQ ID NO: 768 - protein, 2091 aa, synthetic construct
MPAAKRVKLDGGDKKYSIGLDIGTNSVGWAVITDEYKVPSKKFKVLGNTDRHSIKKNLIGALLFDSGETAEATRLKRTARRRYTRRKNRICYLQEIFSNEMAKVDDSFFHRLEESFLVEEDKKHERHPIFGNIVDEVAYHEKYPTIYHLRKKLVDSTDKADLRLIYLALAHMIKFRGHFLIEGDLNPDNSDVDKLFIQLVQTYNQLFEENPINASGVDAKAILSARLSKSRRLENLIAQLPGEKKNGLFGNLIALSLGLTPNFKSNFDLAEDAKLQLSKDTYDDDLDNLLAQIGDQYADLFLAAKNLSDAILLSDILRVNTEITKAPLSASMIKRYDEHHQDLTLLKALVRQQLPEKYKEIFFDQSKNGYAGYIDGGASQEEFYKFIKPILEKMDGTEELLVKLNREDLLRKQRTFDNGSIPHQIHLGELHAILRRQEDFYPFLKDNREKIEKILTFRIPYYVGPLARGNSRFAWMTRKSEETITPWNFEEVVDKGASAQSFIERMTNFDKNLPNEKVLPKHSLLYEYFTVYNELTKVKYVTEGMRKPAFLSGEQKKAIVDLLFKTNRKVTVKQLKEDYFKKIECFDSVEISGVEDRFNASLGTYHDLLKIIKDKDFLDNEENEDILEDIVLTLTLFEDREMIEERLKTYAHLFDDKVMKQLKRRRYTGWGRLSRKLINGIRDKQSGKTILDFLKSDGFANRNFMQLIHDDSLTFKEDIQKAQVSGQGDSLHEHIANLAGSPAIKKGILQTVKVVDELVKVMGRHKPENIVIEMARENQTTQKGQKNSRERMKRIEEGIKELGSQILKEHPVENTQLQNEKLYLYYLQNGRDMYVDQELDINRLSDYDVDHIVPQSFLKDDSIDNKVLTRSDKARGKSDNVPSEEVVKKMKNYWRQLLNAKLITQRKFDNLTKAERGGLSELDKAGFIKRQLVETRQITKHVAQILDSRMNTKYDENDKLIREVKVITLKSKLVSDFRKDFQFYKVREINNYHHAHDAYLNAVVGTALIKKYPKLESEFVYGDYKVYDVRKMIAKSEQEIGKATAKYFFYSNIMNFFKTEITLANGEIRKRPLIETNGETGEIVWDKGRDFATVRKVLSMPQVNIVKKTEVQTGGFSKESILPKRNSDKLIARKKDWDPKKYGGFDSPTVAYSVLVVAKVEKGKSKKLKSVKELLGITIMERSSFEKNPIDFLEAKGYKEVKKDLIIKLPKYSLFELENGRKRMLASAGELQKGNELALPSKYVNFLYLASHYEKLKGSPEDNEQKQLFVEQHKHYLDEIIEQISEFSKRVILADANLDKVLSAYNKHRDKPIREQAENIIHLFTLTNLGAPAAFKYFDTTIDRKRYTSTKEVLDATLIHQSITGLYETRIDLSQLGGDGGGGGGSEAAAKGGGGSGGVPWILKKPLELTIKLDLEEQQGTLLNNSILSKKGKEELKQLFEKYSALWQSWENQVGHRRIRPHKIATGTVKPTPQKQYHINPKAKPDIQIVINDLLKQGVLIQKESTMNTPVYPVPKPNGRWRMVLDYRAVNKVTPLIAVQNQHSYGILGSLFKGRYKTTIDLSNGFWAHPIVPEDYWITAFTWQGKQYCWTVLPQGFLNSPGLFTGDVVDLLQGIPNVEVYVDDVYISHDSEKEHLEYLDILFNRLKEAGYIISLKKSNIANSIVDFLGFQITNEGRGLTDTFKEKLENITAPTTLKQLQSILGLLNFARNFIPDFTELIAPLYALIPKSTKNYVPWQIEHSTTLETLITKLNGAEYLQGRKGDKTLIMKVNASYTTGYIRYYNEGEKKPISYVSIVFSKTELKFTELEKLLTTVHKGLLKALDLSMGQNIHVYSPIVSMQNIQKTPQTAKKALASRWLSWLSYLEDPRIRFFYDPQMPALKDLPAVDTGKDNKKHPSNFQHIFYTDGSAITSPTKEGHLNAGMGIVYFINKDGNLQKQQEWSISLGNHTAQFAEIAAFEFALKKCLPLGGNILVVTDSNYVAKAYNEELDVWASNGFVNNRKKPLKHISKWKSVADLKRLRPDVVVTHEPGHQKLDSSPHAYGNNLADQLATQASFKVHAGKRTADGSEFEKRTADGSEFESPKKKAKVE

SEQ ID NO: 769 - protein, 2087 aa, synthetic construct
MPAAKRVKLDGGDKKYSIGLDIGTNSVGWAVITDEYKVPSKKFKVLGNTDRHSIKKNLIGALLFDSGETAEATRLKRTARRRYTRRKNRICYLQEIFSNEMAKVDDSFFHRLEESFLVEEDKKHERHPIFGNIVDEVAYHEKYPTIYHLRKKLVDSTDKADLRLIYLALAHMIKFRGHFLIEGDLNPDNSDVDKLFIQLVQTYNQLFEENPINASGVDAKAILSARLSKSRRLENLIAQLPGEKKNGLFGNLIALSLGLTPNFKSNFDLAEDAKLQLSKDTYDDDLDNLLAQIGDQYADLFLAAKNLSDAILLSDILRVNTEITKAPLSASMIKRYDEHHQDLTLLKALVRQQLPEKYKEIFFDQSKNGYAGYIDGGASQEEFYKFIKPILEKMDGTEELLVKLNREDLLRKQRTFDNGSIPHQIHLGELHAILRRQEDFYPFLKDNREKIEKILTFRIPYYVGPLARGNSRFAWMTRKSEETITPWNFEEVVDKGASAQSFIERMTNFDKNLPNEKVLPKHSLLYEYFTVYNELTKVKYVTEGMRKPAFLSGEQKKAIVDLLFKTNRKVTVKQLKEDYFKKIECFDSVEISGVEDRFNASLGTYHDLLKIIKDKDFLDNEENEDILEDIVLTLTLFEDREMIEERLKTYAHLFDDKVMKQLKRRRYTGWGRLSRKLINGIRDKQSGKTILDFLKSDGFANRNFMQLIHDDSLTFKEDIQKAQVSGQGDSLHEHIANLAGSPAIKKGILQTVKVVDELVKVMGRHKPENIVIEMARENQTTQKGQKNSRERMKRIEEGIKELGSQILKEHPVENTQLQNEKLYLYYLQNGRDMYVDQELDINRLSDYDVDHIVPQSFLKDDSIDNKVLTRSDKARGKSDNVPSEEVVKKMKNYWRQLLNAKLITQRKFDNLTKAERGGLSELDKAGFIKRQLVETRQITKHVAQILDSRMNTKYDENDKLIREVKVITLKSKLVSDFRKDFQFYKVREINNYHHAHDAYLNAVVGTALIKKYPKLESEFVYGDYKVYDVRKMIAKSEQEIGKATAKYFFYSNIMNFFKTEITLANGEIRKRPLIETNGETGEIVWDKGRDFATVRKVLSMPQVNIVKKTEVQTGGFSKESILPKRNSDKLIARKKDWDPKKYGGFDSPTVAYSVLVVAKVEKGKSKKLKSVKELLGITIMERSSFEKNPIDFLEAKGYKEVKKDLIIKLPKYSLFELENGRKRMLASAGELQKGNELALPSKYVNFLYLASHYEKLKGSPEDNEQKQLFVEQHKHYLDEIIEQISEFSKRVILADANLDKVLSAYNKHRDKPIREQAENIIHLFTLTNLGAPAAFKYFDTTIDRKRYTSTKEVLDATLIHQSITGLYETRIDLSQLGGDGGGGGGSSEAAAKGGVPWILKKPLELTIKLDLEEQQGTLLNNSILSKKGKEELKQLFEKYSALWQSWENQVGHRRIRPHKIATGTVKPTPQKQYHINPKAKPDIQIVINDLLKQGVLIQKESTMNTPVYPVPKPNGRWRMVLDYRAVNKVTPLIAVQNQHSYGILGSLFKGRYKTTIDLSNGFWAHPIVPEDYWITAFTWQGKQYCWTVLPQGFLNSPGLFTGDVVDLLQGIPNVEVYVDDVYISHDSEKEHLEYLDILFNRLKEAGYIISLKKSNIANSIVDFLGFQITNEGRGLTDTFKEKLENITAPTTLKQLQSILGLLNFARNFIPDFTELIAPLYALIPKSTKNYVPWQIEHSTTLETLITKLNGAEYLQGRKGDKTLIMKVNASYTTGYIRYYNEGEKKPISYVSIVFSKTELKFTELEKLLTTVHKGLLKALDLSMGQNIHVYSPIVSMQNIQKTPQTAKKALASRWLSWLSYLEDPRIRFFYDPQMPALKDLPAVDTGKDNKKHPSNFQHIFYTDGSAITSPTKEGHLNAGMGIVYFINKDGNLQKQQEWSISLGNHTAQFAEIAAFEFALKKCLPLGGNILVVTDSNYVAKAYNEELDVWASNGFVNNRKKPLKHISKWKSVADLKRLRPDVVVTHEPGHQKLDSSPHAYGNNLADQLATQASFKVHAGKRTADGSEFEKRTADGSEFESPKKKAKVE

SEQ ID NO: 770 - protein, 2087 aa, synthetic construct
MPAAKRVKLDGGDKKYSIGLDIGTNSVGWAVITDEYKVPSKKFKVLGNTDRHSIKKNLIGALLFDSGETAEATRLKRTARRRYTRRKNRICYLQEIFSNEMAKVDDSFFHRLEESFLVEEDKKHERHPIFGNIVDEVAYHEKYPTIYHLRKKLVDSTDKADLRLIYLALAHMIKFRGHFLIEGDLNPDNSDVDKLFIQLVQTYNQLFEENPINASGVDAKAILSARLSKSRRLENLIAQLPGEKKNGLFGNLIALSLGLTPNFKSNFDLAEDAKLQLSKDTYDDDLDNLLAQIGDQYADLFLAAKNLSDAILLSDILRVNTEITKAPLSASMIKRYDEHHQDLTLLKALVRQQLPEKYKEIFFDQSKNGYAGYIDGGASQEEFYKFIKPILEKMDGTEELLVKLNREDLLRKQRTFDNGSIPHQIHLGELHAILRRQEDFYPFLKDNREKIEKILTFRIPYYVGPLARGNSRFAWMTRKSEETITPWNFEEVVDKGASAQSFIERMTNFDKNLPNEKVLPKHSLLYEYFTVYNELTKVKYVTEGMRKPAFLSGEQKKAIVDLLFKTNRKVTVKQLKEDYFKKIECFDSVEISGVEDRFNASLGTYHDLLKIIKDKDFLDNEENEDILEDIVLTLTLFEDREMIEERLKTYAHLFDDKVMKQLKRRRYTGWGRLSRKLINGIRDKQSGKTILDFLKSDGFANRNFMQLIHDDSLTFKEDIQKAQVSGQGDSLHEHIANLAGSPAIKKGILQTVKVVDELVKVMGRHKPENIVIEMARENQTTQKGQKNSRERMKRIEEGIKELGSQILKEHPVENTQLQNEKLYLYYLQNGRDMYVDQELDINRLSDYDVDHIVPQSFLKDDSIDNKVLTRSDKARGKSDNVPSEEVVKKMKNYWRQLLNAKLITQRKFDNLTKAERGGLSELDKAGFIKRQLVETRQITKHVAQILDSRMNTKYDENDKLIREVKVITLKSKLVSDFRKDFQFYKVREINNYHHAHDAYLNAVVGTALIKKYPKLESEFVYGDYKVYDVRKMIAKSEQEIGKATAKYFFYSNIMNFFKTEITLANGEIRKRPLIETNGETGEIVWDKGRDFATVRKVLSMPQVNIVKKTEVQTGGFSKESILPKRNSDKLIARKKDWDPKKYGGFDSPTVAYSVLVVAKVEKGKSKKLKSVKELLGITIMERSSFEKNPIDFLEAKGYKEVKKDLIIKLPKYSLFELENGRKRMLASAGELQKGNELALPSKYVNFLYLASHYEKLKGSPEDNEQKQLFVEQHKHYLDEIIEQISEFSKRVILADANLDKVLSAYNKHRDKPIREQAENIIHLFTLTNLGAPAAFKYFDTTIDRKRYTSTKEVLDATLIHQSITGLYETRIDLSQLGGDGGGGGEAAAKGSSGGVPWILKKPLELTIKLDLEEQQGTLLNNSILSKKGKEELKQLFEKYSALWQSWENQVGHRRIRPHKIATGTVKPTPQKQYHINPKAKPDIQIVINDLLKQGVLIQKESTMNTPVYPVPKPNGRWRMVLDYRAVNKVTPLIAVQNQHSYGILGSLFKGRYKTTIDLSNGFWAHPIVPEDYWITAFTWQGKQYCWTVLPQGFLNSPGLFTGDVVDLLQGIPNVEVYVDDVYISHDSEKEHLEYLDILFNRLKEAGYIISLKKSNIANSIVDFLGFQITNEGRGLTDTFKEKLENITAPTTLKQLQSILGLLNFARNFIPDFTELIAPLYALIPKSTKNYVPWQIEHSTTLETLITKLNGAEYLQGRKGDKTLIMKVNASYTTGYIRYYNEGEKKPISYVSIVFSKTELKFTELEKLLTTVHKGLLKALDLSMGQNIHVYSPIVSMQNIQKTPQTAKKALASRWLSWLSYLEDPRIRFFYDPQMPALKDLPAVDTGKDNKKHPSNFQHIFYTDGSAITSPTKEGHLNAGMGIVYFINKDGNLQKQQEWSISLGNHTAQFAEIAAFEFALKKCLPLGGNILVVTDSNYVAKAYNEELDVWASNGFVNNRKKPLKHISKWKSVADLKRLRPDVVVTHEPGHQKLDSSPHAYGNNLADQLATQASFKVHAGKRTADGSEFEKRTADGSEFESPKKKAKVE

SEQ ID NO: 771 - protein, 2082 aa, synthetic construct
MPAAKRVKLDGGDKKYSIGLDIGTNSVGWAVITDEYKVPSKKFKVLGNTDRHSIKKNLIGALLFDSGETAEATRLKRTARRRYTRRKNRICYLQEIFSNEMAKVDDSFFHRLEESFLVEEDKKHERHPIFGNIVDEVAYHEKYPTIYHLRKKLVDSTDKADLRLIYLALAHMIKFRGHFLIEGDLNPDNSDVDKLFIQLVQTYNQLFEENPINASGVDAKAILSARLSKSRRLENLIAQLPGEKKNGLFGNLIALSLGLTPNFKSNFDLAEDAKLQLSKDTYDDDLDNLLAQIGDQYADLFLAAKNLSDAILLSDILRVNTEITKAPLSASMIKRYDEHHQDLTLLKALVRQQLPEKYKEIFFDQSKNGYAGYIDGGASQEEFYKFIKPILEKMDGTEELLVKLNREDLLRKQRTFDNGSIPHQIHLGELHAILRRQEDFYPFLKDNREKIEKILTFRIPYYVGPLARGNSRFAWMTRKSEETITPWNFEEVVDKGASAQSFIERMTNFDKNLPNEKVLPKHSLLYEYFTVYNELTKVKYVTEGMRKPAFLSGEQKKAIVDLLFKTNRKVTVKQLKEDYFKKIECFDSVEISGVEDRFNASLGTYHDLLKIIKDKDFLDNEENEDILEDIVLTLTLFEDREMIEERLKTYAHLFDDKVMKQLKRRRYTGWGRLSRKLINGIRDKQSGKTILDFLKSDGFANRNFMQLIHDDSLTFKEDIQKAQVSGQGDSLHEHIANLAGSPAIKKGILQTVKVVDELVKVMGRHKPENIVIEMARENQTTQKGQKNSRERMKRIEEGIKELGSQILKEHPVENTQLQNEKLYLYYLQNGRDMYVDQELDINRLSDYDVDHIVPQSFLKDDSIDNKVLTRSDKARGKSDNVPSEEVVKKMKNYWRQLLNAKLITQRKFDNLTKAERGGLSELDKAGFIKRQLVETRQITKHVAQILDSRMNTKYDENDKLIREVKVITLKSKLVSDFRKDFQFYKVREINNYHHAHDAYLNAVVGTALIKKYPKLESEFVYGDYKVYDVRKMIAKSEQEIGKATAKYFFYSNIMNFFKTEITLANGEIRKRPLIETNGETGEIVWDKGRDFATVRKVLSMPQVNIVKKTEVQTGGFSKESILPKRNSDKLIARKKDWDPKKYGGFDSPTVAYSVLVVAKVEKGKSKKLKSVKELLGITIMERSSFEKNPIDFLEAKGYKEVKKDLIIKLPKYSLFELENGRKRMLASAGELQKGNELALPSKYVNFLYLASHYEKLKGSPEDNEQKQLFVEQHKHYLDEIIEQISEFSKRVILADANLDKVLSAYNKHRDKPIREQAENIIHLFTLTNLGAPAAFKYFDTTIDRKRYTSTKEVLDATLIHQSITGLYETRIDLSQLGGDGGGSSGGGGGVPWILKKPLELTIKLDLEEQQGTLLNNSILSKKGKEELKQLFEKYSALWQSWENQVGHRRIRPHKIATGTVKPTPQKQYHINPKAKPDIQIVINDLLKQGVLIQKESTMNTPVYPVPKPNGRWRMVLDYRAVNKVTPLIAVQNQHSYGILGSLFKGRYKTTIDLSNGFWAHPIVPEDYWITAFTWQGKQYCWTVLPQGFLNSPGLFTGDVVDLLQGIPNVEVYVDDVYISHDSEKEHLEYLDILFNRLKEAGYIISLKKSNIANSIVDFLGFQITNEGRGLTDTFKEKLENITAPTTLKQLQSILGLLNFARNFIPDFTELIAPLYALIPKSTKNYVPWQIEHSTTLETLITKLNGAEYLQGRKGDKTLIMKVNASYTTGYIRYYNEGEKKPISYVSIVFSKTELKFTELEKLLTTVHKGLLKALDLSMGQNIHVYSPIVSMQNIQKTPQTAKKALASRWLSWLSYLEDPRIRFFYDPQMPALKDLPAVDTGKDNKKHPSNFQHIFYTDGSAITSPTKEGHLNAGMGIVYFINKDGNLQKQQEWSISLGNHTAQFAEIAAFEFALKKCLPLGGNILVVTDSNYVAKAYNEELDVWASNGFVNNRKKPLKHISKWKSVADLKRLRPDVVVTHEPGHQKLDSSPHAYGNNLADQLATQASFKVHAGKRTADGSEFEKRTADGSEFESPKKKAKVE

SEQ ID NO: 772 - protein, 2087 aa, synthetic construct
MPAAKRVKLDGGDKKYSIGLDIGTNSVGWAVITDEYKVPSKKFKVLGNTDRHSIKKNLIGALLFDSGETAEATRLKRTARRRYTRRKNRICYLQEIFSNEMAKVDDSFFHRLEESFLVEEDKKHERHPIFGNIVDEVAYHEKYPTIYHLRKKLVDSTDKADLRLIYLALAHMIKFRGHFLIEGDLNPDNSDVDKLFIQLVQTYNQLFEENPINASGVDAKAILSARLSKSRRLENLIAQLPGEKKNGLFGNLIALSLGLTPNFKSNFDLAEDAKLQLSKDTYDDDLDNLLAQIGDQYADLFLAAKNLSDAILLSDILRVNTEITKAPLSASMIKRYDEHHQDLTLLKALVRQQLPEKYKEIFFDQSKNGYAGYIDGGASQEEFYKFIKPILEKMDGTEELLVKLNREDLLRKQRTFDNGSIPHQIHLGELHAILRRQEDFYPFLKDNREKIEKILTFRIPYYVGPLARGNSRFAWMTRKSEETITPWNFEEVVDKGASAQSFIERMTNFDKNLPNEKVLPKHSLLYEYFTVYNELTKVKYVTEGMRKPAFLSGEQKKAIVDLLFKTNRKVTVKQLKEDYFKKIECFDSVEISGVEDRFNASLGTYHDLLKIIKDKDFLDNEENEDILEDIVLTLTLFEDREMIEERLKTYAHLFDDKVMKQLKRRRYTGWGRLSRKLINGIRDKQSGKTILDFLKSDGFANRNFMQLIHDDSLTFKEDIQKAQVSGQGDSLHEHIANLAGSPAIKKGILQTVKVVDELVKVMGRHKPENIVIEMARENQTTQKGQKNSRERMKRIEEGIKELGSQILKEHPVENTQLQNEKLYLYYLQNGRDMYVDQELDINRLSDYDVDHIVPQSFLKDDSIDNKVLTRSDKARGKSDNVPSEEVVKKMKNYWRQLLNAKLITQRKFDNLTKAERGGLSELDKAGFIKRQLVETRQITKHVAQILDSRMNTKYDENDKLIREVKVITLKSKLVSDFRKDFQFYKVREINNYHHAHDAYLNAVVGTALIKKYPKLESEFVYGDYKVYDVRKMIAKSEQEIGKATAKYFFYSNIMNFFKTEITLANGEIRKRPLIETNGETGEIVWDKGRDFATVRKVLSMPQVNIVKKTEVQTGGFSKESILPKRNSDKLIARKKDWDPKKYGGFDSPTVAYSVLVVAKVEKGKSKKLKSVKELLGITIMERSSFEKNPIDFLEAKGYKEVKKDLIIKLPKYSLFELENGRKRMLASAGELQKGNELALPSKYVNFLYLASHYEKLKGSPEDNEQKQLFVEQHKHYLDEIIEQISEFSKRVILADANLDKVLSAYNKHRDKPIREQAENIIHLFTLTNLGAPAAFKYFDTTIDRKRYTSTKEVLDATLIHQSITGLYETRIDLSQLGGDGGEAAAKPAPGGSGGVPWILKKPLELTIKLDLEEQQGTLLNNSILSKKGKEELKQLFEKYSALWQSWENQVGHRRIRPHKIATGTVKPTPQKQYHINPKAKPDIQIVINDLLKQGVLIQKESTMNTPVYPVPKPNGRWRMVLDYRAVNKVTPLIAVQNQHSYGILGSLFKGRYKTTIDLSNGFWAHPIVPEDYWITAFTWQGKQYCWTVLPQGFLNSPGLFTGDVVDLLQGIPNVEVYVDDVYISHDSEKEHLEYLDILFNRLKEAGYIISLKKSNIANSIVDFLGFQITNEGRGLTDTFKEKLENITAPTTLKQLQSILGLLNFARNFIPDFTELIAPLYALIPKSTKNYVPWQIEHSTTLETLITKLNGAEYLQGRKGDKTLIMKVNASYTTGYIRYYNEGEKKPISYVSIVFSKTELKFTELEKLLTTVHKGLLKALDLSMGQNIHVYSPIVSMQNIQKTPQTAKKALASRWLSWLSYLEDPRIRFFYDPQMPALKDLPAVDTGKDNKKHPSNFQHIFYTDGSAITSPTKEGHLNAGMGIVYFINKDGNLQKQQEWSISLGNHTAQFAEIAAFEFALKKCLPLGGNILVVTDSNYVAKAYNEELDVWASNGFVNNRKKPLKHISKWKSVADLKRLRPDVVVTHEPGHQKLDSSPHAYGNNLADQLATQASFKVHAGKRTADGSEFEKRTADGSEFESPKKKAKVE

SEQ ID NO: 773 - protein, 2088 aa, synthetic construct
MPAAKRVKLDGGDKKYSIGLDIGTNSVGWAVITDEYKVPSKKFKVLGNTDRHSIKKNLIGALLFDSGETAEATRLKRTARRRYTRRKNRICYLQEIFSNEMAKVDDSFFHRLEESFLVEEDKKHERHPIFGNIVDEVAYHEKYPTIYHLRKKLVDSTDKADLRLIYLALAHMIKFRGHFLIEGDLNPDNSDVDKLFIQLVQTYNQLFEENPINASGVDAKAILSARLSKSRRLENLIAQLPGEKKNGLFGNLIALSLGLTPNFKSNFDLAEDAKLQLSKDTYDDDLDNLLAQIGDQYADLFLAAKNLSDAILLSDILRVNTEITKAPLSASMIKRYDEHHQDLTLLKALVRQQLPEKYKEIFFDQSKNGYAGYIDGGASQEEFYKFIKPILEKMDGTEELLVKLNREDLLRKQRTFDNGSIPHQIHLGELHAILRRQEDFYPFLKDNREKIEKILTFRIPYYVGPLARGNSRFAWMTRKSEETITPWNFEEVVDKGASAQSFIERMTNFDKNLPNEKVLPKHSLLYEYFTVYNELTKVKYVTEGMRKPAFLSGEQKKAIVDLLFKTNRKVTVKQLKEDYFKKIECFDSVEISGVEDRFNASLGTYHDLLKIIKDKDFLDNEENEDILEDIVLTLTLFEDREMIEERLKTYAHLFDDKVMKQLKRRRYTGWGRLSRKLINGIRDKQSGKTILDFLKSDGFANRNFMQLIHDDSLTFKEDIQKAQVSGQGDSLHEHIANLAGSPAIKKGILQTVKVVDELVKVMGRHKPENIVIEMARENQTTQKGQKNSRERMKRIEEGIKELGSQILKEHPVENTQLQNEKLYLYYLQNGRDMYVDQELDINRLSDYDVDHIVPQSFLKDDSIDNKVLTRSDKARGKSDNVPSEEVVKKMKNYWRQLLNAKLITQRKFDNLTKAERGGLSELDKAGFIKRQLVETRQITKHVAQILDSRMNTKYDENDKLIREVKVITLKSKLVSDFRKDFQFYKVREINNYHHAHDAYLNAVVGTALIKKYPKLESEFVYGDYKVYDVRKMIAKSEQEIGKATAKYFFYSNIMNFFKTEITLANGEIRKRPLIETNGETGEIVWDKGRDFATVRKVLSMPQVNIVKKTEVQTGGFSKESILPKRNSDKLIARKKDWDPKKYGGFDSPTVAYSVLVVAKVEKGKSKKLKSVKELLGITIMERSSFEKNPIDFLEAKGYKEVKKDLIIKLPKYSLFELENGRKRMLASAGELQKGNELALPSKYVNFLYLASHYEKLKGSPEDNEQKQLFVEQHKHYLDEIIEQISEFSKRVILADANLDKVLSAYNKHRDKPIREQAENIIHLFTLTNLGAPAAFKYFDTTIDRKRYTSTKEVLDATLIHQSITGLYETRIDLSQLGGDGGGSSGSSGSSGSSGGVPWILKKPLELTIKLDLEEQQGTLLNNSILSKKGKEELKQLFEKYSALWQSWENQVGHRRIRPHKIATGTVKPTPQKQYHINPKAKPDIQIVINDLLKQGVLIQKESTMNTPVYPVPKPNGRWRMVLDYRAVNKVTPLIAVQNQHSYGILGSLFKGRYKTTIDLSNGFWAHPIVPEDYWITAFTWQGKQYCWTVLPQGFLNSPGLFTGDVVDLLQGIPNVEVYVDDVYISHDSEKEHLEYLDILFNRLKEAGYIISLKKSNIANSIVDFLGFQITNEGRGLTDTFKEKLENITAPTTLKQLQSILGLLNFARNFIPDFTELIAPLYALIPKSTKNYVPWQIEHSTTLETLITKLNGAEYLQGRKGDKTLIMKVNASYTTGYIRYYNEGEKKPISYVSIVFSKTELKFTELEKLLTTVHKGLLKALDLSMGQNIHVYSPIVSMQNIQKTPQTAKKALASRWLSWLSYLEDPRIRFFYDPQMPALKDLPAVDTGKDNKKHPSNFQHIFYTDGSAITSPTKEGHLNAGMGIVYFINKDGNLQKQQEWSISLGNHTAQFAEIAAFEFALKKCLPLGGNILVVTDSNYVAKAYNEELDVWASNGFVNNRKKPLKHISKWKSVADLKRLRPDVVVTHEPGHQKLDSSPHAYGNNLADQLATQASFKVHAGKRTADGSEFEKRTADGSEFESPKKKAKVE

SEQ ID NO: 774 - protein, 2085 aa, synthetic construct
MPAAKRVKLDGGDKKYSIGLDIGTNSVGWAVITDEYKVPSKKFKVLGNTDRHSIKKNLIGALLFDSGETAEATRLKRTARRRYTRRKNRICYLQEIFSNEMAKVDDSFFHRLEESFLVEEDKKHERHPIFGNIVDEVAYHEKYPTIYHLRKKLVDSTDKADLRLIYLALAHMIKFRGHFLIEGDLNPDNSDVDKLFIQLVQTYNQLFEENPINASGVDAKAILSARLSKSRRLENLIAQLPGEKKNGLFGNLIALSLGLTPNFKSNFDLAEDAKLQLSKDTYDDDLDNLLAQIGDQYADLFLAAKNLSDAILLSDILRVNTEITKAPLSASMIKRYDEHHQDLTLLKALVRQQLPEKYKEIFFDQSKNGYAGYIDGGASQEEFYKFIKPILEKMDGTEELLVKLNREDLLRKQRTFDNGSIPHQIHLGELHAILRRQEDFYPFLKDNREKIEKILTFRIPYYVGPLARGNSRFAWMTRKSEETITPWNFEEVVDKGASAQSFIERMTNFDKNLPNEKVLPKHSLLYEYFTVYNELTKVKYVTEGMRKPAFLSGEQKKAIVDLLFKTNRKVTVKQLKEDYFKKIECFDSVEISGVEDRFNASLGTYHDLLKIIKDKDFLDNEENEDILEDIVLTLTLFEDREMIEERLKTYAHLFDDKVMKQLKRRRYTGWGRLSRKLINGIRDKQSGKTILDFLKSDGFANRNFMQLIHDDSLTFKEDIQKAQVSGQGDSLHEHIANLAGSPAIKKGILQTVKVVDELVKVMGRHKPENIVIEMARENQTTQKGQKNSRERMKRIEEGIKELGSQILKEHPVENTQLQNEKLYLYYLQNGRDMYVDQELDINRLSDYDVDHIVPQSFLKDDSIDNKVLTRSDKARGKSDNVPSEEVVKKMKNYWRQLLNAKLITQRKFDNLTKAERGGLSELDKAGFIKRQLVETRQITKHVAQILDSRMNTKYDENDKLIREVKVITLKSKLVSDFRKDFQFYKVREINNYHHAHDAYLNAVVGTALIKKYPKLESEFVYGDYKVYDVRKMIAKSEQEIGKATAKYFFYSNIMNFFKTEITLANGEIRKRPLIETNGETGEIVWDKGRDFATVRKVLSMPQVNIVKKTEVQTGGFSKESILPKRNSDKLIARKKDWDPKKYGGFDSPTVAYSVLVVAKVEKGKSKKLKSVKELLGITIMERSSFEKNPIDFLEAKGYKEVKKDLIIKLPKYSLFELENGRKRMLASAGELQKGNELALPSKYVNFLYLASHYEKLKGSPEDNEQKQLFVEQHKHYLDEIIEQISEFSKRVILADANLDKVLSAYNKHRDKPIREQAENIIHLFTLTNLGAPAAFKYFDTTIDRKRYTSTKEVLDATLIHQSITGLYETRIDLSQLGGDGGGGGGGSGSSGGVPWILKKPLELTIKLDLEEQQGTLLNNSILSKKGKEELKQLFEKYSALWQSWENQVGHRRIRPHKIATGTVKPTPQKQYHINPKAKPDIQIVINDLLKQGVLIQKESTMNTPVYPVPKPNGRWRMVLDYRAVNKVTPLIAVQNQHSYGILGSLFKGRYKTTIDLSNGFWAHPIVPEDYWITAFTWQGKQYCWTVLPQGFLNSPGLFTGDVVDLLQGIPNVEVYVDDVYISHDSEKEHLEYLDILFNRLKEAGYIISLKKSNIANSIVDFLGFQITNEGRGLTDTFKEKLENITAPTTLKQLQSILGLLNFARNFIPDFTELIAPLYALIPKSTKNYVPWQIEHSTTLETLITKLNGAEYLQGRKGDKTLIMKVNASYTTGYIRYYNEGEKKPISYVSIVFSKTELKFTELEKLLTTVHKGLLKALDLSMGQNIHVYSPIVSMQNIQKTPQTAKKALASRWLSWLSYLEDPRIRFFYDPQMPALKDLPAVDTGKDNKKHPSNFQHIFYTDGSAITSPTKEGHLNAGMGIVYFINKDGNLQKQQEWSISLGNHTAQFAEIAAFEFALKKCLPLGGNILVVTDSNYVAKAYNEELDVWASNGFVNNRKKPLKHISKWKSVADLKRLRPDVVVTHEPGHQKLDSSPHAYGNNLADQLATQASFKVHAGKRTADGSEFEKRTADGSEFESPKKKAKVE

SEQ ID NO: 775 - protein, 2085 aa, synthetic construct
MPAAKRVKLDGGDKKYSIGLDIGTNSVGWAVITDEYKVPSKKFKVLGNTDRHSIKKNLIGALLFDSGETAEATRLKRTARRRYTRRKNRICYLQEIFSNEMAKVDDSFFHRLEESFLVEEDKKHERHPIFGNIVDEVAYHEKYPTIYHLRKKLVDSTDKADLRLIYLALAHMIKFRGHFLIEGDLNPDNSDVDKLFIQLVQTYNQLFEENPINASGVDAKAILSARLSKSRRLENLIAQLPGEKKNGLFGNLIALSLGLTPNFKSNFDLAEDAKLQLSKDTYDDDLDNLLAQIGDQYADLFLAAKNLSDAILLSDILRVNTEITKAPLSASMIKRYDEHHQDLTLLKALVRQQLPEKYKEIFFDQSKNGYAGYIDGGASQEEFYKFIKPILEKMDGTEELLVKLNREDLLRKQRTFDNGSIPHQIHLGELHAILRRQEDFYPFLKDNREKIEKILTFRIPYYVGPLARGNSRFAWMTRKSEETITPWNFEEVVDKGASAQSFIERMTNFDKNLPNEKVLPKHSLLYEYFTVYNELTKVKYVTEGMRKPAFLSGEQKKAIVDLLFKTNRKVTVKQLKEDYFKKIECFDSVEISGVEDRFNASLGTYHDLLKIIKDKDFLDNEENEDILEDIVLTLTLFEDREMIEERLKTYAHLFDDKVMKQLKRRRYTGWGRLSRKLINGIRDKQSGKTILDFLKSDGFANRNFMQLIHDDSLTFKEDIQKAQVSGQGDSLHEHIANLAGSPAIKKGILQTVKVVDELVKVMGRHKPENIVIEMARENQTTQKGQKNSRERMKRIEEGIKELGSQILKEHPVENTQLQNEKLYLYYLQNGRDMYVDQELDINRLSDYDVDHIVPQSFLKDDSIDNKVLTRSDKARGKSDNVPSEEVVKKMKNYWRQLLNAKLITQRKFDNLTKAERGGLSELDKAGFIKRQLVETRQITKHVAQILDSRMNTKYDENDKLIREVKVITLKSKLVSDFRKDFQFYKVREINNYHHAHDAYLNAVVGTALIKKYPKLESEFVYGDYKVYDVRKMIAKSEQEIGKATAKYFFYSNIMNFFKTEITLANGEIRKRPLIETNGETGEIVWDKGRDFATVRKVLSMPQVNIVKKTEVQTGGFSKESILPKRNSDKLIARKKDWDPKKYGGFDSPTVAYSVLVVAKVEKGKSKKLKSVKELLGITIMERSSFEKNPIDFLEAKGYKEVKKDLIIKLPKYSLFELENGRKRMLASAGELQKGNELALPSKYVNFLYLASHYEKLKGSPEDNEQKQLFVEQHKHYLDEIIEQISEFSKRVILADANLDKVLSAYNKHRDKPIREQAENIIHLFTLTNLGAPAAFKYFDTTIDRKRYTSTKEVLDATLIHQSITGLYETRIDLSQLGGDGGGSSGGSPAPGGVPWILKKPLELTIKLDLEEQQGTLLNNSILSKKGKEELKQLFEKYSALWQSWENQVGHRRIRPHKIATGTVKPTPQKQYHINPKAKPDIQIVINDLLKQGVLIQKESTMNTPVYPVPKPNGRWRMVLDYRAVNKVTPLIAVQNQHSYGILGSLFKGRYKTTIDLSNGFWAHPIVPEDYWITAFTWQGKQYCWTVLPQGFLNSPGLFTGDVVDLLQGIPNVEVYVDDVYISHDSEKEHLEYLDILFNRLKEAGYIISLKKSNIANSIVDFLGFQITNEGRGLTDTFKEKLENITAPTTLKQLQSILGLLNFARNFIPDFTELIAPLYALIPKSTKNYVPWQIEHSTTLETLITKLNGAEYLQGRKGDKTLIMKVNASYTTGYIRYYNEGEKKPISYVSIVFSKTELKFTELEKLLTTVHKGLLKALDLSMGQNIHVYSPIVSMQNIQKTPQTAKKALASRWLSWLSYLEDPRIRFFYDPQMPALKDLPAVDTGKDNKKHPSNFQHIFYTDGSAITSPTKEGHLNAGMGIVYFINKDGNLQKQQEWSISLGNHTAQFAEIAAFEFALKKCLPLGGNILVVTDSNYVAKAYNEELDVWASNGFVNNRKKPLKHISKWKSVADLKRLRPDVVVTHEPGHQKLDSSPHAYGNNLADQLATQASFKVHAGKRTADGSEFEKRTADGSEFESPKKKAKVE

SEQ ID NO: 776 - protein, 2084 aa, synthetic construct
MPAAKRVKLDGGDKKYSIGLDIGTNSVGWAVITDEYKVPSKKFKVLGNTDRHSIKKNLIGALLFDSGETAEATRLKRTARRRYTRRKNRICYLQEIFSNEMAKVDDSFFHRLEESFLVEEDKKHERHPIFGNIVDEVAYHEKYPTIYHLRKKLVDSTDKADLRLIYLALAHMIKFRGHFLIEGDLNPDNSDVDKLFIQLVQTYNQLFEENPINASGVDAKAILSARLSKSRRLENLIAQLPGEKKNGLFGNLIALSLGLTPNFKSNFDLAEDAKLQLSKDTYDDDLDNLLAQIGDQYADLFLAAKNLSDAILLSDILRVNTEITKAPLSASMIKRYDEHHQDLTLLKALVRQQLPEKYKEIFFDQSKNGYAGYIDGGASQEEFYKFIKPILEKMDGTEELLVKLNREDLLRKQRTFDNGSIPHQIHLGELHAILRRQEDFYPFLKDNREKIEKILTFRIPYYVGPLARGNSRFAWMTRKSEETITPWNFEEVVDKGASAQSFIERMTNFDKNLPNEKVLPKHSLLYEYFTVYNELTKVKYVTEGMRKPAFLSGEQKKAIVDLLFKTNRKVTVKQLKEDYFKKIECFDSVEISGVEDRFNASLGTYHDLLKIIKDKDFLDNEENEDILEDIVLTLTLFEDREMIEERLKTYAHLFDDKVMKQLKRRRYTGWGRLSRKLINGIRDKQSGKTILDFLKSDGFANRNFMQLIHDDSLTFKEDIQKAQVSGQGDSLHEHIANLAGSPAIKKGILQTVKVVDELVKVMGRHKPENIVIEMARENQTTQKGQKNSRERMKRIEEGIKELGSQILKEHPVENTQLQNEKLYLYYLQNGRDMYVDQELDINRLSDYDVDHIVPQSFLKDDSIDNKVLTRSDKARGKSDNVPSEEVVKKMKNYWRQLLNAKLITQRKFDNLTKAERGGLSELDKAGFIKRQLVETRQITKHVAQILDSRMNTKYDENDKLIREVKVITLKSKLVSDFRKDFQFYKVREINNYHHAHDAYLNAVVGTALIKKYPKLESEFVYGDYKVYDVRKMIAKSEQEIGKATAKYFFYSNIMNFFKTEITLANGEIRKRPLIETNGETGEIVWDKGRDFATVRKVLSMPQVNIVKKTEVQTGGFSKESILPKRNSDKLIARKKDWDPKKYGGFDSPTVAYSVLVVAKVEKGKSKKLKSVKELLGITIMERSSFEKNPIDFLEAKGYKEVKKDLIIKLPKYSLFELENGRKRMLASAGELQKGNELALPSKYVNFLYLASHYEKLKGSPEDNEQKQLFVEQHKHYLDEIIEQISEFSKRVILADANLDKVLSAYNKHRDKPIREQAENIIHLFTLTNLGAPAAFKYFDTTIDRKRYTSTKEVLDATLIHQSITGLYETRIDLSQLGGDGGGGSEAAAKGGVPWILKKPLELTIKLDLEEQQGTLLNNSILSKKGKEELKQLFEKYSALWQSWENQVGHRRIRPHKIATGTVKPTPQKQYHINPKAKPDIQIVINDLLKQGVLIQKESTMNTPVYPVPKPNGRWRMVLDYRAVNKVTPLIAVQNQHSYGILGSLFKGRYKTTIDLSNGFWAHPIVPEDYWITAFTWQGKQYCWTVLPQGFLNSPGLFTGDVVDLLQGIPNVEVYVDDVYISHDSEKEHLEYLDILFNRLKEAGYIISLKKSNIANSIVDFLGFQITNEGRGLTDTFKEKLENITAPTTLKQLQSILGLLNFARNFIPDFTELIAPLYALIPKSTKNYVPWQIEHSTTLETLITKLNGAEYLQGRKGDKTLIMKVNASYTTGYIRYYNEGEKKPISYVSIVFSKTELKFTELEKLLTTVHKGLLKALDLSMGQNIHVYSPIVSMQNIQKTPQTAKKALASRWLSWLSYLEDPRIRFFYDPQMPALKDLPAVDTGKDNKKHPSNFQHIFYTDGSAITSPTKEGHLNAGMGIVYFINKDGNLQKQQEWSISLGNHTAQFAEIAAFEFALKKCLPLGGNILVVTDSNYVAKAYNEELDVWASNGFVNNRKKPLKHISKWKSVADLKRLRPDVVVTHEPGHQKLDSSPHAYGNNLADQLATQASFKVHAGKRTADGSEFEKRTADGSEFESPKKKAKVE

SEQ ID NO: 777 - protein, 2085 aa, synthetic construct
MPAAKRVKLDGGDKKYSIGLDIGTNSVGWAVITDEYKVPSKKFKVLGNTDRHSIKKNLIGALLFDSGETAEATRLKRTARRRYTRRKNRICYLQEIFSNEMAKVDDSFFHRLEESFLVEEDKKHERHPIFGNIVDEVAYHEKYPTIYHLRKKLVDSTDKADLRLIYLALAHMIKFRGHFLIEGDLNPDNSDVDKLFIQLVQTYNQLFEENPINASGVDAKAILSARLSKSRRLENLIAQLPGEKKNGLFGNLIALSLGLTPNFKSNFDLAEDAKLQLSKDTYDDDLDNLLAQIGDQYADLFLAAKNLSDAILLSDILRVNTEITKAPLSASMIKRYDEHHQDLTLLKALVRQQLPEKYKEIFFDQSKNGYAGYIDGGASQEEFYKFIKPILEKMDGTEELLVKLNREDLLRKQRTFDNGSIPHQIHLGELHAILRRQEDFYPFLKDNREKIEKILTFRIPYYVGPLARGNSRFAWMTRKSEETITPWNFEEVVDKGASAQSFIERMTNFDKNLPNEKVLPKHSLLYEYFTVYNELTKVKYVTEGMRKPAFLSGEQKKAIVDLLFKTNRKVTVKQLKEDYFKKIECFDSVEISGVEDRFNASLGTYHDLLKIIKDKDFLDNEENEDILEDIVLTLTLFEDREMIEERLKTYAHLFDDKVMKQLKRRRYTGWGRLSRKLINGIRDKQSGKTILDFLKSDGFANRNFMQLIHDDSLTFKEDIQKAQVSGQGDSLHEHIANLAGSPAIKKGILQTVKVVDELVKVMGRHKPENIVIEMARENQTTQKGQKNSRERMKRIEEGIKELGSQILKEHPVENTQLQNEKLYLYYLQNGRDMYVDQELDINRLSDYDVDHIVPQSFLKDDSIDNKVLTRSDKARGKSDNVPSEEVVKKMKNYWRQLLNAKLITQRKFDNLTKAERGGLSELDKAGFIKRQLVETRQITKHVAQILDSRMNTKYDENDKLIREVKVITLKSKLVSDFRKDFQFYKVREINNYHHAHDAYLNAVVGTALIKKYPKLESEFVYGDYKVYDVRKMIAKSEQEIGKATAKYFFYSNIMNFFKTEITLANGEIRKRPLIETNGETGEIVWDKGRDFATVRKVLSMPQVNIVKKTEVQTGGFSKESILPKRNSDKLIARKKDWDPKKYGGFDSPTVAYSVLVVAKVEKGKSKKLKSVKELLGITIMERSSFEKNPIDFLEAKGYKEVKKDLIIKLPKYSLFELENGRKRMLASAGELQKGNELALPSKYVNFLYLASHYEKLKGSPEDNEQKQLFVEQHKHYLDEIIEQISEFSKRVILADANLDKVLSAYNKHRDKPIREQAENIIHLFTLTNLGAPAAFKYFDTTIDRKRYTSTKEVLDATLIHQSITGLYETRIDLSQLGGDGGGGGGSSPAPGGVPWILKKPLELTIKLDLEEQQGTLLNNSILSKKGKEELKQLFEKYSALWQSWENQVGHRRIRPHKIATGTVKPTPQKQYHINPKAKPDIQIVINDLLKQGVLIQKESTMNTPVYPVPKPNGRWRMVLDYRAVNKVTPLIAVQNQHSYGILGSLFKGRYKTTIDLSNGFWAHPIVPEDYWITAFTWQGKQYCWTVLPQGFLNSPGLFTGDVVDLLQGIPNVEVYVDDVYISHDSEKEHLEYLDILFNRLKEAGYIISLKKSNIANSIVDFLGFQITNEGRGLTDTFKEKLENITAPTTLKQLQSILGLLNFARNFIPDFTELIAPLYALIPKSTKNYVPWQIEHSTTLETLITKLNGAEYLQGRKGDKTLIMKVNASYTTGYIRYYNEGEKKPISYVSIVFSKTELKFTELEKLLTTVHKGLLKALDLSMGQNIHVYSPIVSMQNIQKTPQTAKKALASRWLSWLSYLEDPRIRFFYDPQMPALKDLPAVDTGKDNKKHPSNFQHIFYTDGSAITSPTKEGHLNAGMGIVYFINKDGNLQKQQEWSISLGNHTAQFAEIAAFEFALKKCLPLGGNILVVTDSNYVAKAYNEELDVWASNGFVNNRKKPLKHISKWKSVADLKRLRPDVVVTHEPGHQKLDSSPHAYGNNLADQLATQASFKVHAGKRTADGSEFEKRTADGSEFESPKKKAKVE

SEQ ID NO: 778 - protein, 2091 aa, synthetic construct
MPAAKRVKLDGGDKKYSIGLDIGTNSVGWAVITDEYKVPSKKFKVLGNTDRHSIKKNLIGALLFDSGETAEATRLKRTARRRYTRRKNRICYLQEIFSNEMAKVDDSFFHRLEESFLVEEDKKHERHPIFGNIVDEVAYHEKYPTIYHLRKKLVDSTDKADLRLIYLALAHMIKFRGHFLIEGDLNPDNSDVDKLFIQLVQTYNQLFEENPINASGVDAKAILSARLSKSRRLENLIAQLPGEKKNGLFGNLIALSLGLTPNFKSNFDLAEDAKLQLSKDTYDDDLDNLLAQIGDQYADLFLAAKNLSDAILLSDILRVNTEITKAPLSASMIKRYDEHHQDLTLLKALVRQQLPEKYKEIFFDQSKNGYAGYIDGGASQEEFYKFIKPILEKMDGTEELLVKLNREDLLRKQRTFDNGSIPHQIHLGELHAILRRQEDFYPFLKDNREKIEKILTFRIPYYVGPLARGNSRFAWMTRKSEETITPWNFEEVVDKGASAQSFIERMTNFDKNLPNEKVLPKHSLLYEYFTVYNELTKVKYVTEGMRKPAFLSGEQKKAIVDLLFKTNRKVTVKQLKEDYFKKIECFDSVEISGVEDRFNASLGTYHDLLKIIKDKDFLDNEENEDILEDIVLTLTLFEDREMIEERLKTYAHLFDDKVMKQLKRRRYTGWGRLSRKLINGIRDKQSGKTILDFLKSDGFANRNFMQLIHDDSLTFKEDIQKAQVSGQGDSLHEHIANLAGSPAIKKGILQTVKVVDELVKVMGRHKPENIVIEMARENQTTQKGQKNSRERMKRIEEGIKELGSQILKEHPVENTQLQNEKLYLYYLQNGRDMYVDQELDINRLSDYDVDHIVPQSFLKDDSIDNKVLTRSDKARGKSDNVPSEEVVKKMKNYWRQLLNAKLITQRKFDNLTKAERGGLSELDKAGFIKRQLVETRQITKHVAQILDSRMNTKYDENDKLIREVKVITLKSKLVSDFRKDFQFYKVREINNYHHAHDAYLNAVVGTALIKKYPKLESEFVYGDYKVYDVRKMIAKSEQEIGKATAKYFFYSNIMNFFKTEITLANGEIRKRPLIETNGETGEIVWDKGRDFATVRKVLSMPQVNIVKKTEVQTGGFSKESILPKRNSDKLIARKKDWDPKKYGGFDSPTVAYSVLVVAKVEKGKSKKLKSVKELLGITIMERSSFEKNPIDFLEAKGYKEVKKDLIIKLPKYSLFELENGRKRMLASAGELQKGNELALPSKYVNFLYLASHYEKLKGSPEDNEQKQLFVEQHKHYLDEIIEQISEFSKRVILADANLDKVLSAYNKHRDKPIREQAENIIHLFTLTNLGAPAAFKYFDTTIDRKRYTSTKEVLDATLIHQSITGLYETRIDLSQLGGDGGEAAAKGGGGSEAAAKGGVPWILKKPLELTIKLDLEEQQGTLLNNSILSKKGKEELKQLFEKYSALWQSWENQVGHRRIRPHKIATGTVKPTPQKQYHINPKAKPDIQIVINDLLKQGVLIQKESTMNTPVYPVPKPNGRWRMVLDYRAVNKVTPLIAVQNQHSYGILGSLFKGRYKTTIDLSNGFWAHPIVPEDYWITAFTWQGKQYCWTVLPQGFLNSPGLFTGDVVDLLQGIPNVEVYVDDVYISHDSEKEHLEYLDILFNRLKEAGYIISLKKSNIANSIVDFLGFQITNEGRGLTDTFKEKLENITAPTTLKQLQSILGLLNFARNFIPDFTELIAPLYALIPKSTKNYVPWQIEHSTTLETLITKLNGAEYLQGRKGDKTLIMKVNASYTTGYIRYYNEGEKKPISYVSIVFSKTELKFTELEKLLTTVHKGLLKALDLSMGQNIHVYSPIVSMQNIQKTPQTAKKALASRWLSWLSYLEDPRIRFFYDPQMPALKDLPAVDTGKDNKKHPSNFQHIFYTDGSAITSPTKEGHLNAGMGIVYFINKDGNLQKQQEWSISLGNHTAQFAEIAAFEFALKKCLPLGGNILVVTDSNYVAKAYNEELDVWASNGFVNNRKKPLKHISKWKSVADLKRLRPDVVVTHEPGHQKLDSSPHAYGNNLADQLATQASFKVHAGKRTADGSEFEKRTADGSEFESPKKKAKVE

SEQ ID NO: 779 - protein, 2087 aa, synthetic construct
MPAAKRVKLDGGDKKYSIGLDIGTNSVGWAVITDEYKVPSKKFKVLGNTDRHSIKKNLIGALLFDSGETAEATRLKRTARRRYTRRKNRICYLQEIFSNEMAKVDDSFFHRLEESFLVEEDKKHERHPIFGNIVDEVAYHEKYPTIYHLRKKLVDSTDKADLRLIYLALAHMIKFRGHFLIEGDLNPDNSDVDKLFIQLVQTYNQLFEENPINASGVDAKAILSARLSKSRRLENLIAQLPGEKKNGLFGNLIALSLGLTPNFKSNFDLAEDAKLQLSKDTYDDDLDNLLAQIGDQYADLFLAAKNLSDAILLSDILRVNTEITKAPLSASMIKRYDEHHQDLTLLKALVRQQLPEKYKEIFFDQSKNGYAGYIDGGASQEEFYKFIKPILEKMDGTEELLVKLNREDLLRKQRTFDNGSIPHQIHLGELHAILRRQEDFYPFLKDNREKIEKILTFRIPYYVGPLARGNSRFAWMTRKSEETITPWNFEEVVDKGASAQSFIERMTNFDKNLPNEKVLPKHSLLYEYFTVYNELTKVKYVTEGMRKPAFLSGEQKKAIVDLLFKTNRKVTVKQLKEDYFKKIECFDSVEISGVEDRFNASLGTYHDLLKIIKDKDFLDNEENEDILEDIVLTLTLFEDREMIEERLKTYAHLFDDKVMKQLKRRRYTGWGRLSRKLINGIRDKQSGKTILDFLKSDGFANRNFMQLIHDDSLTFKEDIQKAQVSGQGDSLHEHIANLAGSPAIKKGILQTVKVVDELVKVMGRHKPENIVIEMARENQTTQKGQKNSRERMKRIEEGIKELGSQILKEHPVENTQLQNEKLYLYYLQNGRDMYVDQELDINRLSDYDVDHIVPQSFLKDDSIDNKVLTRSDKARGKSDNVPSEEVVKKMKNYWRQLLNAKLITQRKFDNLTKAERGGLSELDKAGFIKRQLVETRQITKHVAQILDSRMNTKYDENDKLIREVKVITLKSKLVSDFRKDFQFYKVREINNYHHAHDAYLNAVVGTALIKKYPKLESEFVYGDYKVYDVRKMIAKSEQEIGKATAKYFFYSNIMNFFKTEITLANGEIRKRPLIETNGETGEIVWDKGRDFATVRKVLSMPQVNIVKKTEVQTGGFSKESILPKRNSDKLIARKKDWDPKKYGGFDSPTVAYSVLVVAKVEKGKSKKLKSVKELLGITIMERSSFEKNPIDFLEAKGYKEVKKDLIIKLPKYSLFELENGRKRMLASAGELQKGNELALPSKYVNFLYLASHYEKLKGSPEDNEQKQLFVEQHKHYLDEIIEQISEFSKRVILADANLDKVLSAYNKHRDKPIREQAENIIHLFTLTNLGAPAAFKYFDTTIDRKRYTSTKEVLDATLIHQSITGLYETRIDLSQLGGDGGEAAAKGGSGSSGGVPWILKKPLELTIKLDLEEQQGTLLNNSILSKKGKEELKQLFEKYSALWQSWENQVGHRRIRPHKIATGTVKPTPQKQYHINPKAKPDIQIVINDLLKQGVLIQKESTMNTPVYPVPKPNGRWRMVLDYRAVNKVTPLIAVQNQHSYGILGSLFKGRYKTTIDLSNGFWAHPIVPEDYWITAFTWQGKQYCWTVLPQGFLNSPGLFTGDVVDLLQGIPNVEVYVDDVYISHDSEKEHLEYLDILFNRLKEAGYIISLKKSNIANSIVDFLGFQITNEGRGLTDTFKEKLENITAPTTLKQLQSILGLLNFARNFIPDFTELIAPLYALIPKSTKNYVPWQIEHSTTLETLITKLNGAEYLQGRKGDKTLIMKVNASYTTGYIRYYNEGEKKPISYVSIVFSKTELKFTELEKLLTTVHKGLLKALDLSMGQNIHVYSPIVSMQNIQKTPQTAKKALASRWLSWLSYLEDPRIRFFYDPQMPALKDLPAVDTGKDNKKHPSNFQHIFYTDGSAITSPTKEGHLNAGMGIVYFINKDGNLQKQQEWSISLGNHTAQFAEIAAFEFALKKCLPLGGNILVVTDSNYVAKAYNEELDVWASNGFVNNRKKPLKHISKWKSVADLKRLRPDVVVTHEPGHQKLDSSPHAYGNNLADQLATQASFKVHAGKRTADGSEFEKRTADGSEFESPKKKAKVE

SEQ ID NO: 780 - protein, 2085 aa, synthetic construct
MPAAKRVKLDGGDKKYSIGLDIGTNSVGWAVITDEYKVPSKKFKVLGNTDRHSIKKNLIGALLFDSGETAEATRLKRTARRRYTRRKNRICYLQEIFSNEMAKVDDSFFHRLEESFLVEEDKKHERHPIFGNIVDEVAYHEKYPTIYHLRKKLVDSTDKADLRLIYLALAHMIKFRGHFLIEGDLNPDNSDVDKLFIQLVQTYNQLFEENPINASGVDAKAILSARLSKSRRLENLIAQLPGEKKNGLFGNLIALSLGLTPNFKSNFDLAEDAKLQLSKDTYDDDLDNLLAQIGDQYADLFLAAKNLSDAILLSDILRVNTEITKAPLSASMIKRYDEHHQDLTLLKALVRQQLPEKYKEIFFDQSKNGYAGYIDGGASQEEFYKFIKPILEKMDGTEELLVKLNREDLLRKQRTFDNGSIPHQIHLGELHAILRRQEDFYPFLKDNREKIEKILTFRIPYYVGPLARGNSRFAWMTRKSEETITPWNFEEVVDKGASAQSFIERMTNFDKNLPNEKVLPKHSLLYEYFTVYNELTKVKYVTEGMRKPAFLSGEQKKAIVDLLFKTNRKVTVKQLKEDYFKKIECFDSVEISGVEDRFNASLGTYHDLLKIIKDKDFLDNEENEDILEDIVLTLTLFEDREMIEERLKTYAHLFDDKVMKQLKRRRYTGWGRLSRKLINGIRDKQSGKTILDFLKSDGFANRNFMQLIHDDSLTFKEDIQKAQVSGQGDSLHEHIANLAGSPAIKKGILQTVKVVDELVKVMGRHKPENIVIEMARENQTTQKGQKNSRERMKRIEEGIKELGSQILKEHPVENTQLQNEKLYLYYLQNGRDMYVDQELDINRLSDYDVDHIVPQSFLKDDSIDNKVLTRSDKARGKSDNVPSEEVVKKMKNYWRQLLNAKLITQRKFDNLTKAERGGLSELDKAGFIKRQLVETRQITKHVAQILDSRMNTKYDENDKLIREVKVITLKSKLVSDFRKDFQFYKVREINNYHHAHDAYLNAVVGTALIKKYPKLESEFVYGDYKVYDVRKMIAKSEQEIGKATAKYFFYSNIMNFFKTEITLANGEIRKRPLIETNGETGEIVWDKGRDFATVRKVLSMPQVNIVKKTEVQTGGFSKESILPKRNSDKLIARKKDWDPKKYGGFDSPTVAYSVLVVAKVEKGKSKKLKSVKELLGITIMERSSFEKNPIDFLEAKGYKEVKKDLIIKLPKYSLFELENGRKRMLASAGELQKGNELALPSKYVNFLYLASHYEKLKGSPEDNEQKQLFVEQHKHYLDEIIEQISEFSKRVILADANLDKVLSAYNKHRDKPIREQAENIIHLFTLTNLGAPAAFKYFDTTIDRKRYTSTKEVLDATLIHQSITGLYETRIDLSQLGGDGGGGSGGGPAPGGVPWILKKPLELTIKLDLEEQQGTLLNNSILSKKGKEELKQLFEKYSALWQSWENQVGHRRIRPHKIATGTVKPTPQKQYHINPKAKPDIQIVINDLLKQGVLIQKESTMNTPVYPVPKPNGRWRMVLDYRAVNKVTPLIAVQNQHSYGILGSLFKGRYKTTIDLSNGFWAHPIVPEDYWITAFTWQGKQYCWTVLPQGFLNSPGLFTGDVVDLLQGIPNVEVYVDDVYISHDSEKEHLEYLDILFNRLKEAGYIISLKKSNIANSIVDFLGFQITNEGRGLTDTFKEKLENITAPTTLKQLQSILGLLNFARNFIPDFTELIAPLYALIPKSTKNYVPWQIEHSTTLETLITKLNGAEYLQGRKGDKTLIMKVNASYTTGYIRYYNEGEKKPISYVSIVFSKTELKFTELEKLLTTVHKGLLKALDLSMGQNIHVYSPIVSMQNIQKTPQTAKKALASRWLSWLSYLEDPRIRFFYDPQMPALKDLPAVDTGKDNKKHPSNFQHIFYTDGSAITSPTKEGHLNAGMGIVYFINKDGNLQKQQEWSISLGNHTAQFAEIAAFEFALKKCLPLGGNILVVTDSNYVAKAYNEELDVWASNGFVNNRKKPLKHISKWKSVADLKRLRPDVVVTHEPGHQKLDSSPHAYGNNLADQLATQASFKVHAGKRTADGSEFEKRTADGSEFESPKKKAKVE

SEQ ID NO: 781 - protein, 2086 aa, synthetic construct
MPAAKRVKLDGGDKKYSIGLDIGTNSVGWAVITDEYKVPSKKFKVLGNTDRHSIKKNLIGALLFDSGETAEATRLKRTARRRYTRRKNRICYLQEIFSNEMAKVDDSFFHRLEESFLVEEDKKHERHPIFGNIVDEVAYHEKYPTIYHLRKKLVDSTDKADLRLIYLALAHMIKFRGHFLIEGDLNPDNSDVDKLFIQLVQTYNQLFEENPINASGVDAKAILSARLSKSRRLENLIAQLPGEKKNGLFGNLIALSLGLTPNFKSNFDLAEDAKLQLSKDTYDDDLDNLLAQIGDQYADLFLAAKNLSDAILLSDILRVNTEITKAPLSASMIKRYDEHHQDLTLLKALVRQQLPEKYKEIFFDQSKNGYAGYIDGGASQEEFYKFIKPILEKMDGTEELLVKLNREDLLRKQRTFDNGSIPHQIHLGELHAILRRQEDFYPFLKDNREKIEKILTFRIPYYVGPLARGNSRFAWMTRKSEETITPWNFEEVVDKGASAQSFIERMTNFDKNLPNEKVLPKHSLLYEYFTVYNELTKVKYVTEGMRKPAFLSGEQKKAIVDLLFKTNRKVTVKQLKEDYFKKIECFDSVEISGVEDRFNASLGTYHDLLKIIKDKDFLDNEENEDILEDIVLTLTLFEDREMIEERLKTYAHLFDDKVMKQLKRRRYTGWGRLSRKLINGIRDKQSGKTILDFLKSDGFANRNFMQLIHDDSLTFKEDIQKAQVSGQGDSLHEHIANLAGSPAIKKGILQTVKVVDELVKVMGRHKPENIVIEMARENQTTQKGQKNSRERMKRIEEGIKELGSQILKEHPVENTQLQNEKLYLYYLQNGRDMYVDQELDINRLSDYDVDHIVPQSFLKDDSIDNKVLTRSDKARGKSDNVPSEEVVKKMKNYWRQLLNAKLITQRKFDNLTKAERGGLSELDKAGFIKRQLVETRQITKHVAQILDSRMNTKYDENDKLIREVKVITLKSKLVSDFRKDFQFYKVREINNYHHAHDAYLNAVVGTALIKKYPKLESEFVYGDYKVYDVRKMIAKSEQEIGKATAKYFFYSNIMNFFKTEITLANGEIRKRPLIETNGETGEIVWDKGRDFATVRKVLSMPQVNIVKKTEVQTGGFSKESILPKRNSDKLIARKKDWDPKKYGGFDSPTVAYSVLVVAKVEKGKSKKLKSVKELLGITIMERSSFEKNPIDFLEAKGYKEVKKDLIIKLPKYSLFELENGRKRMLASAGELQKGNELALPSKYVNFLYLASHYEKLKGSPEDNEQKQLFVEQHKHYLDEIIEQISEFSKRVILADANLDKVLSAYNKHRDKPIREQAENIIHLFTLTNLGAPAAFKYFDTTIDRKRYTSTKEVLDATLIHQSITGLYETRIDLSQLGGDGGGGGGSGGGGSGGVPWILKKPLELTIKLDLEEQQGTLLNNSILSKKGKEELKQLFEKYSALWQSWENQVGHRRIRPHKIATGTVKPTPQKQYHINPKAKPDIQIVINDLLKQGVLIQKESTMNTPVYPVPKPNGRWRMVLDYRAVNKVTPLIAVQNQHSYGILGSLFKGRYKTTIDLSNGFWAHPIVPEDYWITAFTWQGKQYCWTVLPQGFLNSPGLFTGDVVDLLQGIPNVEVYVDDVYISHDSEKEHLEYLDILFNRLKEAGYIISLKKSNIANSIVDFLGFQITNEGRGLTDTFKEKLENITAPTTLKQLQSILGLLNFARNFIPDFTELIAPLYALIPKSTKNYVPWQIEHSTTLETLITKLNGAEYLQGRKGDKTLIMKVNASYTTGYIRYYNEGEKKPISYVSIVFSKTELKFTELEKLLTTVHKGLLKALDLSMGQNIHVYSPIVSMQNIQKTPQTAKKALASRWLSWLSYLEDPRIRFFYDPQMPALKDLPAVDTGKDNKKHPSNFQHIFYTDGSAITSPTKEGHLNAGMGIVYFINKDGNLQKQQEWSISLGNHTAQFAEIAAFEFALKKCLPLGGNILVVTDSNYVAKAYNEELDVWASNGFVNNRKKPLKHISKWKSVADLKRLRPDVVVTHEPGHQKLDSSPHAYGNNLADQLATQASFKVHAGKRTADGSEFEKRTADGSEFESPKKKAKVE

SEQ ID NO: 782 - protein, 2085 aa, synthetic construct
MPAAKRVKLDGGDKKYSIGLDIGTNSVGWAVITDEYKVPSKKFKVLGNTDRHSIKKNLIGALLFDSGETAEATRLKRTARRRYTRRKNRICYLQEIFSNEMAKVDDSFFHRLEESFLVEEDKKHERHPIFGNIVDEVAYHEKYPTIYHLRKKLVDSTDKADLRLIYLALAHMIKFRGHFLIEGDLNPDNSDVDKLFIQLVQTYNQLFEENPINASGVDAKAILSARLSKSRRLENLIAQLPGEKKNGLFGNLIALSLGLTPNFKSNFDLAEDAKLQLSKDTYDDDLDNLLAQIGDQYADLFLAAKNLSDAILLSDILRVNTEITKAPLSASMIKRYDEHHQDLTLLKALVRQQLPEKYKEIFFDQSKNGYAGYIDGGASQEEFYKFIKPILEKMDGTEELLVKLNREDLLRKQRTFDNGSIPHQIHLGELHAILRRQEDFYPFLKDNREKIEKILTFRIPYYVGPLARGNSRFAWMTRKSEETITPWNFEEVVDKGASAQSFIERMTNFDKNLPNEKVLPKHSLLYEYFTVYNELTKVKYVTEGMRKPAFLSGEQKKAIVDLLFKTNRKVTVKQLKEDYFKKIECFDSVEISGVEDRFNASLGTYHDLLKIIKDKDFLDNEENEDILEDIVLTLTLFEDREMIEERLKTYAHLFDDKVMKQLKRRRYTGWGRLSRKLINGIRDKQSGKTILDFLKSDGFANRNFMQLIHDDSLTFKEDIQKAQVSGQGDSLHEHIANLAGSPAIKKGILQTVKVVDELVKVMGRHKPENIVIEMARENQTTQKGQKNSRERMKRIEEGIKELGSQILKEHPVENTQLQNEKLYLYYLQNGRDMYVDQELDINRLSDYDVDHIVPQSFLKDDSIDNKVLTRSDKARGKSDNVPSEEVVKKMKNYWRQLLNAKLITQRKFDNLTKAERGGLSELDKAGFIKRQLVETRQITKHVAQILDSRMNTKYDENDKLIREVKVITLKSKLVSDFRKDFQFYKVREINNYHHAHDAYLNAVVGTALIKKYPKLESEFVYGDYKVYDVRKMIAKSEQEIGKATAKYFFYSNIMNFFKTEITLANGEIRKRPLIETNGETGEIVWDKGRDFATVRKVLSMPQVNIVKKTEVQTGGFSKESILPKRNSDKLIARKKDWDPKKYGGFDSPTVAYSVLVVAKVEKGKSKKLKSVKELLGITIMERSSFEKNPIDFLEAKGYKEVKKDLIIKLPKYSLFELENGRKRMLASAGELQKGNELALPSKYVNFLYLASHYEKLKGSPEDNEQKQLFVEQHKHYLDEIIEQISEFSKRVILADANLDKVLSAYNKHRDKPIREQAENIIHLFTLTNLGAPAAFKYFDTTIDRKRYTSTKEVLDATLIHQSITGLYETRIDLSQLGGDGGPAPAPAPAPGGVPWILKKPLELTIKLDLEEQQGTLLNNSILSKKGKEELKQLFEKYSALWQSWENQVGHRRIRPHKIATGTVKPTPQKQYHINPKAKPDIQIVINDLLKQGVLIQKESTMNTPVYPVPKPNGRWRMVLDYRAVNKVTPLIAVQNQHSYGILGSLFKGRYKTTIDLSNGFWAHPIVPEDYWITAFTWQGKQYCWTVLPQGFLNSPGLFTGDVVDLLQGIPNVEVYVDDVYISHDSEKEHLEYLDILFNRLKEAGYIISLKKSNIANSIVDFLGFQITNEGRGLTDTFKEKLENITAPTTLKQLQSILGLLNFARNFIPDFTELIAPLYALIPKSTKNYVPWQIEHSTTLETLITKLNGAEYLQGRKGDKTLIMKVNASYTTGYIRYYNEGEKKPISYVSIVFSKTELKFTELEKLLTTVHKGLLKALDLSMGQNIHVYSPIVSMQNIQKTPQTAKKALASRWLSWLSYLEDPRIRFFYDPQMPALKDLPAVDTGKDNKKHPSNFQHIFYTDGSAITSPTKEGHLNAGMGIVYFINKDGNLQKQQEWSISLGNHTAQFAEIAAFEFALKKCLPLGGNILVVTDSNYVAKAYNEELDVWASNGFVNNRKKPLKHISKWKSVADLKRLRPDVVVTHEPGHQKLDSSPHAYGNNLADQLATQASFKVHAGKRTADGSEFEKRTADGSEFESPKKKAKVE

SEQ ID NO: 783 - protein, 2091 aa, synthetic construct
MPAAKRVKLDGGDKKYSIGLDIGTNSVGWAVITDEYKVPSKKFKVLGNTDRHSIKKNLIGALLFDSGETAEATRLKRTARRRYTRRKNRICYLQEIFSNEMAKVDDSFFHRLEESFLVEEDKKHERHPIFGNIVDEVAYHEKYPTIYHLRKKLVDSTDKADLRLIYLALAHMIKFRGHFLIEGDLNPDNSDVDKLFIQLVQTYNQLFEENPINASGVDAKAILSARLSKSRRLENLIAQLPGEKKNGLFGNLIALSLGLTPNFKSNFDLAEDAKLQLSKDTYDDDLDNLLAQIGDQYADLFLAAKNLSDAILLSDILRVNTEITKAPLSASMIKRYDEHHQDLTLLKALVRQQLPEKYKEIFFDQSKNGYAGYIDGGASQEEFYKFIKPILEKMDGTEELLVKLNREDLLRKQRTFDNGSIPHQIHLGELHAILRRQEDFYPFLKDNREKIEKILTFRIPYYVGPLARGNSRFAWMTRKSEETITPWNFEEVVDKGASAQSFIERMTNFDKNLPNEKVLPKHSLLYEYFTVYNELTKVKYVTEGMRKPAFLSGEQKKAIVDLLFKTNRKVTVKQLKEDYFKKIECFDSVEISGVEDRFNASLGTYHDLLKIIKDKDFLDNEENEDILEDIVLTLTLFEDREMIEERLKTYAHLFDDKVMKQLKRRRYTGWGRLSRKLINGIRDKQSGKTILDFLKSDGFANRNFMQLIHDDSLTFKEDIQKAQVSGQGDSLHEHIANLAGSPAIKKGILQTVKVVDELVKVMGRHKPENIVIEMARENQTTQKGQKNSRERMKRIEEGIKELGSQILKEHPVENTQLQNEKLYLYYLQNGRDMYVDQELDINRLSDYDVDHIVPQSFLKDDSIDNKVLTRSDKARGKSDNVPSEEVVKKMKNYWRQLLNAKLITQRKFDNLTKAERGGLSELDKAGFIKRQLVETRQITKHVAQILDSRMNTKYDENDKLIREVKVITLKSKLVSDFRKDFQFYKVREINNYHHAHDAYLNAVVGTALIKKYPKLESEFVYGDYKVYDVRKMIAKSEQEIGKATAKYFFYSNIMNFFKTEITLANGEIRKRPLIETNGETGEIVWDKGRDFATVRKVLSMPQVNIVKKTEVQTGGFSKESILPKRNSDKLIARKKDWDPKKYGGFDSPTVAYSVLVVAKVEKGKSKKLKSVKELLGITIMERSSFEKNPIDFLEAKGYKEVKKDLIIKLPKYSLFELENGRKRMLASAGELQKGNELALPSKYVNFLYLASHYEKLKGSPEDNEQKQLFVEQHKHYLDEIIEQISEFSKRVILADANLDKVLSAYNKHRDKPIREQAENIIHLFTLTNLGAPAAFKYFDTTIDRKRYTSTKEVLDATLIHQSITGLYETRIDLSQLGGDGGGGSGGSGGSGGSGGSGGVPWILKKPLELTIKLDLEEQQGTLLNNSILSKKGKEELKQLFEKYSALWQSWENQVGHRRIRPHKIATGTVKPTPQKQYHINPKAKPDIQIVINDLLKQGVLIQKESTMNTPVYPVPKPNGRWRMVLDYRAVNKVTPLIAVQNQHSYGILGSLFKGRYKTTIDLSNGFWAHPIVPEDYWITAFTWQGKQYCWTVLPQGFLNSPGLFTGDVVDLLQGIPNVEVYVDDVYISHDSEKEHLEYLDILFNRLKEAGYIISLKKSNIANSIVDFLGFQITNEGRGLTDTFKEKLENITAPTTLKQLQSILGLLNFARNFIPDFTELIAPLYALIPKSTKNYVPWQIEHSTTLETLITKLNGAEYLQGRKGDKTLIMKVNASYTTGYIRYYNEGEKKPISYVSIVFSKTELKFTELEKLLTTVHKGLLKALDLSMGQNIHVYSPIVSMQNIQKTPQTAKKALASRWLSWLSYLEDPRIRFFYDPQMPALKDLPAVDTGKDNKKHPSNFQHIFYTDGSAITSPTKEGHLNAGMGIVYFINKDGNLQKQQEWSISLGNHTAQFAEIAAFEFALKKCLPLGGNILVVTDSNYVAKAYNEELDVWASNGFVNNRKKPLKHISKWKSVADLKRLRPDVVVTHEPGHQKLDSSPHAYGNNLADQLATQASFKVHAGKRTADGSEFEKRTADGSEFESPKKKAKVE

SEQ ID NO: 784 - protein, 2084 aa, synthetic construct
MPAAKRVKLDGGDKKYSIGLDIGTNSVGWAVITDEYKVPSKKFKVLGNTDRHSIKKNLIGALLFDSGETAEATRLKRTARRRYTRRKNRICYLQEIFSNEMAKVDDSFFHRLEESFLVEEDKKHERHPIFGNIVDEVAYHEKYPTIYHLRKKLVDSTDKADLRLIYLALAHMIKFRGHFLIEGDLNPDNSDVDKLFIQLVQTYNQLFEENPINASGVDAKAILSARLSKSRRLENLIAQLPGEKKNGLFGNLIALSLGLTPNFKSNFDLAEDAKLQLSKDTYDDDLDNLLAQIGDQYADLFLAAKNLSDAILLSDILRVNTEITKAPLSASMIKRYDEHHQDLTLLKALVRQQLPEKYKEIFFDQSKNGYAGYIDGGASQEEFYKFIKPILEKMDGTEELLVKLNREDLLRKQRTFDNGSIPHQIHLGELHAILRRQEDFYPFLKDNREKIEKILTFRIPYYVGPLARGNSRFAWMTRKSEETITPWNFEEVVDKGASAQSFIERMTNFDKNLPNEKVLPKHSLLYEYFTVYNELTKVKYVTEGMRKPAFLSGEQKKAIVDLLFKTNRKVTVKQLKEDYFKKIECFDSVEISGVEDRFNASLGTYHDLLKIIKDKDFLDNEENEDILEDIVLTLTLFEDREMIEERLKTYAHLFDDKVMKQLKRRRYTGWGRLSRKLINGIRDKQSGKTILDFLKSDGFANRNFMQLIHDDSLTFKEDIQKAQVSGQGDSLHEHIANLAGSPAIKKGILQTVKVVDELVKVMGRHKPENIVIEMARENQTTQKGQKNSRERMKRIEEGIKELGSQILKEHPVENTQLQNEKLYLYYLQNGRDMYVDQELDINRLSDYDVDHIVPQSFLKDDSIDNKVLTRSDKARGKSDNVPSEEVVKKMKNYWRQLLNAKLITQRKFDNLTKAERGGLSELDKAGFIKRQLVETRQITKHVAQILDSRMNTKYDENDKLIREVKVITLKSKLVSDFRKDFQFYKVREINNYHHAHDAYLNAVVGTALIKKYPKLESEFVYGDYKVYDVRKMIAKSEQEIGKATAKYFFYSNIMNFFKTEITLANGEIRKRPLIETNGETGEIVWDKGRDFATVRKVLSMPQVNIVKKTEVQTGGFSKESILPKRNSDKLIARKKDWDPKKYGGFDSPTVAYSVLVVAKVEKGKSKKLKSVKELLGITIMERSSFEKNPIDFLEAKGYKEVKKDLIIKLPKYSLFELENGRKRMLASAGELQKGNELALPSKYVNFLYLASHYEKLKGSPEDNEQKQLFVEQHKHYLDEIIEQISEFSKRVILADANLDKVLSAYNKHRDKPIREQAENIIHLFTLTNLGAPAAFKYFDTTIDRKRYTSTKEVLDATLIHQSITGLYETRIDLSQLGGDGGEAAAKGGGGGVPWILKKPLELTIKLDLEEQQGTLLNNSILSKKGKEELKQLFEKYSALWQSWENQVGHRRIRPHKIATGTVKPTPQKQYHINPKAKPDIQIVINDLLKQGVLIQKESTMNTPVYPVPKPNGRWRMVLDYRAVNKVTPLIAVQNQHSYGILGSLFKGRYKTTIDLSNGFWAHPIVPEDYWITAFTWQGKQYCWTVLPQGFLNSPGLFTGDVVDLLQGIPNVEVYVDDVYISHDSEKEHLEYLDILFNRLKEAGYIISLKKSNIANSIVDFLGFQITNEGRGLTDTFKEKLENITAPTTLKQLQSILGLLNFARNFIPDFTELIAPLYALIPKSTKNYVPWQIEHSTTLETLITKLNGAEYLQGRKGDKTLIMKVNASYTTGYIRYYNEGEKKPISYVSIVFSKTELKFTELEKLLTTVHKGLLKALDLSMGQNIHVYSPIVSMQNIQKTPQTAKKALASRWLSWLSYLEDPRIRFFYDPQMPALKDLPAVDTGKDNKKHPSNFQHIFYTDGSAITSPTKEGHLNAGMGIVYFINKDGNLQKQQEWSISLGNHTAQFAEIAAFEFALKKCLPLGGNILVVTDSNYVAKAYNEELDVWASNGFVNNRKKPLKHISKWKSVADLKRLRPDVVVTHEPGHQKLDSSPHAYGNNLADQLATQASFKVHAGKRTADGSEFEKRTADGSEFESPKKKAKVE

SEQ ID NO: 785 - protein, 2087 aa, synthetic construct
MPAAKRVKLDGGDKKYSIGLDIGTNSVGWAVITDEYKVPSKKFKVLGNTDRHSIKKNLIGALLFDSGETAEATRLKRTARRRYTRRKNRICYLQEIFSNEMAKVDDSFFHRLEESFLVEEDKKHERHPIFGNIVDEVAYHEKYPTIYHLRKKLVDSTDKADLRLIYLALAHMIKFRGHFLIEGDLNPDNSDVDKLFIQLVQTYNQLFEENPINASGVDAKAILSARLSKSRRLENLIAQLPGEKKNGLFGNLIALSLGLTPNFKSNFDLAEDAKLQLSKDTYDDDLDNLLAQIGDQYADLFLAAKNLSDAILLSDILRVNTEITKAPLSASMIKRYDEHHQDLTLLKALVRQQLPEKYKEIFFDQSKNGYAGYIDGGASQEEFYKFIKPILEKMDGTEELLVKLNREDLLRKQRTFDNGSIPHQIHLGELHAILRRQEDFYPFLKDNREKIEKILTFRIPYYVGPLARGNSRFAWMTRKSEETITPWNFEEVVDKGASAQSFIERMTNFDKNLPNEKVLPKHSLLYEYFTVYNELTKVKYVTEGMRKPAFLSGEQKKAIVDLLFKTNRKVTVKQLKEDYFKKIECFDSVEISGVEDRFNASLGTYHDLLKIIKDKDFLDNEENEDILEDIVLTLTLFEDREMIEERLKTYAHLFDDKVMKQLKRRRYTGWGRLSRKLINGIRDKQSGKTILDFLKSDGFANRNFMQLIHDDSLTFKEDIQKAQVSGQGDSLHEHIANLAGSPAIKKGILQTVKVVDELVKVMGRHKPENIVIEMARENQTTQKGQKNSRERMKRIEEGIKELGSQILKEHPVENTQLQNEKLYLYYLQNGRDMYVDQELDINRLSDYDVDHIVPQSFLKDDSIDNKVLTRSDKARGKSDNVPSEEVVKKMKNYWRQLLNAKLITQRKFDNLTKAERGGLSELDKAGFIKRQLVETRQITKHVAQILDSRMNTKYDENDKLIREVKVITLKSKLVSDFRKDFQFYKVREINNYHHAHDAYLNAVVGTALIKKYPKLESEFVYGDYKVYDVRKMIAKSEQEIGKATAKYFFYSNIMNFFKTEITLANGEIRKRPLIETNGETGEIVWDKGRDFATVRKVLSMPQVNIVKKTEVQTGGFSKESILPKRNSDKLIARKKDWDPKKYGGFDSPTVAYSVLVVAKVEKGKSKKLKSVKELLGITIMERSSFEKNPIDFLEAKGYKEVKKDLIIKLPKYSLFELENGRKRMLASAGELQKGNELALPSKYVNFLYLASHYEKLKGSPEDNEQKQLFVEQHKHYLDEIIEQISEFSKRVILADANLDKVLSAYNKHRDKPIREQAENIIHLFTLTNLGAPAAFKYFDTTIDRKRYTSTKEVLDATLIHQSITGLYETRIDLSQLGGDGGPAPAPAPAPAPGGVPWILKKPLELTIKLDLEEQQGTLLNNSILSKKGKEELKQLFEKYSALWQSWENQVGHRRIRPHKIATGTVKPTPQKQYHINPKAKPDIQIVINDLLKQGVLIQKESTMNTPVYPVPKPNGRWRMVLDYRAVNKVTPLIAVQNQHSYGILGSLFKGRYKTTIDLSNGFWAHPIVPEDYWITAFTWQGKQYCWTVLPQGFLNSPGLFTGDVVDLLQGIPNVEVYVDDVYISHDSEKEHLEYLDILFNRLKEAGYIISLKKSNIANSIVDFLGFQITNEGRGLTDTFKEKLENITAPTTLKQLQSILGLLNFARNFIPDFTELIAPLYALIPKSTKNYVPWQIEHSTTLETLITKLNGAEYLQGRKGDKTLIMKVNASYTTGYIRYYNEGEKKPISYVSIVFSKTELKFTELEKLLTTVHKGLLKALDLSMGQNIHVYSPIVSMQNIQKTPQTAKKALASRWLSWLSYLEDPRIRFFYDPQMPALKDLPAVDTGKDNKKHPSNFQHIFYTDGSAITSPTKEGHLNAGMGIVYFINKDGNLQKQQEWSISLGNHTAQFAEIAAFEFALKKCLPLGGNILVVTDSNYVAKAYNEELDVWASNGFVNNRKKPLKHISKWKSVADLKRLRPDVVVTHEPGHQKLDSSPHAYGNNLADQLATQASFKVHAGKRTADGSEFEKRTADGSEFESPKKKAKVE

SEQ ID NO: 786 - protein, 2085 aa, synthetic construct
MPAAKRVKLDGGDKKYSIGLDIGTNSVGWAVITDEYKVPSKKFKVLGNTDRHSIKKNLIGALLFDSGETAEATRLKRTARRRYTRRKNRICYLQEIFSNEMAKVDDSFFHRLEESFLVEEDKKHERHPIFGNIVDEVAYHEKYPTIYHLRKKLVDSTDKADLRLIYLALAHMIKFRGHFLIEGDLNPDNSDVDKLFIQLVQTYNQLFEENPINASGVDAKAILSARLSKSRRLENLIAQLPGEKKNGLFGNLIALSLGLTPNFKSNFDLAEDAKLQLSKDTYDDDLDNLLAQIGDQYADLFLAAKNLSDAILLSDILRVNTEITKAPLSASMIKRYDEHHQDLTLLKALVRQQLPEKYKEIFFDQSKNGYAGYIDGGASQEEFYKFIKPILEKMDGTEELLVKLNREDLLRKQRTFDNGSIPHQIHLGELHAILRRQEDFYPFLKDNREKIEKILTFRIPYYVGPLARGNSRFAWMTRKSEETITPWNFEEVVDKGASAQSFIERMTNFDKNLPNEKVLPKHSLLYEYFTVYNELTKVKYVTEGMRKPAFLSGEQKKAIVDLLFKTNRKVTVKQLKEDYFKKIECFDSVEISGVEDRFNASLGTYHDLLKIIKDKDFLDNEENEDILEDIVLTLTLFEDREMIEERLKTYAHLFDDKVMKQLKRRRYTGWGRLSRKLINGIRDKQSGKTILDFLKSDGFANRNFMQLIHDDSLTFKEDIQKAQVSGQGDSLHEHIANLAGSPAIKKGILQTVKVVDELVKVMGRHKPENIVIEMARENQTTQKGQKNSRERMKRIEEGIKELGSQILKEHPVENTQLQNEKLYLYYLQNGRDMYVDQELDINRLSDYDVDHIVPQSFLKDDSIDNKVLTRSDKARGKSDNVPSEEVVKKMKNYWRQLLNAKLITQRKFDNLTKAERGGLSELDKAGFIKRQLVETRQITKHVAQILDSRMNTKYDENDKLIREVKVITLKSKLVSDFRKDFQFYKVREINNYHHAHDAYLNAVVGTALIKKYPKLESEFVYGDYKVYDVRKMIAKSEQEIGKATAKYFFYSNIMNFFKTEITLANGEIRKRPLIETNGETGEIVWDKGRDFATVRKVLSMPQVNIVKKTEVQTGGFSKESILPKRNSDKLIARKKDWDPKKYGGFDSPTVAYSVLVVAKVEKGKSKKLKSVKELLGITIMERSSFEKNPIDFLEAKGYKEVKKDLIIKLPKYSLFELENGRKRMLASAGELQKGNELALPSKYVNFLYLASHYEKLKGSPEDNEQKQLFVEQHKHYLDEIIEQISEFSKRVILADANLDKVLSAYNKHRDKPIREQAENIIHLFTLTNLGAPAAFKYFDTTIDRKRYTSTKEVLDATLIHQSITGLYETRIDLSQLGGDGGGGSGGSGGSGGVPWILKKPLELTIKLDLEEQQGTLLNNSILSKKGKEELKQLFEKYSALWQSWENQVGHRRIRPHKIATGTVKPTPQKQYHINPKAKPDIQIVINDLLKQGVLIQKESTMNTPVYPVPKPNGRWRMVLDYRAVNKVTPLIAVQNQHSYGILGSLFKGRYKTTIDLSNGFWAHPIVPEDYWITAFTWQGKQYCWTVLPQGFLNSPGLFTGDVVDLLQGIPNVEVYVDDVYISHDSEKEHLEYLDILFNRLKEAGYIISLKKSNIANSIVDFLGFQITNEGRGLTDTFKEKLENITAPTTLKQLQSILGLLNFARNFIPDFTELIAPLYALIPKSTKNYVPWQIEHSTTLETLITKLNGAEYLQGRKGDKTLIMKVNASYTTGYIRYYNEGEKKPISYVSIVFSKTELKFTELEKLLTTVHKGLLKALDLSMGQNIHVYSPIVSMQNIQKTPQTAKKALASRWLSWLSYLEDPRIRFFYDPQMPALKDLPAVDTGKDNKKHPSNFQHIFYTDGSAITSPTKEGHLNAGMGIVYFINKDGNLQKQQEWSISLGNHTAQFAEIAAFEFALKKCLPLGGNILVVTDSNYVAKAYNEELDVWASNGFVNNRKKPLKHISKWKSVADLKRLRPDVVVTHEPGHQKLDSSPHAYGNNLADQLATQASFKVHAGKRTADGSEFEKRTADGSEFESPKKKAKVE

SEQ ID NO: 787 - protein, 2085 aa, synthetic construct
MPAAKRVKLDGGDKKYSIGLDIGTNSVGWAVITDEYKVPSKKFKVLGNTDRHSIKKNLIGALLFDSGETAEATRLKRTARRRYTRRKNRICYLQEIFSNEMAKVDDSFFHRLEESFLVEEDKKHERHPIFGNIVDEVAYHEKYPTIYHLRKKLVDSTDKADLRLIYLALAHMIKFRGHFLIEGDLNPDNSDVDKLFIQLVQTYNQLFEENPINASGVDAKAILSARLSKSRRLENLIAQLPGEKKNGLFGNLIALSLGLTPNFKSNFDLAEDAKLQLSKDTYDDDLDNLLAQIGDQYADLFLAAKNLSDAILLSDILRVNTEITKAPLSASMIKRYDEHHQDLTLLKALVRQQLPEKYKEIFFDQSKNGYAGYIDGGASQEEFYKFIKPILEKMDGTEELLVKLNREDLLRKQRTFDNGSIPHQIHLGELHAILRRQEDFYPFLKDNREKIEKILTFRIPYYVGPLARGNSRFAWMTRKSEETITPWNFEEVVDKGASAQSFIERMTNFDKNLPNEKVLPKHSLLYEYFTVYNELTKVKYVTEGMRKPAFLSGEQKKAIVDLLFKTNRKVTVKQLKEDYFKKIECFDSVEISGVEDRFNASLGTYHDLLKIIKDKDFLDNEENEDILEDIVLTLTLFEDREMIEERLKTYAHLFDDKVMKQLKRRRYTGWGRLSRKLINGIRDKQSGKTILDFLKSDGFANRNFMQLIHDDSLTFKEDIQKAQVSGQGDSLHEHIANLAGSPAIKKGILQTVKVVDELVKVMGRHKPENIVIEMARENQTTQKGQKNSRERMKRIEEGIKELGSQILKEHPVENTQLQNEKLYLYYLQNGRDMYVDQELDINRLSDYDVDHIVPQSFLKDDSIDNKVLTRSDKARGKSDNVPSEEVVKKMKNYWRQLLNAKLITQRKFDNLTKAERGGLSELDKAGFIKRQLVETRQITKHVAQILDSRMNTKYDENDKLIREVKVITLKSKLVSDFRKDFQFYKVREINNYHHAHDAYLNAVVGTALIKKYPKLESEFVYGDYKVYDVRKMIAKSEQEIGKATAKYFFYSNIMNFFKTEITLANGEIRKRPLIETNGETGEIVWDKGRDFATVRKVLSMPQVNIVKKTEVQTGGFSKESILPKRNSDKLIARKKDWDPKKYGGFDSPTVAYSVLVVAKVEKGKSKKLKSVKELLGITIMERSSFEKNPIDFLEAKGYKEVKKDLIIKLPKYSLFELENGRKRMLASAGELQKGNELALPSKYVNFLYLASHYEKLKGSPEDNEQKQLFVEQHKHYLDEIIEQISEFSKRVILADANLDKVLSAYNKHRDKPIREQAENIIHLFTLTNLGAPAAFKYFDTTIDRKRYTSTKEVLDATLIHQSITGLYETRIDLSQLGGDGGGSSGGSGGGGGVPWILKKPLELTIKLDLEEQQGTLLNNSILSKKGKEELKQLFEKYSALWQSWENQVGHRRIRPHKIATGTVKPTPQKQYHINPKAKPDIQIVINDLLKQGVLIQKESTMNTPVYPVPKPNGRWRMVLDYRAVNKVTPLIAVQNQHSYGILGSLFKGRYKTTIDLSNGFWAHPIVPEDYWITAFTWQGKQYCWTVLPQGFLNSPGLFTGDVVDLLQGIPNVEVYVDDVYISHDSEKEHLEYLDILFNRLKEAGYIISLKKSNIANSIVDFLGFQITNEGRGLTDTFKEKLENITAPTTLKQLQSILGLLNFARNFIPDFTELIAPLYALIPKSTKNYVPWQIEHSTTLETLITKLNGAEYLQGRKGDKTLIMKVNASYTTGYIRYYNEGEKKPISYVSIVFSKTELKFTELEKLLTTVHKGLLKALDLSMGQNIHVYSPIVSMQNIQKTPQTAKKALASRWLSWLSYLEDPRIRFFYDPQMPALKDLPAVDTGKDNKKHPSNFQHIFYTDGSAITSPTKEGHLNAGMGIVYFINKDGNLQKQQEWSISLGNHTAQFAEIAAFEFALKKCLPLGGNILVVTDSNYVAKAYNEELDVWASNGFVNNRKKPLKHISKWKSVADLKRLRPDVVVTHEPGHQKLDSSPHAYGNNLADQLATQASFKVHAGKRTADGSEFEKRTADGSEFESPKKKAKVE

SEQ ID NO: 788 - protein, 2082 aa, synthetic construct
MPAAKRVKLDGGDKKYSIGLDIGTNSVGWAVITDEYKVPSKKFKVLGNTDRHSIKKNLIGALLFDSGETAEATRLKRTARRRYTRRKNRICYLQEIFSNEMAKVDDSFFHRLEESFLVEEDKKHERHPIFGNIVDEVAYHEKYPTIYHLRKKLVDSTDKADLRLIYLALAHMIKFRGHFLIEGDLNPDNSDVDKLFIQLVQTYNQLFEENPINASGVDAKAILSARLSKSRRLENLIAQLPGEKKNGLFGNLIALSLGLTPNFKSNFDLAEDAKLQLSKDTYDDDLDNLLAQIGDQYADLFLAAKNLSDAILLSDILRVNTEITKAPLSASMIKRYDEHHQDLTLLKALVRQQLPEKYKEIFFDQSKNGYAGYIDGGASQEEFYKFIKPILEKMDGTEELLVKLNREDLLRKQRTFDNGSIPHQIHLGELHAILRRQEDFYPFLKDNREKIEKILTFRIPYYVGPLARGNSRFAWMTRKSEETITPWNFEEVVDKGASAQSFIERMTNFDKNLPNEKVLPKHSLLYEYFTVYNELTKVKYVTEGMRKPAFLSGEQKKAIVDLLFKTNRKVTVKQLKEDYFKKIECFDSVEISGVEDRFNASLGTYHDLLKIIKDKDFLDNEENEDILEDIVLTLTLFEDREMIEERLKTYAHLFDDKVMKQLKRRRYTGWGRLSRKLINGIRDKQSGKTILDFLKSDGFANRNFMQLIHDDSLTFKEDIQKAQVSGQGDSLHEHIANLAGSPAIKKGILQTVKVVDELVKVMGRHKPENIVIEMARENQTTQKGQKNSRERMKRIEEGIKELGSQILKEHPVENTQLQNEKLYLYYLQNGRDMYVDQELDINRLSDYDVDHIVPQSFLKDDSIDNKVLTRSDKARGKSDNVPSEEVVKKMKNYWRQLLNAKLITQRKFDNLTKAERGGLSELDKAGFIKRQLVETRQITKHVAQILDSRMNTKYDENDKLIREVKVITLKSKLVSDFRKDFQFYKVREINNYHHAHDAYLNAVVGTALIKKYPKLESEFVYGDYKVYDVRKMIAKSEQEIGKATAKYFFYSNIMNFFKTEITLANGEIRKRPLIETNGETGEIVWDKGRDFATVRKVLSMPQVNIVKKTEVQTGGFSKESILPKRNSDKLIARKKDWDPKKYGGFDSPTVAYSVLVVAKVEKGKSKKLKSVKELLGITIMERSSFEKNPIDFLEAKGYKEVKKDLIIKLPKYSLFELENGRKRMLASAGELQKGNELALPSKYVNFLYLASHYEKLKGSPEDNEQKQLFVEQHKHYLDEIIEQISEFSKRVILADANLDKVLSAYNKHRDKPIREQAENIIHLFTLTNLGAPAAFKYFDTTIDRKRYTSTKEVLDATLIHQSITGLYETRIDLSQLGGDGGGGSGGSGGVPWILKKPLELTIKLDLEEQQGTLLNNSILSKKGKEELKQLFEKYSALWQSWENQVGHRRIRPHKIATGTVKPTPQKQYHINPKAKPDIQIVINDLLKQGVLIQKESTMNTPVYPVPKPNGRWRMVLDYRAVNKVTPLIAVQNQHSYGILGSLFKGRYKTTIDLSNGFWAHPIVPEDYWITAFTWQGKQYCWTVLPQGFLNSPGLFTGDVVDLLQGIPNVEVYVDDVYISHDSEKEHLEYLDILFNRLKEAGYIISLKKSNIANSIVDFLGFQITNEGRGLTDTFKEKLENITAPTTLKQLQSILGLLNFARNFIPDFTELIAPLYALIPKSTKNYVPWQIEHSTTLETLITKLNGAEYLQGRKGDKTLIMKVNASYTTGYIRYYNEGEKKPISYVSIVFSKTELKFTELEKLLTTVHKGLLKALDLSMGQNIHVYSPIVSMQNIQKTPQTAKKALASRWLSWLSYLEDPRIRFFYDPQMPALKDLPAVDTGKDNKKHPSNFQHIFYTDGSAITSPTKEGHLNAGMGIVYFINKDGNLQKQQEWSISLGNHTAQFAEIAAFEFALKKCLPLGGNILVVTDSNYVAKAYNEELDVWASNGFVNNRKKPLKHISKWKSVADLKRLRPDVVVTHEPGHQKLDSSPHAYGNNLADQLATQASFKVHAGKRTADGSEFEKRTADGSEFESPKKKAKVE

SEQ ID NO: 789 - protein, 2073 aa, synthetic construct
MPAAKRVKLDGGDKKYSIGLDIGTNSVGWAVITDEYKVPSKKFKVLGNTDRHSIKKNLIGALLFDSGETAEATRLKRTARRRYTRRKNRICYLQEIFSNEMAKVDDSFFHRLEESFLVEEDKKHERHPIFGNIVDEVAYHEKYPTIYHLRKKLVDSTDKADLRLIYLALAHMIKFRGHFLIEGDLNPDNSDVDKLFIQLVQTYNQLFEENPINASGVDAKAILSARLSKSRRLENLIAQLPGEKKNGLFGNLIALSLGLTPNFKSNFDLAEDAKLQLSKDTYDDDLDNLLAQIGDQYADLFLAAKNLSDAILLSDILRVNTEITKAPLSASMIKRYDEHHQDLTLLKALVRQQLPEKYKEIFFDQSKNGYAGYIDGGASQEEFYKFIKPILEKMDGTEELLVKLNREDLLRKQRTFDNGSIPHQIHLGELHAILRRQEDFYPFLKDNREKIEKILTFRIPYYVGPLARGNSRFAWMTRKSEETITPWNFEEVVDKGASAQSFIERMTNFDKNLPNEKVLPKHSLLYEYFTVYNELTKVKYVTEGMRKPAFLSGEQKKAIVDLLFKTNRKVTVKQLKEDYFKKIECFDSVEISGVEDRFNASLGTYHDLLKIIKDKDFLDNEENEDILEDIVLTLTLFEDREMIEERLKTYAHLFDDKVMKQLKRRRYTGWGRLSRKLINGIRDKQSGKTILDFLKSDGFANRNFMQLIHDDSLTFKEDIQKAQVSGQGDSLHEHIANLAGSPAIKKGILQTVKVVDELVKVMGRHKPENIVIEMARENQTTQKGQKNSRERMKRIEEGIKELGSQILKEHPVENTQLQNEKLYLYYLQNGRDMYVDQELDINRLSDYDVDHIVPQSFLKDDSIDNKVLTRSDKARGKSDNVPSEEVVKKMKNYWRQLLNAKLITQRKFDNLTKAERGGLSELDKAGFIKRQLVETRQITKHVAQILDSRMNTKYDENDKLIREVKVITLKSKLVSDFRKDFQFYKVREINNYHHAHDAYLNAVVGTALIKKYPKLESEFVYGDYKVYDVRKMIAKSEQEIGKATAKYFFYSNIMNFFKTEITLANGEIRKRPLIETNGETGEIVWDKGRDFATVRKVLSMPQVNIVKKTEVQTGGFSKESILPKRNSDKLIARKKDWDPKKYGGFDSPTVAYSVLVVAKVEKGKSKKLKSVKELLGITIMERSSFEKNPIDFLEAKGYKEVKKDLIIKLPKYSLFELENGRKRMLASAGELQKGNELALPSKYVNFLYLASHYEKLKGSPEDNEQKQLFVEQHKHYLDEIIEQISEFSKRVILADANLDKVLSAYNKHRDKPIREQAENIIHLFTLTNLGAPAAFKYFDTTIDRKRYTSTKEVLDATLIHQSITGLYETRIDLSQLGGDGGPAPGGGGSSGGSCQTKNTLNIDEYLLQFPDQLWASLPTDIGRMLVPPITIKIKDNASLPSIRQYPLPKDKTEGLRPLISSLENQGILIKCHSPCNTPIFPIKKAGRDEYRMIHDLRAINNIVAPLTAVVASPTTVLSNLAPSLHWFTVIDLSNAFFSVPIHKDSQYLFAFTFEGHQYTWTVLPQGFIHSPTLFNQALYQSLHKIKFKISSEICIYMDDVLIASKDRDTNLKDTAVMLQHLASEGHKVSKKKLQLCQQEVVYLGQLLTPEGRKILPDRKVTVSQFQQPTTIRQIRAFLGKVGYCRHFIPEFSIHSKFLEKQLKPDTAEPFQLDDQQVEAFNKLKHAITTAPVLVVPDPAKPFQLYTSHSEHASIAVLTQKHAGRTRPIAFLSSKFDAIESGLPPCLKACASIHRSLTQADSFILGAPLIIYTTHAICTLLQRDRSQLVTASRFSKWEADLLRPELTFVACSAVSPAHLYMQSCENNIPPHDCVLLTHTISRPRPDLSDLPIPDPDMTLFSDGSYTTGRGGAAVVMHRPVTDDFIIIHQQPGGASAQTAELLALAAACHLATDKTVNIYTDSRYAYGVVHDFGHLWMHRGFVTSAGTPIKNHKEIEYLLKQIMKPKQVSVIKIEAHTKGVSMEVRGNAAADEAAKNAVFLVQRAGKRTADGSEFEKRTADGSEFESPKKKAKVE

SEQ ID NO: 790 - protein, 2094 aa, synthetic construct
MPAAKRVKLDGGDKKYSIGLDIGTNSVGWAVITDEYKVPSKKFKVLGNTDRHSIKKNLIGALLFDSGETAEATRLKRTARRRYTRRKNRICYLQEIFSNEMAKVDDSFFHRLEESFLVEEDKKHERHPIFGNIVDEVAYHEKYPTIYHLRKKLVDSTDKADLRLIYLALAHMIKFRGHFLIEGDLNPDNSDVDKLFIQLVQTYNQLFEENPINASGVDAKAILSARLSKSRRLENLIAQLPGEKKNGLFGNLIALSLGLTPNFKSNFDLAEDAKLQLSKDTYDDDLDNLLAQIGDQYADLFLAAKNLSDAILLSDILRVNTEITKAPLSASMIKRYDEHHQDLTLLKALVRQQLPEKYKEIFFDQSKNGYAGYIDGGASQEEFYKFIKPILEKMDGTEELLVKLNREDLLRKQRTFDNGSIPHQIHLGELHAILRRQEDFYPFLKDNREKIEKILTFRIPYYVGPLARGNSRFAWMTRKSEETITPWNFEEVVDKGASAQSFIERMTNFDKNLPNEKVLPKHSLLYEYFTVYNELTKVKYVTEGMRKPAFLSGEQKKAIVDLLFKTNRKVTVKQLKEDYFKKIECFDSVEISGVEDRFNASLGTYHDLLKIIKDKDFLDNEENEDILEDIVLTLTLFEDREMIEERLKTYAHLFDDKVMKQLKRRRYTGWGRLSRKLINGIRDKQSGKTILDFLKSDGFANRNFMQLIHDDSLTFKEDIQKAQVSGQGDSLHEHIANLAGSPAIKKGILQTVKVVDELVKVMGRHKPENIVIEMARENQTTQKGQKNSRERMKRIEEGIKELGSQILKEHPVENTQLQNEKLYLYYLQNGRDMYVDQELDINRLSDYDVDHIVPQSFLKDDSIDNKVLTRSDKARGKSDNVPSEEVVKKMKNYWRQLLNAKLITQRKFDNLTKAERGGLSELDKAGFIKRQLVETRQITKHVAQILDSRMNTKYDENDKLIREVKVITLKSKLVSDFRKDFQFYKVREINNYHHAHDAYLNAVVGTALIKKYPKLESEFVYGDYKVYDVRKMIAKSEQEIGKATAKYFFYSNIMNFFKTEITLANGEIRKRPLIETNGETGEIVWDKGRDFATVRKVLSMPQVNIVKKTEVQTGGFSKESILPKRNSDKLIARKKDWDPKKYGGFDSPTVAYSVLVVAKVEKGKSKKLKSVKELLGITIMERSSFEKNPIDFLEAKGYKEVKKDLIIKLPKYSLFELENGRKRMLASAGELQKGNELALPSKYVNFLYLASHYEKLKGSPEDNEQKQLFVEQHKHYLDEIIEQISEFSKRVILADANLDKVLSAYNKHRDKPIREQAENIIHLFTLTNLGAPAAFKYFDTTIDRKRYTSTKEVLDATLIHQSITGLYETRIDLSQLGGDGGGGGEAAAKPAPGGVLNLEEEYRLHEKPVPSSIDPSWLQLFPTVWAERAGMGLANQVPPVVVELRSGASPVAVRQYPMSKEAREGIRPHIQRFLDLGVLVPCQSPWNTPLLPVKKPGTNDYRPVQDLREINKRVQDIHPTVPNPYNLLSSLPPSHTWYSVLDLKDAFFCLKLHPNSQPLFAFEWRDPEKGNTGQLTWTRLPQGFKNSPTLFDEALHRDLAPFRALNPQVVLLQYVDDLLVAAPTYRDCKEGTQKLLQELSKLGYRVSAKKAQLCQKEVTYLGYLLKEGKRWLTPARKATVMKIPPPTTPRQVREFLGTAGFCRLWIPGFASLAAPLYPLTKESIPFIWTEEHQKAFDRIKEALLSAPALALPDLTKPFTLYVDERAGVARGVLTQTLGPWRRPVAYLSKKLDPVASGWPTCLKAVAAVALLLKDADKLTLGQNVTVIASHSLESIVRQPPDRWMTNARMTHYQSLLLNERVSFAPPAVLNPATLLPVESEATPVHRCSEILAEETGTRRDLKDQPLPGVPAWYTDGSSFIAEGKRRAGAAIVDGKRTVWASSLPEGTSAQKAELVALTQALRLAEGKDINIYTDSRYAFATAHIHGAIYKQRGLLTSAGKDIKNKEEILALLEAIHLPKRVAIIHCPGHQKGNDPVATGNRRADEAAKQAALSTRVLAETTKPAGKRTADGSEFEKRTADGSEFESPKKKAKVE

SEQ ID NO: 791 - protein, 2094 aa, synthetic construct
MPAAKRVKLDGGDKKYSIGLDIGTNSVGWAVITDEYKVPSKKFKVLGNTDRHSIKKNLIGALLFDSGETAEATRLKRTARRRYTRRKNRICYLQEIFSNEMAKVDDSFFHRLEESFLVEEDKKHERHPIFGNIVDEVAYHEKYPTIYHLRKKLVDSTDKADLRLIYLALAHMIKFRGHFLIEGDLNPDNSDVDKLFIQLVQTYNQLFEENPINASGVDAKAILSARLSKSRRLENLIAQLPGEKKNGLFGNLIALSLGLTPNFKSNFDLAEDAKLQLSKDTYDDDLDNLLAQIGDQYADLFLAAKNLSDAILLSDILRVNTEITKAPLSASMIKRYDEHHQDLTLLKALVRQQLPEKYKEIFFDQSKNGYAGYIDGGASQEEFYKFIKPILEKMDGTEELLVKLNREDLLRKQRTFDNGSIPHQIHLGELHAILRRQEDFYPFLKDNREKIEKILTFRIPYYVGPLARGNSRFAWMTRKSEETITPWNFEEVVDKGASAQSFIERMTNFDKNLPNEKVLPKHSLLYEYFTVYNELTKVKYVTEGMRKPAFLSGEQKKAIVDLLFKTNRKVTVKQLKEDYFKKIECFDSVEISGVEDRFNASLGTYHDLLKIIKDKDFLDNEENEDILEDIVLTLTLFEDREMIEERLKTYAHLFDDKVMKQLKRRRYTGWGRLSRKLINGIRDKQSGKTILDFLKSDGFANRNFMQLIHDDSLTFKEDIQKAQVSGQGDSLHEHIANLAGSPAIKKGILQTVKVVDELVKVMGRHKPENIVIEMARENQTTQKGQKNSRERMKRIEEGIKELGSQILKEHPVENTQLQNEKLYLYYLQNGRDMYVDQELDINRLSDYDVDHIVPQSFLKDDSIDNKVLTRSDKARGKSDNVPSEEVVKKMKNYWRQLLNAKLITQRKFDNLTKAERGGLSELDKAGFIKRQLVETRQITKHVAQILDSRMNTKYDENDKLIREVKVITLKSKLVSDFRKDFQFYKVREINNYHHAHDAYLNAVVGTALIKKYPKLESEFVYGDYKVYDVRKMIAKSEQEIGKATAKYFFYSNIMNFFKTEITLANGEIRKRPLIETNGETGEIVWDKGRDFATVRKVLSMPQVNIVKKTEVQTGGFSKESILPKRNSDKLIARKKDWDPKKYGGFDSPTVAYSVLVVAKVEKGKSKKLKSVKELLGITIMERSSFEKNPIDFLEAKGYKEVKKDLIIKLPKYSLFELENGRKRMLASAGELQKGNELALPSKYVNFLYLASHYEKLKGSPEDNEQKQLFVEQHKHYLDEIIEQISEFSKRVILADANLDKVLSAYNKHRDKPIREQAENIIHLFTLTNLGAPAAFKYFDTTIDRKRYTSTKEVLDATLIHQSITGLYETRIDLSQLGGDGGGSSGGGEAAAKGGVLNLEEEYRLHEKPVPSSIDPSWLQLFPTVWAERAGMGLANQVPPVVVELRSGASPVAVRQYPMSKEAREGIRPHIQRFLDLGVLVPCQSPWNTPLLPVKKPGTNDYRPVQDLREINKRVQDIHPTVPNPYNLLSSLPPSHTWYSVLDLKDAFFCLKLHPNSQPLFAFEWRDPEKGNTGQLTWTRLPQGFKNSPTLFDEALHRDLAPFRALNPQVVLLQYVDDLLVAAPTYRDCKEGTQKLLQELSKLGYRVSAKKAQLCQKEVTYLGYLLKEGKRWLTPARKATVMKIPPPTTPRQVREFLGTAGFCRLWIPGFASLAAPLYPLTKESIPFIWTEEHQKAFDRIKEALLSAPALALPDLTKPFTLYVDERAGVARGVLTQTLGPWRRPVAYLSKKLDPVASGWPTCLKAVAAVALLLKDADKLTLGQNVTVIASHSLESIVRQPPDRWMTNARMTHYQSLLLNERVSFAPPAVLNPATLLPVESEATPVHRCSEILAEETGTRRDLKDQPLPGVPAWYTDGSSFIAEGKRRAGAAIVDGKRTVWASSLPEGTSAQKAELVALTQALRLAEGKDINIYTDSRYAFATAHIHGAIYKQRGLLTSAGKDIKNKEEILALLEAIHLPKRVAIIHCPGHQKGNDPVATGNRRADEAAKQAALSTRVLAETTKPAGKRTADGSEFEKRTADGSEFESPKKKAKVE

SEQ ID NO: 792 - protein, 2092 aa, synthetic construct
MPAAKRVKLDGGDKKYSIGLDIGTNSVGWAVITDEYKVPSKKFKVLGNTDRHSIKKNLIGALLFDSGETAEATRLKRTARRRYTRRKNRICYLQEIFSNEMAKVDDSFFHRLEESFLVEEDKKHERHPIFGNIVDEVAYHEKYPTIYHLRKKLVDSTDKADLRLIYLALAHMIKFRGHFLIEGDLNPDNSDVDKLFIQLVQTYNQLFEENPINASGVDAKAILSARLSKSRRLENLIAQLPGEKKNGLFGNLIALSLGLTPNFKSNFDLAEDAKLQLSKDTYDDDLDNLLAQIGDQYADLFLAAKNLSDAILLSDILRVNTEITKAPLSASMIKRYDEHHQDLTLLKALVRQQLPEKYKEIFFDQSKNGYAGYIDGGASQEEFYKFIKPILEKMDGTEELLVKLNREDLLRKQRTFDNGSIPHQIHLGELHAILRRQEDFYPFLKDNREKIEKILTFRIPYYVGPLARGNSRFAWMTRKSEETITPWNFEEVVDKGASAQSFIERMTNFDKNLPNEKVLPKHSLLYEYFTVYNELTKVKYVTEGMRKPAFLSGEQKKAIVDLLFKTNRKVTVKQLKEDYFKKIECFDSVEISGVEDRFNASLGTYHDLLKIIKDKDFLDNEENEDILEDIVLTLTLFEDREMIEERLKTYAHLFDDKVMKQLKRRRYTGWGRLSRKLINGIRDKQSGKTILDFLKSDGFANRNFMQLIHDDSLTFKEDIQKAQVSGQGDSLHEHIANLAGSPAIKKGILQTVKVVDELVKVMGRHKPENIVIEMARENQTTQKGQKNSRERMKRIEEGIKELGSQILKEHPVENTQLQNEKLYLYYLQNGRDMYVDQELDINRLSDYDVDHIVPQSFLKDDSIDNKVLTRSDKARGKSDNVPSEEVVKKMKNYWRQLLNAKLITQRKFDNLTKAERGGLSELDKAGFIKRQLVETRQITKHVAQILDSRMNTKYDENDKLIREVKVITLKSKLVSDFRKDFQFYKVREINNYHHAHDAYLNAVVGTALIKKYPKLESEFVYGDYKVYDVRKMIAKSEQEIGKATAKYFFYSNIMNFFKTEITLANGEIRKRPLIETNGETGEIVWDKGRDFATVRKVLSMPQVNIVKKTEVQTGGFSKESILPKRNSDKLIARKKDWDPKKYGGFDSPTVAYSVLVVAKVEKGKSKKLKSVKELLGITIMERSSFEKNPIDFLEAKGYKEVKKDLIIKLPKYSLFELENGRKRMLASAGELQKGNELALPSKYVNFLYLASHYEKLKGSPEDNEQKQLFVEQHKHYLDEIIEQISEFSKRVILADANLDKVLSAYNKHRDKPIREQAENIIHLFTLTNLGAPAAFKYFDTTIDRKRYTSTKEVLDATLIHQSITGLYETRIDLSQLGGDGGGGSGGGGSSGGVLNLEEEYRLHEKPVPSSIDPSWLQLFPTVWAERAGMGLANQVPPVVVELRSGASPVAVRQYPMSKEAREGIRPHIQRFLDLGVLVPCQSPWNTPLLPVKKPGTNDYRPVQDLREINKRVQDIHPTVPNPYNLLSSLPPSHTWYSVLDLKDAFFCLKLHPNSQPLFAFEWRDPEKGNTGQLTWTRLPQGFKNSPTLFDEALHRDLAPFRALNPQVVLLQYVDDLLVAAPTYRDCKEGTQKLLQELSKLGYRVSAKKAQLCQKEVTYLGYLLKEGKRWLTPARKATVMKIPPPTTPRQVREFLGTAGFCRLWIPGFASLAAPLYPLTKESIPFIWTEEHQKAFDRIKEALLSAPALALPDLTKPFTLYVDERAGVARGVLTQTLGPWRRPVAYLSKKLDPVASGWPTCLKAVAAVALLLKDADKLTLGQNVTVIASHSLESIVRQPPDRWMTNARMTHYQSLLLNERVSFAPPAVLNPATLLPVESEATPVHRCSEILAEETGTRRDLKDQPLPGVPAWYTDGSSFIAEGKRRAGAAIVDGKRTVWASSLPEGTSAQKAELVALTQALRLAEGKDINIYTDSRYAFATAHIHGAIYKQRGLLTSAGKDIKNKEEILALLEAIHLPKRVAIIHCPGHQKGNDPVATGNRRADEAAKQAALSTRVLAETTKPAGKRTADGSEFEKRTADGSEFESPKKKAKVE

SEQ ID NO: 793 - protein, 2094 aa, synthetic construct
MPAAKRVKLDGGDKKYSIGLDIGTNSVGWAVITDEYKVPSKKFKVLGNTDRHSIKKNLIGALLFDSGETAEATRLKRTARRRYTRRKNRICYLQEIFSNEMAKVDDSFFHRLEESFLVEEDKKHERHPIFGNIVDEVAYHEKYPTIYHLRKKLVDSTDKADLRLIYLALAHMIKFRGHFLIEGDLNPDNSDVDKLFIQLVQTYNQLFEENPINASGVDAKAILSARLSKSRRLENLIAQLPGEKKNGLFGNLIALSLGLTPNFKSNFDLAEDAKLQLSKDTYDDDLDNLLAQIGDQYADLFLAAKNLSDAILLSDILRVNTEITKAPLSASMIKRYDEHHQDLTLLKALVRQQLPEKYKEIFFDQSKNGYAGYIDGGASQEEFYKFIKPILEKMDGTEELLVKLNREDLLRKQRTFDNGSIPHQIHLGELHAILRRQEDFYPFLKDNREKIEKILTFRIPYYVGPLARGNSRFAWMTRKSEETITPWNFEEVVDKGASAQSFIERMTNFDKNLPNEKVLPKHSLLYEYFTVYNELTKVKYVTEGMRKPAFLSGEQKKAIVDLLFKTNRKVTVKQLKEDYFKKIECFDSVEISGVEDRFNASLGTYHDLLKIIKDKDFLDNEENEDILEDIVLTLTLFEDREMIEERLKTYAHLFDDKVMKQLKRRRYTGWGRLSRKLINGIRDKQSGKTILDFLKSDGFANRNFMQLIHDDSLTFKEDIQKAQVSGQGDSLHEHIANLAGSPAIKKGILQTVKVVDELVKVMGRHKPENIVIEMARENQTTQKGQKNSRERMKRIEEGIKELGSQILKEHPVENTQLQNEKLYLYYLQNGRDMYVDQELDINRLSDYDVDHIVPQSFLKDDSIDNKVLTRSDKARGKSDNVPSEEVVKKMKNYWRQLLNAKLITQRKFDNLTKAERGGLSELDKAGFIKRQLVETRQITKHVAQILDSRMNTKYDENDKLIREVKVITLKSKLVSDFRKDFQFYKVREINNYHHAHDAYLNAVVGTALIKKYPKLESEFVYGDYKVYDVRKMIAKSEQEIGKATAKYFFYSNIMNFFKTEITLANGEIRKRPLIETNGETGEIVWDKGRDFATVRKVLSMPQVNIVKKTEVQTGGFSKESILPKRNSDKLIARKKDWDPKKYGGFDSPTVAYSVLVVAKVEKGKSKKLKSVKELLGITIMERSSFEKNPIDFLEAKGYKEVKKDLIIKLPKYSLFELENGRKRMLASAGELQKGNELALPSKYVNFLYLASHYEKLKGSPEDNEQKQLFVEQHKHYLDEIIEQISEFSKRVILADANLDKVLSAYNKHRDKPIREQAENIIHLFTLTNLGAPAAFKYFDTTIDRKRYTSTKEVLDATLIHQSITGLYETRIDLSQLGGDGGPAPGSSEAAAKGGVLNLEEEYRLHEKPVPSSIDPSWLQLFPTVWAERAGMGLANQVPPVVVELRSGASPVAVRQYPMSKEAREGIRPHIQRFLDLGVLVPCQSPWNTPLLPVKKPGTNDYRPVQDLREINKRVQDIHPTVPNPYNLLSSLPPSHTWYSVLDLKDAFFCLKLHPNSQPLFAFEWRDPEKGNTGQLTWTRLPQGFKNSPTLFDEALHRDLAPFRALNPQVVLLQYVDDLLVAAPTYRDCKEGTQKLLQELSKLGYRVSAKKAQLCQKEVTYLGYLLKEGKRWLTPARKATVMKIPPPTTPRQVREFLGTAGFCRLWIPGFASLAAPLYPLTKESIPFIWTEEHQKAFDRIKEALLSAPALALPDLTKPFTLYVDERAGVARGVLTQTLGPWRRPVAYLSKKLDPVASGWPTCLKAVAAVALLLKDADKLTLGQNVTVIASHSLESIVRQPPDRWMTNARMTHYQSLLLNERVSFAPPAVLNPATLLPVESEATPVHRCSEILAEETGTRRDLKDQPLPGVPAWYTDGSSFIAEGKRRAGAAIVDGKRTVWASSLPEGTSAQKAELVALTQALRLAEGKDINIYTDSRYAFATAHIHGAIYKQRGLLTSAGKDIKNKEEILALLEAIHLPKRVAIIHCPGHQKGNDPVATGNRRADEAAKQAALSTRVLAETTKPAGKRTADGSEFEKRTADGSEFESPKKKAKVE

SEQ ID NO: 794 - protein, 2092 aa, synthetic construct
MPAAKRVKLDGGDKKYSIGLDIGTNSVGWAVITDEYKVPSKKFKVLGNTDRHSIKKNLIGALLFDSGETAEATRLKRTARRRYTRRKNRICYLQEIFSNEMAKVDDSFFHRLEESFLVEEDKKHERHPIFGNIVDEVAYHEKYPTIYHLRKKLVDSTDKADLRLIYLALAHMIKFRGHFLIEGDLNPDNSDVDKLFIQLVQTYNQLFEENPINASGVDAKAILSARLSKSRRLENLIAQLPGEKKNGLFGNLIALSLGLTPNFKSNFDLAEDAKLQLSKDTYDDDLDNLLAQIGDQYADLFLAAKNLSDAILLSDILRVNTEITKAPLSASMIKRYDEHHQDLTLLKALVRQQLPEKYKEIFFDQSKNGYAGYIDGGASQEEFYKFIKPILEKMDGTEELLVKLNREDLLRKQRTFDNGSIPHQIHLGELHAILRRQEDFYPFLKDNREKIEKILTFRIPYYVGPLARGNSRFAWMTRKSEETITPWNFEEVVDKGASAQSFIERMTNFDKNLPNEKVLPKHSLLYEYFTVYNELTKVKYVTEGMRKPAFLSGEQKKAIVDLLFKTNRKVTVKQLKEDYFKKIECFDSVEISGVEDRFNASLGTYHDLLKIIKDKDFLDNEENEDILEDIVLTLTLFEDREMIEERLKTYAHLFDDKVMKQLKRRRYTGWGRLSRKLINGIRDKQSGKTILDFLKSDGFANRNFMQLIHDDSLTFKEDIQKAQVSGQGDSLHEHIANLAGSPAIKKGILQTVKVVDELVKVMGRHKPENIVIEMARENQTTQKGQKNSRERMKRIEEGIKELGSQILKEHPVENTQLQNEKLYLYYLQNGRDMYVDQELDINRLSDYDVDHIVPQSFLKDDSIDNKVLTRSDKARGKSDNVPSEEVVKKMKNYWRQLLNAKLITQRKFDNLTKAERGGLSELDKAGFIKRQLVETRQITKHVAQILDSRMNTKYDENDKLIREVKVITLKSKLVSDFRKDFQFYKVREINNYHHAHDAYLNAVVGTALIKKYPKLESEFVYGDYKVYDVRKMIAKSEQEIGKATAKYFFYSNIMNFFKTEITLANGEIRKRPLIETNGETGEIVWDKGRDFATVRKVLSMPQVNIVKKTEVQTGGFSKESILPKRNSDKLIARKKDWDPKKYGGFDSPTVAYSVLVVAKVEKGKSKKLKSVKELLGITIMERSSFEKNPIDFLEAKGYKEVKKDLIIKLPKYSLFELENGRKRMLASAGELQKGNELALPSKYVNFLYLASHYEKLKGSPEDNEQKQLFVEQHKHYLDEIIEQISEFSKRVILADANLDKVLSAYNKHRDKPIREQAENIIHLFTLTNLGAPAAFKYFDTTIDRKRYTSTKEVLDATLIHQSITGLYETRIDLSQLGGDGGGGSGSSPAPGGVLNLEEEYRLHEKPVPSSIDPSWLQLFPTVWAERAGMGLANQVPPVVVELRSGASPVAVRQYPMSKEAREGIRPHIQRFLDLGVLVPCQSPWNTPLLPVKKPGTNDYRPVQDLREINKRVQDIHPTVPNPYNLLSSLPPSHTWYSVLDLKDAFFCLKLHPNSQPLFAFEWRDPEKGNTGQLTWTRLPQGFKNSPTLFDEALHRDLAPFRALNPQVVLLQYVDDLLVAAPTYRDCKEGTQKLLQELSKLGYRVSAKKAQLCQKEVTYLGYLLKEGKRWLTPARKATVMKIPPPTTPRQVREFLGTAGFCRLWIPGFASLAAPLYPLTKESIPFIWTEEHQKAFDRIKEALLSAPALALPDLTKPFTLYVDERAGVARGVLTQTLGPWRRPVAYLSKKLDPVASGWPTCLKAVAAVALLLKDADKLTLGQNVTVIASHSLESIVRQPPDRWMTNARMTHYQSLLLNERVSFAPPAVLNPATLLPVESEATPVHRCSEILAEETGTRRDLKDQPLPGVPAWYTDGSSFIAEGKRRAGAAIVDGKRTVWASSLPEGTSAQKAELVALTQALRLAEGKDINIYTDSRYAFATAHIHGAIYKQRGLLTSAGKDIKNKEEILALLEAIHLPKRVAIIHCPGHQKGNDPVATGNRRADEAAKQAALSTRVLAETTKPAGKRTADGSEFEKRTADGSEFESPKKKAKVE

SEQ ID NO: 795 - protein, 2096 aa, synthetic construct
MPAAKRVKLDGGDKKYSIGLDIGTNSVGWAVITDEYKVPSKKFKVLGNTDRHSIKKNLIGALLFDSGETAEATRLKRTARRRYTRRKNRICYLQEIFSNEMAKVDDSFFHRLEESFLVEEDKKHERHPIFGNIVDEVAYHEKYPTIYHLRKKLVDSTDKADLRLIYLALAHMIKFRGHFLIEGDLNPDNSDVDKLFIQLVQTYNQLFEENPINASGVDAKAILSARLSKSRRLENLIAQLPGEKKNGLFGNLIALSLGLTPNFKSNFDLAEDAKLQLSKDTYDDDLDNLLAQIGDQYADLFLAAKNLSDAILLSDILRVNTEITKAPLSASMIKRYDEHHQDLTLLKALVRQQLPEKYKEIFFDQSKNGYAGYIDGGASQEEFYKFIKPILEKMDGTEELLVKLNREDLLRKQRTFDNGSIPHQIHLGELHAILRRQEDFYPFLKDNREKIEKILTFRIPYYVGPLARGNSRFAWMTRKSEETITPWNFEEVVDKGASAQSFIERMTNFDKNLPNEKVLPKHSLLYEYFTVYNELTKVKYVTEGMRKPAFLSGEQKKAIVDLLFKTNRKVTVKQLKEDYFKKIECFDSVEISGVEDRFNASLGTYHDLLKIIKDKDFLDNEENEDILEDIVLTLTLFEDREMIEERLKTYAHLFDDKVMKQLKRRRYTGWGRLSRKLINGIRDKQSGKTILDFLKSDGFANRNFMQLIHDDSLTFKEDIQKAQVSGQGDSLHEHIANLAGSPAIKKGILQTVKVVDELVKVMGRHKPENIVIEMARENQTTQKGQKNSRERMKRIEEGIKELGSQILKEHPVENTQLQNEKLYLYYLQNGRDMYVDQELDINRLSDYDVDHIVPQSFLKDDSIDNKVLTRSDKARGKSDNVPSEEVVKKMKNYWRQLLNAKLITQRKFDNLTKAERGGLSELDKAGFIKRQLVETRQITKHVAQILDSRMNTKYDENDKLIREVKVITLKSKLVSDFRKDFQFYKVREINNYHHAHDAYLNAVVGTALIKKYPKLESEFVYGDYKVYDVRKMIAKSEQEIGKATAKYFFYSNIMNFFKTEITLANGEIRKRPLIETNGETGEIVWDKGRDFATVRKVLSMPQVNIVKKTEVQTGGFSKESILPKRNSDKLIARKKDWDPKKYGGFDSPTVAYSVLVVAKVEKGKSKKLKSVKELLGITIMERSSFEKNPIDFLEAKGYKEVKKDLIIKLPKYSLFELENGRKRMLASAGELQKGNELALPSKYVNFLYLASHYEKLKGSPEDNEQKQLFVEQHKHYLDEIIEQISEFSKRVILADANLDKVLSAYNKHRDKPIREQAENIIHLFTLTNLGAPAAFKYFDTTIDRKRYTSTKEVLDATLIHQSITGLYETRIDLSQLGGDGGPAPAPAPAPAPAPGGVLNLEEEYRLHEKPVPSSIDPSWLQLFPTVWAERAGMGLANQVPPVVVELRSGASPVAVRQYPMSKEAREGIRPHIQRFLDLGVLVPCQSPWNTPLLPVKKPGTNDYRPVQDLREINKRVQDIHPTVPNPYNLLSSLPPSHTWYSVLDLKDAFFCLKLHPNSQPLFAFEWRDPEKGNTGQLTWTRLPQGFKNSPTLFDEALHRDLAPFRALNPQVVLLQYVDDLLVAAPTYRDCKEGTQKLLQELSKLGYRVSAKKAQLCQKEVTYLGYLLKEGKRWLTPARKATVMKIPPPTTPRQVREFLGTAGFCRLWIPGFASLAAPLYPLTKESIPFIWTEEHQKAFDRIKEALLSAPALALPDLTKPFTLYVDERAGVARGVLTQTLGPWRRPVAYLSKKLDPVASGWPTCLKAVAAVALLLKDADKLTLGQNVTVIASHSLESIVRQPPDRWMTNARMTHYQSLLLNERVSFAPPAVLNPATLLPVESEATPVHRCSEILAEETGTRRDLKDQPLPGVPAWYTDGSSFIAEGKRRAGAAIVDGKRTVWASSLPEGTSAQKAELVALTQALRLAEGKDINIYTDSRYAFATAHIHGAIYKQRGLLTSAGKDIKNKEEILALLEAIHLPKRVAIIHCPGHQKGNDPVATGNRRADEAAKQAALSTRVLAETTKPAGKRTADGSEFEKRTADGSEFESPKKKAKVE

SEQ ID NO: 796 - protein, 2094 aa, synthetic construct
MPAAKRVKLDGGDKKYSIGLDIGTNSVGWAVITDEYKVPSKKFKVLGNTDRHSIKKNLIGALLFDSGETAEATRLKRTARRRYTRRKNRICYLQEIFSNEMAKVDDSFFHRLEESFLVEEDKKHERHPIFGNIVDEVAYHEKYPTIYHLRKKLVDSTDKADLRLIYLALAHMIKFRGHFLIEGDLNPDNSDVDKLFIQLVQTYNQLFEENPINASGVDAKAILSARLSKSRRLENLIAQLPGEKKNGLFGNLIALSLGLTPNFKSNFDLAEDAKLQLSKDTYDDDLDNLLAQIGDQYADLFLAAKNLSDAILLSDILRVNTEITKAPLSASMIKRYDEHHQDLTLLKALVRQQLPEKYKEIFFDQSKNGYAGYIDGGASQEEFYKFIKPILEKMDGTEELLVKLNREDLLRKQRTFDNGSIPHQIHLGELHAILRRQEDFYPFLKDNREKIEKILTFRIPYYVGPLARGNSRFAWMTRKSEETITPWNFEEVVDKGASAQSFIERMTNFDKNLPNEKVLPKHSLLYEYFTVYNELTKVKYVTEGMRKPAFLSGEQKKAIVDLLFKTNRKVTVKQLKEDYFKKIECFDSVEISGVEDRFNASLGTYHDLLKIIKDKDFLDNEENEDILEDIVLTLTLFEDREMIEERLKTYAHLFDDKVMKQLKRRRYTGWGRLSRKLINGIRDKQSGKTILDFLKSDGFANRNFMQLIHDDSLTFKEDIQKAQVSGQGDSLHEHIANLAGSPAIKKGILQTVKVVDELVKVMGRHKPENIVIEMARENQTTQKGQKNSRERMKRIEEGIKELGSQILKEHPVENTQLQNEKLYLYYLQNGRDMYVDQELDINRLSDYDVDHIVPQSFLKDDSIDNKVLTRSDKARGKSDNVPSEEVVKKMKNYWRQLLNAKLITQRKFDNLTKAERGGLSELDKAGFIKRQLVETRQITKHVAQILDSRMNTKYDENDKLIREVKVITLKSKLVSDFRKDFQFYKVREINNYHHAHDAYLNAVVGTALIKKYPKLESEFVYGDYKVYDVRKMIAKSEQEIGKATAKYFFYSNIMNFFKTEITLANGEIRKRPLIETNGETGEIVWDKGRDFATVRKVLSMPQVNIVKKTEVQTGGFSKESILPKRNSDKLIARKKDWDPKKYGGFDSPTVAYSVLVVAKVEKGKSKKLKSVKELLGITIMERSSFEKNPIDFLEAKGYKEVKKDLIIKLPKYSLFELENGRKRMLASAGELQKGNELALPSKYVNFLYLASHYEKLKGSPEDNEQKQLFVEQHKHYLDEIIEQISEFSKRVILADANLDKVLSAYNKHRDKPIREQAENIIHLFTLTNLGAPAAFKYFDTTIDRKRYTSTKEVLDATLIHQSITGLYETRIDLSQLGGDGGGGSGGGEAAAKGGVLNLEEEYRLHEKPVPSSIDPSWLQLFPTVWAERAGMGLANQVPPVVVELRSGASPVAVRQYPMSKEAREGIRPHIQRFLDLGVLVPCQSPWNTPLLPVKKPGTNDYRPVQDLREINKRVQDIHPTVPNPYNLLSSLPPSHTWYSVLDLKDAFFCLKLHPNSQPLFAFEWRDPEKGNTGQLTWTRLPQGFKNSPTLFDEALHRDLAPFRALNPQVVLLQYVDDLLVAAPTYRDCKEGTQKLLQELSKLGYRVSAKKAQLCQKEVTYLGYLLKEGKRWLTPARKATVMKIPPPTTPRQVREFLGTAGFCRLWIPGFASLAAPLYPLTKESIPFIWTEEHQKAFDRIKEALLSAPALALPDLTKPFTLYVDERAGVARGVLTQTLGPWRRPVAYLSKKLDPVASGWPTCLKAVAAVALLLKDADKLTLGQNVTVIASHSLESIVRQPPDRWMTNARMTHYQSLLLNERVSFAPPAVLNPATLLPVESEATPVHRCSEILAEETGTRRDLKDQPLPGVPAWYTDGSSFIAEGKRRAGAAIVDGKRTVWASSLPEGTSAQKAELVALTQALRLAEGKDINIYTDSRYAFATAHIHGAIYKQRGLLTSAGKDIKNKEEILALLEAIHLPKRVAIIHCPGHQKGNDPVATGNRRADEAAKQAALSTRVLAETTKPAGKRTADGSEFEKRTADGSEFESPKKKAKVE

SEQ ID NO: 797 - protein, 2092 aa, synthetic construct
MPAAKRVKLDGGDKKYSIGLDIGTNSVGWAVITDEYKVPSKKFKVLGNTDRHSIKKNLIGALLFDSGETAEATRLKRTARRRYTRRKNRICYLQEIFSNEMAKVDDSFFHRLEESFLVEEDKKHERHPIFGNIVDEVAYHEKYPTIYHLRKKLVDSTDKADLRLIYLALAHMIKFRGHFLIEGDLNPDNSDVDKLFIQLVQTYNQLFEENPINASGVDAKAILSARLSKSRRLENLIAQLPGEKKNGLFGNLIALSLGLTPNFKSNFDLAEDAKLQLSKDTYDDDLDNLLAQIGDQYADLFLAAKNLSDAILLSDILRVNTEITKAPLSASMIKRYDEHHQDLTLLKALVRQQLPEKYKEIFFDQSKNGYAGYIDGGASQEEFYKFIKPILEKMDGTEELLVKLNREDLLRKQRTFDNGSIPHQIHLGELHAILRRQEDFYPFLKDNREKIEKILTFRIPYYVGPLARGNSRFAWMTRKSEETITPWNFEEVVDKGASAQSFIERMTNFDKNLPNEKVLPKHSLLYEYFTVYNELTKVKYVTEGMRKPAFLSGEQKKAIVDLLFKTNRKVTVKQLKEDYFKKIECFDSVEISGVEDRFNASLGTYHDLLKIIKDKDFLDNEENEDILEDIVLTLTLFEDREMIEERLKTYAHLFDDKVMKQLKRRRYTGWGRLSRKLINGIRDKQSGKTILDFLKSDGFANRNFMQLIHDDSLTFKEDIQKAQVSGQGDSLHEHIANLAGSPAIKKGILQTVKVVDELVKVMGRHKPENIVIEMARENQTTQKGQKNSRERMKRIEEGIKELGSQILKEHPVENTQLQNEKLYLYYLQNGRDMYVDQELDINRLSDYDVDHIVPQSFLKDDSIDNKVLTRSDKARGKSDNVPSEEVVKKMKNYWRQLLNAKLITQRKFDNLTKAERGGLSELDKAGFIKRQLVETRQITKHVAQILDSRMNTKYDENDKLIREVKVITLKSKLVSDFRKDFQFYKVREINNYHHAHDAYLNAVVGTALIKKYPKLESEFVYGDYKVYDVRKMIAKSEQEIGKATAKYFFYSNIMNFFKTEITLANGEIRKRPLIETNGETGEIVWDKGRDFATVRKVLSMPQVNIVKKTEVQTGGFSKESILPKRNSDKLIARKKDWDPKKYGGFDSPTVAYSVLVVAKVEKGKSKKLKSVKELLGITIMERSSFEKNPIDFLEAKGYKEVKKDLIIKLPKYSLFELENGRKRMLASAGELQKGNELALPSKYVNFLYLASHYEKLKGSPEDNEQKQLFVEQHKHYLDEIIEQISEFSKRVILADANLDKVLSAYNKHRDKPIREQAENIIHLFTLTNLGAPAAFKYFDTTIDRKRYTSTKEVLDATLIHQSITGLYETRIDLSQLGGDGGGGGPAPGSSGGVLNLEEEYRLHEKPVPSSIDPSWLQLFPTVWAERAGMGLANQVPPVVVELRSGASPVAVRQYPMSKEAREGIRPHIQRFLDLGVLVPCQSPWNTPLLPVKKPGTNDYRPVQDLREINKRVQDIHPTVPNPYNLLSSLPPSHTWYSVLDLKDAFFCLKLHPNSQPLFAFEWRDPEKGNTGQLTWTRLPQGFKNSPTLFDEALHRDLAPFRALNPQVVLLQYVDDLLVAAPTYRDCKEGTQKLLQELSKLGYRVSAKKAQLCQKEVTYLGYLLKEGKRWLTPARKATVMKIPPPTTPRQVREFLGTAGFCRLWIPGFASLAAPLYPLTKESIPFIWTEEHQKAFDRIKEALLSAPALALPDLTKPFTLYVDERAGVARGVLTQTLGPWRRPVAYLSKKLDPVASGWPTCLKAVAAVALLLKDADKLTLGQNVTVIASHSLESIVRQPPDRWMTNARMTHYQSLLLNERVSFAPPAVLNPATLLPVESEATPVHRCSEILAEETGTRRDLKDQPLPGVPAWYTDGSSFIAEGKRRAGAAIVDGKRTVWASSLPEGTSAQKAELVALTQALRLAEGKDINIYTDSRYAFATAHIHGAIYKQRGLLTSAGKDIKNKEEILALLEAIHLPKRVAIIHCPGHQKGNDPVATGNRRADEAAKQAALSTRVLAETTKPAGKRTADGSEFEKRTADGSEFESPKKKAKVE

SEQ ID NO: 798 - protein, 2094 aa, synthetic construct
MPAAKRVKLDGGDKKYSIGLDIGTNSVGWAVITDEYKVPSKKFKVLGNTDRHSIKKNLIGALLFDSGETAEATRLKRTARRRYTRRKNRICYLQEIFSNEMAKVDDSFFHRLEESFLVEEDKKHERHPIFGNIVDEVAYHEKYPTIYHLRKKLVDSTDKADLRLIYLALAHMIKFRGHFLIEGDLNPDNSDVDKLFIQLVQTYNQLFEENPINASGVDAKAILSARLSKSRRLENLIAQLPGEKKNGLFGNLIALSLGLTPNFKSNFDLAEDAKLQLSKDTYDDDLDNLLAQIGDQYADLFLAAKNLSDAILLSDILRVNTEITKAPLSASMIKRYDEHHQDLTLLKALVRQQLPEKYKEIFFDQSKNGYAGYIDGGASQEEFYKFIKPILEKMDGTEELLVKLNREDLLRKQRTFDNGSIPHQIHLGELHAILRRQEDFYPFLKDNREKIEKILTFRIPYYVGPLARGNSRFAWMTRKSEETITPWNFEEVVDKGASAQSFIERMTNFDKNLPNEKVLPKHSLLYEYFTVYNELTKVKYVTEGMRKPAFLSGEQKKAIVDLLFKTNRKVTVKQLKEDYFKKIECFDSVEISGVEDRFNASLGTYHDLLKIIKDKDFLDNEENEDILEDIVLTLTLFEDREMIEERLKTYAHLFDDKVMKQLKRRRYTGWGRLSRKLINGIRDKQSGKTILDFLKSDGFANRNFMQLIHDDSLTFKEDIQKAQVSGQGDSLHEHIANLAGSPAIKKGILQTVKVVDELVKVMGRHKPENIVIEMARENQTTQKGQKNSRERMKRIEEGIKELGSQILKEHPVENTQLQNEKLYLYYLQNGRDMYVDQELDINRLSDYDVDHIVPQSFLKDDSIDNKVLTRSDKARGKSDNVPSEEVVKKMKNYWRQLLNAKLITQRKFDNLTKAERGGLSELDKAGFIKRQLVETRQITKHVAQILDSRMNTKYDENDKLIREVKVITLKSKLVSDFRKDFQFYKVREINNYHHAHDAYLNAVVGTALIKKYPKLESEFVYGDYKVYDVRKMIAKSEQEIGKATAKYFFYSNIMNFFKTEITLANGEIRKRPLIETNGETGEIVWDKGRDFATVRKVLSMPQVNIVKKTEVQTGGFSKESILPKRNSDKLIARKKDWDPKKYGGFDSPTVAYSVLVVAKVEKGKSKKLKSVKELLGITIMERSSFEKNPIDFLEAKGYKEVKKDLIIKLPKYSLFELENGRKRMLASAGELQKGNELALPSKYVNFLYLASHYEKLKGSPEDNEQKQLFVEQHKHYLDEIIEQISEFSKRVILADANLDKVLSAYNKHRDKPIREQAENIIHLFTLTNLGAPAAFKYFDTTIDRKRYTSTKEVLDATLIHQSITGLYETRIDLSQLGGDGGGGGGGSEAAAKGGVLNLEEEYRLHEKPVPSSIDPSWLQLFPTVWAERAGMGLANQVPPVVVELRSGASPVAVRQYPMSKEAREGIRPHIQRFLDLGVLVPCQSPWNTPLLPVKKPGTNDYRPVQDLREINKRVQDIHPTVPNPYNLLSSLPPSHTWYSVLDLKDAFFCLKLHPNSQPLFAFEWRDPEKGNTGQLTWTRLPQGFKNSPTLFDEALHRDLAPFRALNPQVVLLQYVDDLLVAAPTYRDCKEGTQKLLQELSKLGYRVSAKKAQLCQKEVTYLGYLLKEGKRWLTPARKATVMKIPPPTTPRQVREFLGTAGFCRLWIPGFASLAAPLYPLTKESIPFIWTEEHQKAFDRIKEALLSAPALALPDLTKPFTLYVDERAGVARGVLTQTLGPWRRPVAYLSKKLDPVASGWPTCLKAVAAVALLLKDADKLTLGQNVTVIASHSLESIVRQPPDRWMTNARMTHYQSLLLNERVSFAPPAVLNPATLLPVESEATPVHRCSEILAEETGTRRDLKDQPLPGVPAWYTDGSSFIAEGKRRAGAAIVDGKRTVWASSLPEGTSAQKAELVALTQALRLAEGKDINIYTDSRYAFATAHIHGAIYKQRGLLTSAGKDIKNKEEILALLEAIHLPKRVAIIHCPGHQKGNDPVATGNRRADEAAKQAALSTRVLAETTKPAGKRTADGSEFEKRTADGSEFESPKKKAKVE

SEQ ID NO: 799 - protein, 2108 aa, synthetic construct
MPAAKRVKLDGGDKKYSIGLDIGTNSVGWAVITDEYKVPSKKFKVLGNTDRHSIKKNLIGALLFDSGETAEATRLKRTARRRYTRRKNRICYLQEIFSNEMAKVDDSFFHRLEESFLVEEDKKHERHPIFGNIVDEVAYHEKYPTIYHLRKKLVDSTDKADLRLIYLALAHMIKFRGHFLIEGDLNPDNSDVDKLFIQLVQTYNQLFEENPINASGVDAKAILSARLSKSRRLENLIAQLPGEKKNGLFGNLIALSLGLTPNFKSNFDLAEDAKLQLSKDTYDDDLDNLLAQIGDQYADLFLAAKNLSDAILLSDILRVNTEITKAPLSASMIKRYDEHHQDLTLLKALVRQQLPEKYKEIFFDQSKNGYAGYIDGGASQEEFYKFIKPILEKMDGTEELLVKLNREDLLRKQRTFDNGSIPHQIHLGELHAILRRQEDFYPFLKDNREKIEKILTFRIPYYVGPLARGNSRFAWMTRKSEETITPWNFEEVVDKGASAQSFIERMTNFDKNLPNEKVLPKHSLLYEYFTVYNELTKVKYVTEGMRKPAFLSGEQKKAIVDLLFKTNRKVTVKQLKEDYFKKIECFDSVEISGVEDRFNASLGTYHDLLKIIKDKDFLDNEENEDILEDIVLTLTLFEDREMIEERLKTYAHLFDDKVMKQLKRRRYTGWGRLSRKLINGIRDKQSGKTILDFLKSDGFANRNFMQLIHDDSLTFKEDIQKAQVSGQGDSLHEHIANLAGSPAIKKGILQTVKVVDELVKVMGRHKPENIVIEMARENQTTQKGQKNSRERMKRIEEGIKELGSQILKEHPVENTQLQNEKLYLYYLQNGRDMYVDQELDINRLSDYDVDHIVPQSFLKDDSIDNKVLTRSDKARGKSDNVPSEEVVKKMKNYWRQLLNAKLITQRKFDNLTKAERGGLSELDKAGFIKRQLVETRQITKHVAQILDSRMNTKYDENDKLIREVKVITLKSKLVSDFRKDFQFYKVREINNYHHAHDAYLNAVVGTALIKKYPKLESEFVYGDYKVYDVRKMIAKSEQEIGKATAKYFFYSNIMNFFKTEITLANGEIRKRPLIETNGETGEIVWDKGRDFATVRKVLSMPQVNIVKKTEVQTGGFSKESILPKRNSDKLIARKKDWDPKKYGGFDSPTVAYSVLVVAKVEKGKSKKLKSVKELLGITIMERSSFEKNPIDFLEAKGYKEVKKDLIIKLPKYSLFELENGRKRMLASAGELQKGNELALPSKYVNFLYLASHYEKLKGSPEDNEQKQLFVEQHKHYLDEIIEQISEFSKRVILADANLDKVLSAYNKHRDKPIREQAENIIHLFTLTNLGAPAAFKYFDTTIDRKRYTSTKEVLDATLIHQSITGLYETRIDLSQLGGDGGEAAAKEAAAKEAAAKEAAAKEAAAKGGVLNLEEEYRLHEKPVPSSIDPSWLQLFPTVWAERAGMGLANQVPPVVVELRSGASPVAVRQYPMSKEAREGIRPHIQRFLDLGVLVPCQSPWNTPLLPVKKPGTNDYRPVQDLREINKRVQDIHPTVPNPYNLLSSLPPSHTWYSVLDLKDAFFCLKLHPNSQPLFAFEWRDPEKGNTGQLTWTRLPQGFKNSPTLFNEALHRDLAPFRALNPQVVLLQYVDDLLVAAPTYRDCKEGTQKLLQELSKLGYRVSAKKAQLCQKEVTYLGYLLKEGKRWLTPARKATVMKIPPPTTPRQVREFLGTAGFCRLWIPGFASLAAPLYPLTKPSIPFIWTEEHQKAFDRIKEALLSAPALALPDLTKPFTLYVDERAGVARGVLTQTLGPWRRPVAYLSKKLDPVASGWPTCLKAVAAVALLLKDADKLTLGQNVTVIASHSLESIVRQPPDRWMTNARMTHYQSLLLNERVSFAPPAVLNPATLLPVESEATPVHRCSEILAEETGTRRDLKDQPLPGVPAWYTDGSSFIAEGKRRAGAAIVDGKRTVWASSLPEGTSAQKAELVALTQALRLAEGKDINIYTDSRYAFATAHIHGAIYKQRGWLTSAGKDIKNKEEILALLEAIHLPKRVAIIHCPGHQKGNDPVATGNRRADEAAKQAALSTRVLAETTKPAGKRTADGSEFEKRTADGSEFESPKKKAKVE

SEQ ID NO: 800 - protein, 2094 aa, synthetic construct
MPAAKRVKLDGGDKKYSIGLDIGTNSVGWAVITDEYKVPSKKFKVLGNTDRHSIKKNLIGALLFDSGETAEATRLKRTARRRYTRRKNRICYLQEIFSNEMAKVDDSFFHRLEESFLVEEDKKHERHPIFGNIVDEVAYHEKYPTIYHLRKKLVDSTDKADLRLIYLALAHMIKFRGHFLIEGDLNPDNSDVDKLFIQLVQTYNQLFEENPINASGVDAKAILSARLSKSRRLENLIAQLPGEKKNGLFGNLIALSLGLTPNFKSNFDLAEDAKLQLSKDTYDDDLDNLLAQIGDQYADLFLAAKNLSDAILLSDILRVNTEITKAPLSASMIKRYDEHHQDLTLLKALVRQQLPEKYKEIFFDQSKNGYAGYIDGGASQEEFYKFIKPILEKMDGTEELLVKLNREDLLRKQRTFDNGSIPHQIHLGELHAILRRQEDFYPFLKDNREKIEKILTFRIPYYVGPLARGNSRFAWMTRKSEETITPWNFEEVVDKGASAQSFIERMTNFDKNLPNEKVLPKHSLLYEYFTVYNELTKVKYVTEGMRKPAFLSGEQKKAIVDLLFKTNRKVTVKQLKEDYFKKIECFDSVEISGVEDRFNASLGTYHDLLKIIKDKDFLDNEENEDILEDIVLTLTLFEDREMIEERLKTYAHLFDDKVMKQLKRRRYTGWGRLSRKLINGIRDKQSGKTILDFLKSDGFANRNFMQLIHDDSLTFKEDIQKAQVSGQGDSLHEHIANLAGSPAIKKGILQTVKVVDELVKVMGRHKPENIVIEMARENQTTQKGQKNSRERMKRIEEGIKELGSQILKEHPVENTQLQNEKLYLYYLQNGRDMYVDQELDINRLSDYDVDHIVPQSFLKDDSIDNKVLTRSDKARGKSDNVPSEEVVKKMKNYWRQLLNAKLITQRKFDNLTKAERGGLSELDKAGFIKRQLVETRQITKHVAQILDSRMNTKYDENDKLIREVKVITLKSKLVSDFRKDFQFYKVREINNYHHAHDAYLNAVVGTALIKKYPKLESEFVYGDYKVYDVRKMIAKSEQEIGKATAKYFFYSNIMNFFKTEITLANGEIRKRPLIETNGETGEIVWDKGRDFATVRKVLSMPQVNIVKKTEVQTGGFSKESILPKRNSDKLIARKKDWDPKKYGGFDSPTVAYSVLVVAKVEKGKSKKLKSVKELLGITIMERSSFEKNPIDFLEAKGYKEVKKDLIIKLPKYSLFELENGRKRMLASAGELQKGNELALPSKYVNFLYLASHYEKLKGSPEDNEQKQLFVEQHKHYLDEIIEQISEFSKRVILADANLDKVLSAYNKHRDKPIREQAENIIHLFTLTNLGAPAAFKYFDTTIDRKRYTSTKEVLDATLIHQSITGLYETRIDLSQLGGDGGGGGGGSEAAAKGGVLNLEEEYRLHEKPVPSSIDPSWLQLFPTVWAERAGMGLANQVPPVVVELRSGASPVAVRQYPMSKEAREGIRPHIQRFLDLGVLVPCQSPWNTPLLPVKKPGTNDYRPVQDLREINKRVQDIHPTVPNPYNLLSSLPPSHTWYSVLDLKDAFFCLKLHPNSQPLFAFEWRDPEKGNTGQLTWTRLPQGFKNSPTLFNEALHRDLAPFRALNPQVVLLQYVDDLLVAAPTYRDCKEGTQKLLQELSKLGYRVSAKKAQLCQKEVTYLGYLLKEGKRWLTPARKATVMKIPPPTTPRQVREFLGTAGFCRLWIPGFASLAAPLYPLTKPSIPFIWTEEHQKAFDRIKEALLSAPALALPDLTKPFTLYVDERAGVARGVLTQTLGPWRRPVAYLSKKLDPVASGWPTCLKAVAAVALLLKDADKLTLGQNVTVIASHSLESIVRQPPDRWMTNARMTHYQSLLLNERVSFAPPAVLNPATLLPVESEATPVHRCSEILAEETGTRRDLKDQPLPGVPAWYTDGSSFIAEGKRRAGAAIVDGKRTVWASSLPEGTSAQKAELVALTQALRLAEGKDINIYTDSRYAFATAHIHGAIYKQRGWLTSAGKDIKNKEEILALLEAIHLPKRVAIIHCPGHQKGNDPVATGNRRADEAAKQAALSTRVLAETTKPAGKRTADGSEFEKRTADGSEFESPKKKAKVE

SEQ ID NO: 801 - protein, 2129 aa, synthetic construct
MPAAKRVKLDGGDKKYSIGLDIGTNSVGWAVITDEYKVPSKKFKVLGNTDRHSIKKNLIGALLFDSGETAEATRLKRTARRRYTRRKNRICYLQEIFSNEMAKVDDSFFHRLEESFLVEEDKKHERHPIFGNIVDEVAYHEKYPTIYHLRKKLVDSTDKADLRLIYLALAHMIKFRGHFLIEGDLNPDNSDVDKLFIQLVQTYNQLFEENPINASGVDAKAILSARLSKSRRLENLIAQLPGEKKNGLFGNLIALSLGLTPNFKSNFDLAEDAKLQLSKDTYDDDLDNLLAQIGDQYADLFLAAKNLSDAILLSDILRVNTEITKAPLSASMIKRYDEHHQDLTLLKALVRQQLPEKYKEIFFDQSKNGYAGYIDGGASQEEFYKFIKPILEKMDGTEELLVKLNREDLLRKQRTFDNGSIPHQIHLGELHAILRRQEDFYPFLKDNREKIEKILTFRIPYYVGPLARGNSRFAWMTRKSEETITPWNFEEVVDKGASAQSFIERMTNFDKNLPNEKVLPKHSLLYEYFTVYNELTKVKYVTEGMRKPAFLSGEQKKAIVDLLFKTNRKVTVKQLKEDYFKKIECFDSVEISGVEDRFNASLGTYHDLLKIIKDKDFLDNEENEDILEDIVLTLTLFEDREMIEERLKTYAHLFDDKVMKQLKRRRYTGWGRLSRKLINGIRDKQSGKTILDFLKSDGFANRNFMQLIHDDSLTFKEDIQKAQVSGQGDSLHEHIANLAGSPAIKKGILQTVKVVDELVKVMGRHKPENIVIEMARENQTTQKGQKNSRERMKRIEEGIKELGSQILKEHPVENTQLQNEKLYLYYLQNGRDMYVDQELDINRLSDYDVDHIVPQSFLKDDSIDNKVLTRSDKARGKSDNVPSEEVVKKMKNYWRQLLNAKLITQRKFDNLTKAERGGLSELDKAGFIKRQLVETRQITKHVAQILDSRMNTKYDENDKLIREVKVITLKSKLVSDFRKDFQFYKVREINNYHHAHDAYLNAVVGTALIKKYPKLESEFVYGDYKVYDVRKMIAKSEQEIGKATAKYFFYSNIMNFFKTEITLANGEIRKRPLIETNGETGEIVWDKGRDFATVRKVLSMPQVNIVKKTEVQTGGFSKESILPKRNSDKLIARKKDWDPKKYGGFDSPTVAYSVLVVAKVEKGKSKKLKSVKELLGITIMERSSFEKNPIDFLEAKGYKEVKKDLIIKLPKYSLFELENGRKRMLASAGELQKGNELALPSKYVNFLYLASHYEKLKGSPEDNEQKQLFVEQHKHYLDEIIEQISEFSKRVILADANLDKVLSAYNKHRDKPIREQAENIIHLFTLTNLGAPAAFKYFDTTIDRKRYTSTKEVLDATLIHQSITGLYETRIDLSQLGGDGGAEAAAKEAAAKEAAAKEAAAKALEAEAAAKEAAAKEAAAKEAAAKAGGVLNLEEEYRLHEKPVPSSIDPSWLQLFPTVWAERAGMGLANQVPPVVVELRSGASPVAVRQYPMSKEAREGIRPHIQRFLDLGVLVPCQSPWNTPLLPVKKPGTNDYRPVQDLREINKRVQDIHPTVPNPYNLLSSLPPSHTWYSVLDLKDAFFCLKLHPNSQPLFAFEWRDPEKGNTGQLTWTRLPQGFKNSPTLFNEALHRDLAPFRALNPQVVLLQYVDDLLVAAPTYRDCKEGTQKLLQELSKLGYRVSAKKAQLCQKEVTYLGYLLKEGKRWLTPARKATVMKIPPPTTPRQVREFLGTAGFCRLWIPGFASLAAPLYPLTKPSIPFIWTEEHQKAFDRIKEALLSAPALALPDLTKPFTLYVDERAGVARGVLTQTLGPWRRPVAYLSKKLDPVASGWPTCLKAVAAVALLLKDADKLTLGQNVTVIASHSLESIVRQPPDRWMTNARMTHYQSLLLNERVSFAPPAVLNPATLLPVESEATPVHRCSEILAEETGTRRDLKDQPLPGVPAWYTDGSSFIAEGKRRAGAAIVDGKRTVWASSLPEGTSAQKAELVALTQALRLAEGKDINIYTDSRYAFATAHIHGAIYKQRGWLTSAGKDIKNKEEILALLEAIHLPKRVAIIHCPGHQKGNDPVATGNRRADEAAKQAALSTRVLAETTKPAGKRTADGSEFEKRTADGSEFESPKKKAKVE

SEQ ID NO: 802 - protein, 2090 aa, synthetic construct
MPAAKRVKLDGGDKKYSIGLDIGTNSVGWAVITDEYKVPSKKFKVLGNTDRHSIKKNLIGALLFDSGETAEATRLKRTARRRYTRRKNRICYLQEIFSNEMAKVDDSFFHRLEESFLVEEDKKHERHPIFGNIVDEVAYHEKYPTIYHLRKKLVDSTDKADLRLIYLALAHMIKFRGHFLIEGDLNPDNSDVDKLFIQLVQTYNQLFEENPINASGVDAKAILSARLSKSRRLENLIAQLPGEKKNGLFGNLIALSLGLTPNFKSNFDLAEDAKLQLSKDTYDDDLDNLLAQIGDQYADLFLAAKNLSDAILLSDILRVNTEITKAPLSASMIKRYDEHHQDLTLLKALVRQQLPEKYKEIFFDQSKNGYAGYIDGGASQEEFYKFIKPILEKMDGTEELLVKLNREDLLRKQRTFDNGSIPHQIHLGELHAILRRQEDFYPFLKDNREKIEKILTFRIPYYVGPLARGNSRFAWMTRKSEETITPWNFEEVVDKGASAQSFIERMTNFDKNLPNEKVLPKHSLLYEYFTVYNELTKVKYVTEGMRKPAFLSGEQKKAIVDLLFKTNRKVTVKQLKEDYFKKIECFDSVEISGVEDRFNASLGTYHDLLKIIKDKDFLDNEENEDILEDIVLTLTLFEDREMIEERLKTYAHLFDDKVMKQLKRRRYTGWGRLSRKLINGIRDKQSGKTILDFLKSDGFANRNFMQLIHDDSLTFKEDIQKAQVSGQGDSLHEHIANLAGSPAIKKGILQTVKVVDELVKVMGRHKPENIVIEMARENQTTQKGQKNSRERMKRIEEGIKELGSQILKEHPVENTQLQNEKLYLYYLQNGRDMYVDQELDINRLSDYDVDHIVPQSFLKDDSIDNKVLTRSDKARGKSDNVPSEEVVKKMKNYWRQLLNAKLITQRKFDNLTKAERGGLSELDKAGFIKRQLVETRQITKHVAQILDSRMNTKYDENDKLIREVKVITLKSKLVSDFRKDFQFYKVREINNYHHAHDAYLNAVVGTALIKKYPKLESEFVYGDYKVYDVRKMIAKSEQEIGKATAKYFFYSNIMNFFKTEITLANGEIRKRPLIETNGETGEIVWDKGRDFATVRKVLSMPQVNIVKKTEVQTGGFSKESILPKRNSDKLIARKKDWDPKKYGGFDSPTVAYSVLVVAKVEKGKSKKLKSVKELLGITIMERSSFEKNPIDFLEAKGYKEVKKDLIIKLPKYSLFELENGRKRMLASAGELQKGNELALPSKYVNFLYLASHYEKLKGSPEDNEQKQLFVEQHKHYLDEIIEQISEFSKRVILADANLDKVLSAYNKHRDKPIREQAENIIHLFTLTNLGAPAAFKYFDTTIDRKRYTSTKEVLDATLIHQSITGLYETRIDLSQLGGDGGGGGGGGGGGVLNLEEEYRLHEKPVPSSIDPSWLQLFPTVWAERAGMGLANQVPPVVVELRSGASPVAVRQYPMSKEAREGIRPHIQRFLDLGVLVPCQSPWNTPLLPVKKPGTNDYRPVQDLREINKRVQDIHPTVPNPYNLLSSLPPSHTWYSVLDLKDAFFCLKLHPNSQPLFAFEWRDPEKGNTGQLTWTRLPQGFKNSPTLFNEALHRDLAPFRALNPQVVLLQYVDDLLVAAPTYRDCKEGTQKLLQELSKLGYRVSAKKAQLCQKEVTYLGYLLKEGKRWLTPARKATVMKIPPPTTPRQVREFLGTAGFCRLWIPGFASLAAPLYPLTKPSIPFIWTEEHQKAFDRIKEALLSAPALALPDLTKPFTLYVDERAGVARGVLTQTLGPWRRPVAYLSKKLDPVASGWPTCLKAVAAVALLLKDADKLTLGQNVTVIASHSLESIVRQPPDRWMTNARMTHYQSLLLNERVSFAPPAVLNPATLLPVESEATPVHRCSEILAEETGTRRDLKDQPLPGVPAWYTDGSSFIAEGKRRAGAAIVDGKRTVWASSLPEGTSAQKAELVALTQALRLAEGKDINIYTDSRYAFATAHIHGAIYKQRGWLTSAGKDIKNKEEILALLEAIHLPKRVAIIHCPGHQKGNDPVATGNRRADEAAKQAALSTRVLAETTKPAGKRTADGSEFEKRTADGSEFESPKKKAKVE

SEQ ID NO: 803 - protein, 2086 aa, synthetic construct
MPAAKRVKLDGGDKKYSIGLDIGTNSVGWAVITDEYKVPSKKFKVLGNTDRHSIKKNLIGALLFDSGETAEATRLKRTARRRYTRRKNRICYLQEIFSNEMAKVDDSFFHRLEESFLVEEDKKHERHPIFGNIVDEVAYHEKYPTIYHLRKKLVDSTDKADLRLIYLALAHMIKFRGHFLIEGDLNPDNSDVDKLFIQLVQTYNQLFEENPINASGVDAKAILSARLSKSRRLENLIAQLPGEKKNGLFGNLIALSLGLTPNFKSNFDLAEDAKLQLSKDTYDDDLDNLLAQIGDQYADLFLAAKNLSDAILLSDILRVNTEITKAPLSASMIKRYDEHHQDLTLLKALVRQQLPEKYKEIFFDQSKNGYAGYIDGGASQEEFYKFIKPILEKMDGTEELLVKLNREDLLRKQRTFDNGSIPHQIHLGELHAILRRQEDFYPFLKDNREKIEKILTFRIPYYVGPLARGNSRFAWMTRKSEETITPWNFEEVVDKGASAQSFIERMTNFDKNLPNEKVLPKHSLLYEYFTVYNELTKVKYVTEGMRKPAFLSGEQKKAIVDLLFKTNRKVTVKQLKEDYFKKIECFDSVEISGVEDRFNASLGTYHDLLKIIKDKDFLDNEENEDILEDIVLTLTLFEDREMIEERLKTYAHLFDDKVMKQLKRRRYTGWGRLSRKLINGIRDKQSGKTILDFLKSDGFANRNFMQLIHDDSLTFKEDIQKAQVSGQGDSLHEHIANLAGSPAIKKGILQTVKVVDELVKVMGRHKPENIVIEMARENQTTQKGQKNSRERMKRIEEGIKELGSQILKEHPVENTQLQNEKLYLYYLQNGRDMYVDQELDINRLSDYDVDHIVPQSFLKDDSIDNKVLTRSDKARGKSDNVPSEEVVKKMKNYWRQLLNAKLITQRKFDNLTKAERGGLSELDKAGFIKRQLVETRQITKHVAQILDSRMNTKYDENDKLIREVKVITLKSKLVSDFRKDFQFYKVREINNYHHAHDAYLNAVVGTALIKKYPKLESEFVYGDYKVYDVRKMIAKSEQEIGKATAKYFFYSNIMNFFKTEITLANGEIRKRPLIETNGETGEIVWDKGRDFATVRKVLSMPQVNIVKKTEVQTGGFSKESILPKRNSDKLIARKKDWDPKKYGGFDSPTVAYSVLVVAKVEKGKSKKLKSVKELLGITIMERSSFEKNPIDFLEAKGYKEVKKDLIIKLPKYSLFELENGRKRMLASAGELQKGNELALPSKYVNFLYLASHYEKLKGSPEDNEQKQLFVEQHKHYLDEIIEQISEFSKRVILADANLDKVLSAYNKHRDKPIREQAENIIHLFTLTNLGAPAAFKYFDTTIDRKRYTSTKEVLDATLIHQSITGLYETRIDLSQLGGDGGGSSGGVLNLEEEYRLHEKPVPSSIDPSWLQLFPTVWAERAGMGLANQVPPVVVELRSGASPVAVRQYPMSKEAREGIRPHIQRFLDLGVLVPCQSPWNTPLLPVKKPGTNDYRPVQDLREINKRVQDIHPTVPNPYNLLSSLPPSHTWYSVLDLKDAFFCLKLHPNSQPLFAFEWRDPEKGNTGQLTWTRLPQGFKNSPTLFNEALHRDLAPFRALNPQVVLLQYVDDLLVAAPTYRDCKEGTQKLLQELSKLGYRVSAKKAQLCQKEVTYLGYLLKEGKRWLTPARKATVMKIPPPTTPRQVREFLGTAGFCRLWIPGFASLAAPLYPLTKPSIPFIWTEEHQKAFDRIKEALLSAPALALPDLTKPFTLYVDERAGVARGVLTQTLGPWRRPVAYLSKKLDPVASGWPTCLKAVAAVALLLKDADKLTLGQNVTVIASHSLESIVRQPPDRWMTNARMTHYQSLLLNERVSFAPPAVLNPATLLPVESEATPVHRCSEILAEETGTRRDLKDQPLPGVPAWYTDGSSFIAEGKRRAGAAIVDGKRTVWASSLPEGTSAQKAELVALTQALRLAEGKDINIYTDSRYAFATAHIHGAIYKQRGWLTSAGKDIKNKEEILALLEAIHLPKRVAIIHCPGHQKGNDPVATGNRRADEAAKQAALSTRVLAETTKPAGKRTADGSEFEKRTADGSEFESPKKKAKVE

SEQ ID NO: 804 - protein, 2092 aa, synthetic construct
MPAAKRVKLDGGDKKYSIGLDIGTNSVGWAVITDEYKVPSKKFKVLGNTDRHSIKKNLIGALLFDSGETAEATRLKRTARRRYTRRKNRICYLQEIFSNEMAKVDDSFFHRLEESFLVEEDKKHERHPIFGNIVDEVAYHEKYPTIYHLRKKLVDSTDKADLRLIYLALAHMIKFRGHFLIEGDLNPDNSDVDKLFIQLVQTYNQLFEENPINASGVDAKAILSARLSKSRRLENLIAQLPGEKKNGLFGNLIALSLGLTPNFKSNFDLAEDAKLQLSKDTYDDDLDNLLAQIGDQYADLFLAAKNLSDAILLSDILRVNTEITKAPLSASMIKRYDEHHQDLTLLKALVRQQLPEKYKEIFFDQSKNGYAGYIDGGASQEEFYKFIKPILEKMDGTEELLVKLNREDLLRKQRTFDNGSIPHQIHLGELHAILRRQEDFYPFLKDNREKIEKILTFRIPYYVGPLARGNSRFAWMTRKSEETITPWNFEEVVDKGASAQSFIERMTNFDKNLPNEKVLPKHSLLYEYFTVYNELTKVKYVTEGMRKPAFLSGEQKKAIVDLLFKTNRKVTVKQLKEDYFKKIECFDSVEISGVEDRFNASLGTYHDLLKIIKDKDFLDNEENEDILEDIVLTLTLFEDREMIEERLKTYAHLFDDKVMKQLKRRRYTGWGRLSRKLINGIRDKQSGKTILDFLKSDGFANRNFMQLIHDDSLTFKEDIQKAQVSGQGDSLHEHIANLAGSPAIKKGILQTVKVVDELVKVMGRHKPENIVIEMARENQTTQKGQKNSRERMKRIEEGIKELGSQILKEHPVENTQLQNEKLYLYYLQNGRDMYVDQELDINRLSDYDVDHIVPQSFLKDDSIDNKVLTRSDKARGKSDNVPSEEVVKKMKNYWRQLLNAKLITQRKFDNLTKAERGGLSELDKAGFIKRQLVETRQITKHVAQILDSRMNTKYDENDKLIREVKVITLKSKLVSDFRKDFQFYKVREINNYHHAHDAYLNAVVGTALIKKYPKLESEFVYGDYKVYDVRKMIAKSEQEIGKATAKYFFYSNIMNFFKTEITLANGEIRKRPLIETNGETGEIVWDKGRDFATVRKVLSMPQVNIVKKTEVQTGGFSKESILPKRNSDKLIARKKDWDPKKYGGFDSPTVAYSVLVVAKVEKGKSKKLKSVKELLGITIMERSSFEKNPIDFLEAKGYKEVKKDLIIKLPKYSLFELENGRKRMLASAGELQKGNELALPSKYVNFLYLASHYEKLKGSPEDNEQKQLFVEQHKHYLDEIIEQISEFSKRVILADANLDKVLSAYNKHRDKPIREQAENIIHLFTLTNLGAPAAFKYFDTTIDRKRYTSTKEVLDATLIHQSITGLYETRIDLSQLGGDGGGGGGSSGGSGGVLNLEEEYRLHEKPVPSSIDPSWLQLFPTVWAERAGMGLANQVPPVVVELRSGASPVAVRQYPMSKEAREGIRPHIQRFLDLGVLVPCQSPWNTPLLPVKKPGTNDYRPVQDLREINKRVQDIHPTVPNPYNLLSSLPPSHTWYSVLDLKDAFFCLKLHPNSQPLFAFEWRDPEKGNTGQLTWTRLPQGFKNSPTLFNEALHRDLAPFRALNPQVVLLQYVDDLLVAAPTYRDCKEGTQKLLQELSKLGYRVSAKKAQLCQKEVTYLGYLLKEGKRWLTPARKATVMKIPPPTTPRQVREFLGTAGFCRLWIPGFASLAAPLYPLTKPSIPFIWTEEHQKAFDRIKEALLSAPALALPDLTKPFTLYVDERAGVARGVLTQTLGPWRRPVAYLSKKLDPVASGWPTCLKAVAAVALLLKDADKLTLGQNVTVIASHSLESIVRQPPDRWMTNARMTHYQSLLLNERVSFAPPAVLNPATLLPVESEATPVHRCSEILAEETGTRRDLKDQPLPGVPAWYTDGSSFIAEGKRRAGAAIVDGKRTVWASSLPEGTSAQKAELVALTQALRLAEGKDINIYTDSRYAFATAHIHGAIYKQRGWLTSAGKDIKNKEEILALLEAIHLPKRVAIIHCPGHQKGNDPVATGNRRADEAAKQAALSTRVLAETTKPAGKRTADGSEFEKRTADGSEFESPKKKAKVE

SEQ ID NO: 805 - protein, 2089 aa, synthetic construct
MPAAKRVKLDGGDKKYSIGLDIGTNSVGWAVITDEYKVPSKKFKVLGNTDRHSIKKNLIGALLFDSGETAEATRLKRTARRRYTRRKNRICYLQEIFSNEMAKVDDSFFHRLEESFLVEEDKKHERHPIFGNIVDEVAYHEKYPTIYHLRKKLVDSTDKADLRLIYLALAHMIKFRGHFLIEGDLNPDNSDVDKLFIQLVQTYNQLFEENPINASGVDAKAILSARLSKSRRLENLIAQLPGEKKNGLFGNLIALSLGLTPNFKSNFDLAEDAKLQLSKDTYDDDLDNLLAQIGDQYADLFLAAKNLSDAILLSDILRVNTEITKAPLSASMIKRYDEHHQDLTLLKALVRQQLPEKYKEIFFDQSKNGYAGYIDGGASQEEFYKFIKPILEKMDGTEELLVKLNREDLLRKQRTFDNGSIPHQIHLGELHAILRRQEDFYPFLKDNREKIEKILTFRIPYYVGPLARGNSRFAWMTRKSEETITPWNFEEVVDKGASAQSFIERMTNFDKNLPNEKVLPKHSLLYEYFTVYNELTKVKYVTEGMRKPAFLSGEQKKAIVDLLFKTNRKVTVKQLKEDYFKKIECFDSVEISGVEDRFNASLGTYHDLLKIIKDKDFLDNEENEDILEDIVLTLTLFEDREMIEERLKTYAHLFDDKVMKQLKRRRYTGWGRLSRKLINGIRDKQSGKTILDFLKSDGFANRNFMQLIHDDSLTFKEDIQKAQVSGQGDSLHEHIANLAGSPAIKKGILQTVKVVDELVKVMGRHKPENIVIEMARENQTTQKGQKNSRERMKRIEEGIKELGSQILKEHPVENTQLQNEKLYLYYLQNGRDMYVDQELDINRLSDYDVDHIVPQSFLKDDSIDNKVLTRSDKARGKSDNVPSEEVVKKMKNYWRQLLNAKLITQRKFDNLTKAERGGLSELDKAGFIKRQLVETRQITKHVAQILDSRMNTKYDENDKLIREVKVITLKSKLVSDFRKDFQFYKVREINNYHHAHDAYLNAVVGTALIKKYPKLESEFVYGDYKVYDVRKMIAKSEQEIGKATAKYFFYSNIMNFFKTEITLANGEIRKRPLIETNGETGEIVWDKGRDFATVRKVLSMPQVNIVKKTEVQTGGFSKESILPKRNSDKLIARKKDWDPKKYGGFDSPTVAYSVLVVAKVEKGKSKKLKSVKELLGITIMERSSFEKNPIDFLEAKGYKEVKKDLIIKLPKYSLFELENGRKRMLASAGELQKGNELALPSKYVNFLYLASHYEKLKGSPEDNEQKQLFVEQHKHYLDEIIEQISEFSKRVILADANLDKVLSAYNKHRDKPIREQAENIIHLFTLTNLGAPAAFKYFDTTIDRKRYTSTKEVLDATLIHQSITGLYETRIDLSQLGGDGGGGGGGGGGVLNLEEEYRLHEKPVPSSIDPSWLQLFPTVWAERAGMGLANQVPPVVVELRSGASPVAVRQYPMSKEAREGIRPHIQRFLDLGVLVPCQSPWNTPLLPVKKPGTNDYRPVQDLREINKRVQDIHPTVPNPYNLLSSLPPSHTWYSVLDLKDAFFCLKLHPNSQPLFAFEWRDPEKGNTGQLTWTRLPQGFKNSPTLFNEALHRDLAPFRALNPQVVLLQYVDDLLVAAPTYRDCKEGTQKLLQELSKLGYRVSAKKAQLCQKEVTYLGYLLKEGKRWLTPARKATVMKIPPPTTPRQVREFLGTAGFCRLWIPGFASLAAPLYPLTKPSIPFIWTEEHQKAFDRIKEALLSAPALALPDLTKPFTLYVDERAGVARGVLTQTLGPWRRPVAYLSKKLDPVASGWPTCLKAVAAVALLLKDADKLTLGQNVTVIASHSLESIVRQPPDRWMTNARMTHYQSLLLNERVSFAPPAVLNPATLLPVESEATPVHRCSEILAEETGTRRDLKDQPLPGVPAWYTDGSSFIAEGKRRAGAAIVDGKRTVWASSLPEGTSAQKAELVALTQALRLAEGKDINIYTDSRYAFATAHIHGAIYKQRGWLTSAGKDIKNKEEILALLEAIHLPKRVAIIHCPGHQKGNDPVATGNRRADEAAKQAALSTRVLAETTKPAGKRTADGSEFEKRTADGSEFESPKKKAKVE

SEQ ID NO: 806 - protein, 2099 aa, synthetic construct
MPAAKRVKLDGGDKKYSIGLDIGTNSVGWAVITDEYKVPSKKFKVLGNTDRHSIKKNLIGALLFDSGETAEATRLKRTARRRYTRRKNRICYLQEIFSNEMAKVDDSFFHRLEESFLVEEDKKHERHPIFGNIVDEVAYHEKYPTIYHLRKKLVDSTDKADLRLIYLALAHMIKFRGHFLIEGDLNPDNSDVDKLFIQLVQTYNQLFEENPINASGVDAKAILSARLSKSRRLENLIAQLPGEKKNGLFGNLIALSLGLTPNFKSNFDLAEDAKLQLSKDTYDDDLDNLLAQIGDQYADLFLAAKNLSDAILLSDILRVNTEITKAPLSASMIKRYDEHHQDLTLLKALVRQQLPEKYKEIFFDQSKNGYAGYIDGGASQEEFYKFIKPILEKMDGTEELLVKLNREDLLRKQRTFDNGSIPHQIHLGELHAILRRQEDFYPFLKDNREKIEKILTFRIPYYVGPLARGNSRFAWMTRKSEETITPWNFEEVVDKGASAQSFIERMTNFDKNLPNEKVLPKHSLLYEYFTVYNELTKVKYVTEGMRKPAFLSGEQKKAIVDLLFKTNRKVTVKQLKEDYFKKIECFDSVEISGVEDRFNASLGTYHDLLKIIKDKDFLDNEENEDILEDIVLTLTLFEDREMIEERLKTYAHLFDDKVMKQLKRRRYTGWGRLSRKLINGIRDKQSGKTILDFLKSDGFANRNFMQLIHDDSLTFKEDIQKAQVSGQGDSLHEHIANLAGSPAIKKGILQTVKVVDELVKVMGRHKPENIVIEMARENQTTQKGQKNSRERMKRIEEGIKELGSQILKEHPVENTQLQNEKLYLYYLQNGRDMYVDQELDINRLSDYDVDHIVPQSFLKDDSIDNKVLTRSDKARGKSDNVPSEEVVKKMKNYWRQLLNAKLITQRKFDNLTKAERGGLSELDKAGFIKRQLVETRQITKHVAQILDSRMNTKYDENDKLIREVKVITLKSKLVSDFRKDFQFYKVREINNYHHAHDAYLNAVVGTALIKKYPKLESEFVYGDYKVYDVRKMIAKSEQEIGKATAKYFFYSNIMNFFKTEITLANGEIRKRPLIETNGETGEIVWDKGRDFATVRKVLSMPQVNIVKKTEVQTGGFSKESILPKRNSDKLIARKKDWDPKKYGGFDSPTVAYSVLVVAKVEKGKSKKLKSVKELLGITIMERSSFEKNPIDFLEAKGYKEVKKDLIIKLPKYSLFELENGRKRMLASAGELQKGNELALPSKYVNFLYLASHYEKLKGSPEDNEQKQLFVEQHKHYLDEIIEQISEFSKRVILADANLDKVLSAYNKHRDKPIREQAENIIHLFTLTNLGAPAAFKYFDTTIDRKRYTSTKEVLDATLIHQSITGLYETRIDLSQLGGDGGSGSETPGTSESATPESGGVLNLEEEYRLHEKPVPSSIDPSWLQLFPTVWAERAGMGLANQVPPVVVELRSGASPVAVRQYPMSKEAREGIRPHIQRFLDLGVLVPCQSPWNTPLLPVKKPGTNDYRPVQDLREINKRVQDIHPTVPNPYNLLSSLPPSHTWYSVLDLKDAFFCLKLHPNSQPLFAFEWRDPEKGNTGQLTWTRLPQGFKNSPTLFNEALHRDLAPFRALNPQVVLLQYVDDLLVAAPTYRDCKEGTQKLLQELSKLGYRVSAKKAQLCQKEVTYLGYLLKEGKRWLTPARKATVMKIPPPTTPRQVREFLGTAGFCRLWIPGFASLAAPLYPLTKPSIPFIWTEEHQKAFDRIKEALLSAPALALPDLTKPFTLYVDERAGVARGVLTQTLGPWRRPVAYLSKKLDPVASGWPTCLKAVAAVALLLKDADKLTLGQNVTVIASHSLESIVRQPPDRWMTNARMTHYQSLLLNERVSFAPPAVLNPATLLPVESEATPVHRCSEILAEETGTRRDLKDQPLPGVPAWYTDGSSFIAEGKRRAGAAIVDGKRTVWASSLPEGTSAQKAELVALTQALRLAEGKDINIYTDSRYAFATAHIHGAIYKQRGWLTSAGKDIKNKEEILALLEAIHLPKRVAIIHCPGHQKGNDPVATGNRRADEAAKQAALSTRVLAETTKPAGKRTADGSEFEKRTADGSEFESPKKKAKVE

SEQ ID NO: 807 - protein, 2094 aa, synthetic construct
MPAAKRVKLDGGDKKYSIGLDIGTNSVGWAVITDEYKVPSKKFKVLGNTDRHSIKKNLIGALLFDSGETAEATRLKRTARRRYTRRKNRICYLQEIFSNEMAKVDDSFFHRLEESFLVEEDKKHERHPIFGNIVDEVAYHEKYPTIYHLRKKLVDSTDKADLRLIYLALAHMIKFRGHFLIEGDLNPDNSDVDKLFIQLVQTYNQLFEENPINASGVDAKAILSARLSKSRRLENLIAQLPGEKKNGLFGNLIALSLGLTPNFKSNFDLAEDAKLQLSKDTYDDDLDNLLAQIGDQYADLFLAAKNLSDAILLSDILRVNTEITKAPLSASMIKRYDEHHQDLTLLKALVRQQLPEKYKEIFFDQSKNGYAGYIDGGASQEEFYKFIKPILEKMDGTEELLVKLNREDLLRKQRTFDNGSIPHQIHLGELHAILRRQEDFYPFLKDNREKIEKILTFRIPYYVGPLARGNSRFAWMTRKSEETITPWNFEEVVDKGASAQSFIERMTNFDKNLPNEKVLPKHSLLYEYFTVYNELTKVKYVTEGMRKPAFLSGEQKKAIVDLLFKTNRKVTVKQLKEDYFKKIECFDSVEISGVEDRFNASLGTYHDLLKIIKDKDFLDNEENEDILEDIVLTLTLFEDREMIEERLKTYAHLFDDKVMKQLKRRRYTGWGRLSRKLINGIRDKQSGKTILDFLKSDGFANRNFMQLIHDDSLTFKEDIQKAQVSGQGDSLHEHIANLAGSPAIKKGILQTVKVVDELVKVMGRHKPENIVIEMARENQTTQKGQKNSRERMKRIEEGIKELGSQILKEHPVENTQLQNEKLYLYYLQNGRDMYVDQELDINRLSDYDVDHIVPQSFLKDDSIDNKVLTRSDKARGKSDNVPSEEVVKKMKNYWRQLLNAKLITQRKFDNLTKAERGGLSELDKAGFIKRQLVETRQITKHVAQILDSRMNTKYDENDKLIREVKVITLKSKLVSDFRKDFQFYKVREINNYHHAHDAYLNAVVGTALIKKYPKLESEFVYGDYKVYDVRKMIAKSEQEIGKATAKYFFYSNIMNFFKTEITLANGEIRKRPLIETNGETGEIVWDKGRDFATVRKVLSMPQVNIVKKTEVQTGGFSKESILPKRNSDKLIARKKDWDPKKYGGFDSPTVAYSVLVVAKVEKGKSKKLKSVKELLGITIMERSSFEKNPIDFLEAKGYKEVKKDLIIKLPKYSLFELENGRKRMLASAGELQKGNELALPSKYVNFLYLASHYEKLKGSPEDNEQKQLFVEQHKHYLDEIIEQISEFSKRVILADANLDKVLSAYNKHRDKPIREQAENIIHLFTLTNLGAPAAFKYFDTTIDRKRYTSTKEVLDATLIHQSITGLYETRIDLSQLGGDGGGGGGSSEAAAKGGVLNLEEEYRLHEKPVPSSIDPSWLQLFPTVWAERAGMGLANQVPPVVVELRSGASPVAVRQYPMSKEAREGIRPHIQRFLDLGVLVPCQSPWNTPLLPVKKPGTNDYRPVQDLREINKRVQDIHPTVPNPYNLLSSLPPSHTWYSVLDLKDAFFCLKLHPNSQPLFAFEWRDPEKGNTGQLTWTRLPQGFKNSPTLFNEALHRDLAPFRALNPQVVLLQYVDDLLVAAPTYRDCKEGTQKLLQELSKLGYRVSAKKAQLCQKEVTYLGYLLKEGKRWLTPARKATVMKIPPPTTPRQVREFLGTAGFCRLWIPGFASLAAPLYPLTKPSIPFIWTEEHQKAFDRIKEALLSAPALALPDLTKPFTLYVDERAGVARGVLTQTLGPWRRPVAYLSKKLDPVASGWPTCLKAVAAVALLLKDADKLTLGQNVTVIASHSLESIVRQPPDRWMTNARMTHYQSLLLNERVSFAPPAVLNPATLLPVESEATPVHRCSEILAEETGTRRDLKDQPLPGVPAWYTDGSSFIAEGKRRAGAAIVDGKRTVWASSLPEGTSAQKAELVALTQALRLAEGKDINIYTDSRYAFATAHIHGAIYKQRGWLTSAGKDIKNKEEILALLEAIHLPKRVAIIHCPGHQKGNDPVATGNRRADEAAKQAALSTRVLAETTKPAGKRTADGSEFEKRTADGSEFESPKKKAKVE

SEQ ID NO: 808 - protein, 2093 aa, synthetic construct
MPAAKRVKLDGGDKKYSIGLDIGTNSVGWAVITDEYKVPSKKFKVLGNTDRHSIKKNLIGALLFDSGETAEATRLKRTARRRYTRRKNRICYLQEIFSNEMAKVDDSFFHRLEESFLVEEDKKHERHPIFGNIVDEVAYHEKYPTIYHLRKKLVDSTDKADLRLIYLALAHMIKFRGHFLIEGDLNPDNSDVDKLFIQLVQTYNQLFEENPINASGVDAKAILSARLSKSRRLENLIAQLPGEKKNGLFGNLIALSLGLTPNFKSNFDLAEDAKLQLSKDTYDDDLDNLLAQIGDQYADLFLAAKNLSDAILLSDILRVNTEITKAPLSASMIKRYDEHHQDLTLLKALVRQQLPEKYKEIFFDQSKNGYAGYIDGGASQEEFYKFIKPILEKMDGTEELLVKLNREDLLRKQRTFDNGSIPHQIHLGELHAILRRQEDFYPFLKDNREKIEKILTFRIPYYVGPLARGNSRFAWMTRKSEETITPWNFEEVVDKGASAQSFIERMTNFDKNLPNEKVLPKHSLLYEYFTVYNELTKVKYVTEGMRKPAFLSGEQKKAIVDLLFKTNRKVTVKQLKEDYFKKIECFDSVEISGVEDRFNASLGTYHDLLKIIKDKDFLDNEENEDILEDIVLTLTLFEDREMIEERLKTYAHLFDDKVMKQLKRRRYTGWGRLSRKLINGIRDKQSGKTILDFLKSDGFANRNFMQLIHDDSLTFKEDIQKAQVSGQGDSLHEHIANLAGSPAIKKGILQTVKVVDELVKVMGRHKPENIVIEMARENQTTQKGQKNSRERMKRIEEGIKELGSQILKEHPVENTQLQNEKLYLYYLQNGRDMYVDQELDINRLSDYDVDHIVPQSFLKDDSIDNKVLTRSDKARGKSDNVPSEEVVKKMKNYWRQLLNAKLITQRKFDNLTKAERGGLSELDKAGFIKRQLVETRQITKHVAQILDSRMNTKYDENDKLIREVKVITLKSKLVSDFRKDFQFYKVREINNYHHAHDAYLNAVVGTALIKKYPKLESEFVYGDYKVYDVRKMIAKSEQEIGKATAKYFFYSNIMNFFKTEITLANGEIRKRPLIETNGETGEIVWDKGRDFATVRKVLSMPQVNIVKKTEVQTGGFSKESILPKRNSDKLIARKKDWDPKKYGGFDSPTVAYSVLVVAKVEKGKSKKLKSVKELLGITIMERSSFEKNPIDFLEAKGYKEVKKDLIIKLPKYSLFELENGRKRMLASAGELQKGNELALPSKYVNFLYLASHYEKLKGSPEDNEQKQLFVEQHKHYLDEIIEQISEFSKRVILADANLDKVLSAYNKHRDKPIREQAENIIHLFTLTNLGAPAAFKYFDTTIDRKRYTSTKEVLDATLIHQSITGLYETRIDLSQLGGDGGGGGGSGGGGSGGVLNLEEEYRLHEKPVPSSIDPSWLQLFPTVWAERAGMGLANQVPPVVVELRSGASPVAVRQYPMSKEAREGIRPHIQRFLDLGVLVPCQSPWNTPLLPVKKPGTNDYRPVQDLREINKRVQDIHPTVPNPYNLLSSLPPSHTWYSVLDLKDAFFCLKLHPNSQPLFAFEWRDPEKGNTGQLTWTRLPQGFKNSPTLFNEALHRDLAPFRALNPQVVLLQYVDDLLVAAPTYRDCKEGTQKLLQELSKLGYRVSAKKAQLCQKEVTYLGYLLKEGKRWLTPARKATVMKIPPPTTPRQVREFLGTAGFCRLWIPGFASLAAPLYPLTKPSIPFIWTEEHQKAFDRIKEALLSAPALALPDLTKPFTLYVDERAGVARGVLTQTLGPWRRPVAYLSKKLDPVASGWPTCLKAVAAVALLLKDADKLTLGQNVTVIASHSLESIVRQPPDRWMTNARMTHYQSLLLNERVSFAPPAVLNPATLLPVESEATPVHRCSEILAEETGTRRDLKDQPLPGVPAWYTDGSSFIAEGKRRAGAAIVDGKRTVWASSLPEGTSAQKAELVALTQALRLAEGKDINIYTDSRYAFATAHIHGAIYKQRGWLTSAGKDIKNKEEILALLEAIHLPKRVAIIHCPGHQKGNDPVATGNRRADEAAKQAALSTRVLAETTKPAGKRTADGSEFEKRTADGSEFESPKKKAKVE

SEQ ID NO: 809 - protein, 2094 aa, synthetic construct
MPAAKRVKLDGGDKKYSIGLDIGTNSVGWAVITDEYKVPSKKFKVLGNTDRHSIKKNLIGALLFDSGETAEATRLKRTARRRYTRRKNRICYLQEIFSNEMAKVDDSFFHRLEESFLVEEDKKHERHPIFGNIVDEVAYHEKYPTIYHLRKKLVDSTDKADLRLIYLALAHMIKFRGHFLIEGDLNPDNSDVDKLFIQLVQTYNQLFEENPINASGVDAKAILSARLSKSRRLENLIAQLPGEKKNGLFGNLIALSLGLTPNFKSNFDLAEDAKLQLSKDTYDDDLDNLLAQIGDQYADLFLAAKNLSDAILLSDILRVNTEITKAPLSASMIKRYDEHHQDLTLLKALVRQQLPEKYKEIFFDQSKNGYAGYIDGGASQEEFYKFIKPILEKMDGTEELLVKLNREDLLRKQRTFDNGSIPHQIHLGELHAILRRQEDFYPFLKDNREKIEKILTFRIPYYVGPLARGNSRFAWMTRKSEETITPWNFEEVVDKGASAQSFIERMTNFDKNLPNEKVLPKHSLLYEYFTVYNELTKVKYVTEGMRKPAFLSGEQKKAIVDLLFKTNRKVTVKQLKEDYFKKIECFDSVEISGVEDRFNASLGTYHDLLKIIKDKDFLDNEENEDILEDIVLTLTLFEDREMIEERLKTYAHLFDDKVMKQLKRRRYTGWGRLSRKLINGIRDKQSGKTILDFLKSDGFANRNFMQLIHDDSLTFKEDIQKAQVSGQGDSLHEHIANLAGSPAIKKGILQTVKVVDELVKVMGRHKPENIVIEMARENQTTQKGQKNSRERMKRIEEGIKELGSQILKEHPVENTQLQNEKLYLYYLQNGRDMYVDQELDINRLSDYDVDHIVPQSFLKDDSIDNKVLTRSDKARGKSDNVPSEEVVKKMKNYWRQLLNAKLITQRKFDNLTKAERGGLSELDKAGFIKRQLVETRQITKHVAQILDSRMNTKYDENDKLIREVKVITLKSKLVSDFRKDFQFYKVREINNYHHAHDAYLNAVVGTALIKKYPKLESEFVYGDYKVYDVRKMIAKSEQEIGKATAKYFFYSNIMNFFKTEITLANGEIRKRPLIETNGETGEIVWDKGRDFATVRKVLSMPQVNIVKKTEVQTGGFSKESILPKRNSDKLIARKKDWDPKKYGGFDSPTVAYSVLVVAKVEKGKSKKLKSVKELLGITIMERSSFEKNPIDFLEAKGYKEVKKDLIIKLPKYSLFELENGRKRMLASAGELQKGNELALPSKYVNFLYLASHYEKLKGSPEDNEQKQLFVEQHKHYLDEIIEQISEFSKRVILADANLDKVLSAYNKHRDKPIREQAENIIHLFTLTNLGAPAAFKYFDTTIDRKRYTSTKEVLDATLIHQSITGLYETRIDLSQLGGDGGGSSGGSEAAAKGGVLNLEEEYRLHEKPVPSSIDPSWLQLFPTVWAERAGMGLANQVPPVVVELRSGASPVAVRQYPMSKEAREGIRPHIQRFLDLGVLVPCQSPWNTPLLPVKKPGTNDYRPVQDLREINKRVQDIHPTVPNPYNLLSSLPPSHTWYSVLDLKDAFFCLKLHPNSQPLFAFEWRDPEKGNTGQLTWTRLPQGFKNSPTLFNEALHRDLAPFRALNPQVVLLQYVDDLLVAAPTYRDCKEGTQKLLQELSKLGYRVSAKKAQLCQKEVTYLGYLLKEGKRWLTPARKATVMKIPPPTTPRQVREFLGTAGFCRLWIPGFASLAAPLYPLTKPSIPFIWTEEHQKAFDRIKEALLSAPALALPDLTKPFTLYVDERAGVARGVLTQTLGPWRRPVAYLSKKLDPVASGWPTCLKAVAAVALLLKDADKLTLGQNVTVIASHSLESIVRQPPDRWMTNARMTHYQSLLLNERVSFAPPAVLNPATLLPVESEATPVHRCSEILAEETGTRRDLKDQPLPGVPAWYTDGSSFIAEGKRRAGAAIVDGKRTVWASSLPEGTSAQKAELVALTQALRLAEGKDINIYTDSRYAFATAHIHGAIYKQRGWLTSAGKDIKNKEEILALLEAIHLPKRVAIIHCPGHQKGNDPVATGNRRADEAAKQAALSTRVLAETTKPAGKRTADGSEFEKRTADGSEFESPKKKAKVE

SEQ ID NO: 810 - protein, 2089 aa, synthetic construct
MPAAKRVKLDGGDKKYSIGLDIGTNSVGWAVITDEYKVPSKKFKVLGNTDRHSIKKNLIGALLFDSGETAEATRLKRTARRRYTRRKNRICYLQEIFSNEMAKVDDSFFHRLEESFLVEEDKKHERHPIFGNIVDEVAYHEKYPTIYHLRKKLVDSTDKADLRLIYLALAHMIKFRGHFLIEGDLNPDNSDVDKLFIQLVQTYNQLFEENPINASGVDAKAILSARLSKSRRLENLIAQLPGEKKNGLFGNLIALSLGLTPNFKSNFDLAEDAKLQLSKDTYDDDLDNLLAQIGDQYADLFLAAKNLSDAILLSDILRVNTEITKAPLSASMIKRYDEHHQDLTLLKALVRQQLPEKYKEIFFDQSKNGYAGYIDGGASQEEFYKFIKPILEKMDGTEELLVKLNREDLLRKQRTFDNGSIPHQIHLGELHAILRRQEDFYPFLKDNREKIEKILTFRIPYYVGPLARGNSRFAWMTRKSEETITPWNFEEVVDKGASAQSFIERMTNFDKNLPNEKVLPKHSLLYEYFTVYNELTKVKYVTEGMRKPAFLSGEQKKAIVDLLFKTNRKVTVKQLKEDYFKKIECFDSVEISGVEDRFNASLGTYHDLLKIIKDKDFLDNEENEDILEDIVLTLTLFEDREMIEERLKTYAHLFDDKVMKQLKRRRYTGWGRLSRKLINGIRDKQSGKTILDFLKSDGFANRNFMQLIHDDSLTFKEDIQKAQVSGQGDSLHEHIANLAGSPAIKKGILQTVKVVDELVKVMGRHKPENIVIEMARENQTTQKGQKNSRERMKRIEEGIKELGSQILKEHPVENTQLQNEKLYLYYLQNGRDMYVDQELDINRLSDYDVDHIVPQSFLKDDSIDNKVLTRSDKARGKSDNVPSEEVVKKMKNYWRQLLNAKLITQRKFDNLTKAERGGLSELDKAGFIKRQLVETRQITKHVAQILDSRMNTKYDENDKLIREVKVITLKSKLVSDFRKDFQFYKVREINNYHHAHDAYLNAVVGTALIKKYPKLESEFVYGDYKVYDVRKMIAKSEQEIGKATAKYFFYSNIMNFFKTEITLANGEIRKRPLIETNGETGEIVWDKGRDFATVRKVLSMPQVNIVKKTEVQTGGFSKESILPKRNSDKLIARKKDWDPKKYGGFDSPTVAYSVLVVAKVEKGKSKKLKSVKELLGITIMERSSFEKNPIDFLEAKGYKEVKKDLIIKLPKYSLFELENGRKRMLASAGELQKGNELALPSKYVNFLYLASHYEKLKGSPEDNEQKQLFVEQHKHYLDEIIEQISEFSKRVILADANLDKVLSAYNKHRDKPIREQAENIIHLFTLTNLGAPAAFKYFDTTIDRKRYTSTKEVLDATLIHQSITGLYETRIDLSQLGGDGGPAPGGGGGVLNLEEEYRLHEKPVPSSIDPSWLQLFPTVWAERAGMGLANQVPPVVVELRSGASPVAVRQYPMSKEAREGIRPHIQRFLDLGVLVPCQSPWNTPLLPVKKPGTNDYRPVQDLREINKRVQDIHPTVPNPYNLLSSLPPSHTWYSVLDLKDAFFCLKLHPNSQPLFAFEWRDPEKGNTGQLTWTRLPQGFKNSPTLFNEALHRDLAPFRALNPQVVLLQYVDDLLVAAPTYRDCKEGTQKLLQELSKLGYRVSAKKAQLCQKEVTYLGYLLKEGKRWLTPARKATVMKIPPPTTPRQVREFLGTAGFCRLWIPGFASLAAPLYPLTKPSIPFIWTEEHQKAFDRIKEALLSAPALALPDLTKPFTLYVDERAGVARGVLTQTLGPWRRPVAYLSKKLDPVASGWPTCLKAVAAVALLLKDADKLTLGQNVTVIASHSLESIVRQPPDRWMTNARMTHYQSLLLNERVSFAPPAVLNPATLLPVESEATPVHRCSEILAEETGTRRDLKDQPLPGVPAWYTDGSSFIAEGKRRAGAAIVDGKRTVWASSLPEGTSAQKAELVALTQALRLAEGKDINIYTDSRYAFATAHIHGAIYKQRGWLTSAGKDIKNKEEILALLEAIHLPKRVAIIHCPGHQKGNDPVATGNRRADEAAKQAALSTRVLAETTKPAGKRTADGSEFEKRTADGSEFESPKKKAKVE

SEQ ID NO: 811 - protein, 2094 aa, synthetic construct
MPAAKRVKLDGGDKKYSIGLDIGTNSVGWAVITDEYKVPSKKFKVLGNTDRHSIKKNLIGALLFDSGETAEATRLKRTARRRYTRRKNRICYLQEIFSNEMAKVDDSFFHRLEESFLVEEDKKHERHPIFGNIVDEVAYHEKYPTIYHLRKKLVDSTDKADLRLIYLALAHMIKFRGHFLIEGDLNPDNSDVDKLFIQLVQTYNQLFEENPINASGVDAKAILSARLSKSRRLENLIAQLPGEKKNGLFGNLIALSLGLTPNFKSNFDLAEDAKLQLSKDTYDDDLDNLLAQIGDQYADLFLAAKNLSDAILLSDILRVNTEITKAPLSASMIKRYDEHHQDLTLLKALVRQQLPEKYKEIFFDQSKNGYAGYIDGGASQEEFYKFIKPILEKMDGTEELLVKLNREDLLRKQRTFDNGSIPHQIHLGELHAILRRQEDFYPFLKDNREKIEKILTFRIPYYVGPLARGNSRFAWMTRKSEETITPWNFEEVVDKGASAQSFIERMTNFDKNLPNEKVLPKHSLLYEYFTVYNELTKVKYVTEGMRKPAFLSGEQKKAIVDLLFKTNRKVTVKQLKEDYFKKIECFDSVEISGVEDRFNASLGTYHDLLKIIKDKDFLDNEENEDILEDIVLTLTLFEDREMIEERLKTYAHLFDDKVMKQLKRRRYTGWGRLSRKLINGIRDKQSGKTILDFLKSDGFANRNFMQLIHDDSLTFKEDIQKAQVSGQGDSLHEHIANLAGSPAIKKGILQTVKVVDELVKVMGRHKPENIVIEMARENQTTQKGQKNSRERMKRIEEGIKELGSQILKEHPVENTQLQNEKLYLYYLQNGRDMYVDQELDINRLSDYDVDHIVPQSFLKDDSIDNKVLTRSDKARGKSDNVPSEEVVKKMKNYWRQLLNAKLITQRKFDNLTKAERGGLSELDKAGFIKRQLVETRQITKHVAQILDSRMNTKYDENDKLIREVKVITLKSKLVSDFRKDFQFYKVREINNYHHAHDAYLNAVVGTALIKKYPKLESEFVYGDYKVYDVRKMIAKSEQEIGKATAKYFFYSNIMNFFKTEITLANGEIRKRPLIETNGETGEIVWDKGRDFATVRKVLSMPQVNIVKKTEVQTGGFSKESILPKRNSDKLIARKKDWDPKKYGGFDSPTVAYSVLVVAKVEKGKSKKLKSVKELLGITIMERSSFEKNPIDFLEAKGYKEVKKDLIIKLPKYSLFELENGRKRMLASAGELQKGNELALPSKYVNFLYLASHYEKLKGSPEDNEQKQLFVEQHKHYLDEIIEQISEFSKRVILADANLDKVLSAYNKHRDKPIREQAENIIHLFTLTNLGAPAAFKYFDTTIDRKRYTSTKEVLDATLIHQSITGLYETRIDLSQLGGDGGGGGEAAAKGSSGGVLNLEEEYRLHEKPVPSSIDPSWLQLFPTVWAERAGMGLANQVPPVVVELRSGASPVAVRQYPMSKEAREGIRPHIQRFLDLGVLVPCQSPWNTPLLPVKKPGTNDYRPVQDLREINKRVQDIHPTVPNPYNLLSSLPPSHTWYSVLDLKDAFFCLKLHPNSQPLFAFEWRDPEKGNTGQLTWTRLPQGFKNSPTLFNEALHRDLAPFRALNPQVVLLQYVDDLLVAAPTYRDCKEGTQKLLQELSKLGYRVSAKKAQLCQKEVTYLGYLLKEGKRWLTPARKATVMKIPPPTTPRQVREFLGTAGFCRLWIPGFASLAAPLYPLTKPSIPFIWTEEHQKAFDRIKEALLSAPALALPDLTKPFTLYVDERAGVARGVLTQTLGPWRRPVAYLSKKLDPVASGWPTCLKAVAAVALLLKDADKLTLGQNVTVIASHSLESIVRQPPDRWMTNARMTHYQSLLLNERVSFAPPAVLNPATLLPVESEATPVHRCSEILAEETGTRRDLKDQPLPGVPAWYTDGSSFIAEGKRRAGAAIVDGKRTVWASSLPEGTSAQKAELVALTQALRLAEGKDINIYTDSRYAFATAHIHGAIYKQRGWLTSAGKDIKNKEEILALLEAIHLPKRVAIIHCPGHQKGNDPVATGNRRADEAAKQAALSTRVLAETTKPAGKRTADGSEFEKRTADGSEFESPKKKAKVE

SEQ ID NO: 812 - protein, 2094 aa, synthetic construct
MPAAKRVKLDGGDKKYSIGLDIGTNSVGWAVITDEYKVPSKKFKVLGNTDRHSIKKNLIGALLFDSGETAEATRLKRTARRRYTRRKNRICYLQEIFSNEMAKVDDSFFHRLEESFLVEEDKKHERHPIFGNIVDEVAYHEKYPTIYHLRKKLVDSTDKADLRLIYLALAHMIKFRGHFLIEGDLNPDNSDVDKLFIQLVQTYNQLFEENPINASGVDAKAILSARLSKSRRLENLIAQLPGEKKNGLFGNLIALSLGLTPNFKSNFDLAEDAKLQLSKDTYDDDLDNLLAQIGDQYADLFLAAKNLSDAILLSDILRVNTEITKAPLSASMIKRYDEHHQDLTLLKALVRQQLPEKYKEIFFDQSKNGYAGYIDGGASQEEFYKFIKPILEKMDGTEELLVKLNREDLLRKQRTFDNGSIPHQIHLGELHAILRRQEDFYPFLKDNREKIEKILTFRIPYYVGPLARGNSRFAWMTRKSEETITPWNFEEVVDKGASAQSFIERMTNFDKNLPNEKVLPKHSLLYEYFTVYNELTKVKYVTEGMRKPAFLSGEQKKAIVDLLFKTNRKVTVKQLKEDYFKKIECFDSVEISGVEDRFNASLGTYHDLLKIIKDKDFLDNEENEDILEDIVLTLTLFEDREMIEERLKTYAHLFDDKVMKQLKRRRYTGWGRLSRKLINGIRDKQSGKTILDFLKSDGFANRNFMQLIHDDSLTFKEDIQKAQVSGQGDSLHEHIANLAGSPAIKKGILQTVKVVDELVKVMGRHKPENIVIEMARENQTTQKGQKNSRERMKRIEEGIKELGSQILKEHPVENTQLQNEKLYLYYLQNGRDMYVDQELDINRLSDYDVDHIVPQSFLKDDSIDNKVLTRSDKARGKSDNVPSEEVVKKMKNYWRQLLNAKLITQRKFDNLTKAERGGLSELDKAGFIKRQLVETRQITKHVAQILDSRMNTKYDENDKLIREVKVITLKSKLVSDFRKDFQFYKVREINNYHHAHDAYLNAVVGTALIKKYPKLESEFVYGDYKVYDVRKMIAKSEQEIGKATAKYFFYSNIMNFFKTEITLANGEIRKRPLIETNGETGEIVWDKGRDFATVRKVLSMPQVNIVKKTEVQTGGFSKESILPKRNSDKLIARKKDWDPKKYGGFDSPTVAYSVLVVAKVEKGKSKKLKSVKELLGITIMERSSFEKNPIDFLEAKGYKEVKKDLIIKLPKYSLFELENGRKRMLASAGELQKGNELALPSKYVNFLYLASHYEKLKGSPEDNEQKQLFVEQHKHYLDEIIEQISEFSKRVILADANLDKVLSAYNKHRDKPIREQAENIIHLFTLTNLGAPAAFKYFDTTIDRKRYTSTKEVLDATLIHQSITGLYETRIDLSQLGGDGGEAAAKGSSPAPGGVLNLEEEYRLHEKPVPSSIDPSWLQLFPTVWAERAGMGLANQVPPVVVELRSGASPVAVRQYPMSKEAREGIRPHIQRFLDLGVLVPCQSPWNTPLLPVKKPGTNDYRPVQDLREINKRVQDIHPTVPNPYNLLSSLPPSHTWYSVLDLKDAFFCLKLHPNSQPLFAFEWRDPEKGNTGQLTWTRLPQGFKNSPTLFNEALHRDLAPFRALNPQVVLLQYVDDLLVAAPTYRDCKEGTQKLLQELSKLGYRVSAKKAQLCQKEVTYLGYLLKEGKRWLTPARKATVMKIPPPTTPRQVREFLGTAGFCRLWIPGFASLAAPLYPLTKPSIPFIWTEEHQKAFDRIKEALLSAPALALPDLTKPFTLYVDERAGVARGVLTQTLGPWRRPVAYLSKKLDPVASGWPTCLKAVAAVALLLKDADKLTLGQNVTVIASHSLESIVRQPPDRWMTNARMTHYQSLLLNERVSFAPPAVLNPATLLPVESEATPVHRCSEILAEETGTRRDLKDQPLPGVPAWYTDGSSFIAEGKRRAGAAIVDGKRTVWASSLPEGTSAQKAELVALTQALRLAEGKDINIYTDSRYAFATAHIHGAIYKQRGWLTSAGKDIKNKEEILALLEAIHLPKRVAIIHCPGHQKGNDPVATGNRRADEAAKQAALSTRVLAETTKPAGKRTADGSEFEKRTADGSEFESPKKKAKVE

SEQ ID NO: 813 - protein, 2098 aa, synthetic construct
MPAAKRVKLDGGDKKYSIGLDIGTNSVGWAVITDEYKVPSKKFKVLGNTDRHSIKKNLIGALLFDSGETAEATRLKRTARRRYTRRKNRICYLQEIFSNEMAKVDDSFFHRLEESFLVEEDKKHERHPIFGNIVDEVAYHEKYPTIYHLRKKLVDSTDKADLRLIYLALAHMIKFRGHFLIEGDLNPDNSDVDKLFIQLVQTYNQLFEENPINASGVDAKAILSARLSKSRRLENLIAQLPGEKKNGLFGNLIALSLGLTPNFKSNFDLAEDAKLQLSKDTYDDDLDNLLAQIGDQYADLFLAAKNLSDAILLSDILRVNTEITKAPLSASMIKRYDEHHQDLTLLKALVRQQLPEKYKEIFFDQSKNGYAGYIDGGASQEEFYKFIKPILEKMDGTEELLVKLNREDLLRKQRTFDNGSIPHQIHLGELHAILRRQEDFYPFLKDNREKIEKILTFRIPYYVGPLARGNSRFAWMTRKSEETITPWNFEEVVDKGASAQSFIERMTNFDKNLPNEKVLPKHSLLYEYFTVYNELTKVKYVTEGMRKPAFLSGEQKKAIVDLLFKTNRKVTVKQLKEDYFKKIECFDSVEISGVEDRFNASLGTYHDLLKIIKDKDFLDNEENEDILEDIVLTLTLFEDREMIEERLKTYAHLFDDKVMKQLKRRRYTGWGRLSRKLINGIRDKQSGKTILDFLKSDGFANRNFMQLIHDDSLTFKEDIQKAQVSGQGDSLHEHIANLAGSPAIKKGILQTVKVVDELVKVMGRHKPENIVIEMARENQTTQKGQKNSRERMKRIEEGIKELGSQILKEHPVENTQLQNEKLYLYYLQNGRDMYVDQELDINRLSDYDVDHIVPQSFLKDDSIDNKVLTRSDKARGKSDNVPSEEVVKKMKNYWRQLLNAKLITQRKFDNLTKAERGGLSELDKAGFIKRQLVETRQITKHVAQILDSRMNTKYDENDKLIREVKVITLKSKLVSDFRKDFQFYKVREINNYHHAHDAYLNAVVGTALIKKYPKLESEFVYGDYKVYDVRKMIAKSEQEIGKATAKYFFYSNIMNFFKTEITLANGEIRKRPLIETNGETGEIVWDKGRDFATVRKVLSMPQVNIVKKTEVQTGGFSKESILPKRNSDKLIARKKDWDPKKYGGFDSPTVAYSVLVVAKVEKGKSKKLKSVKELLGITIMERSSFEKNPIDFLEAKGYKEVKKDLIIKLPKYSLFELENGRKRMLASAGELQKGNELALPSKYVNFLYLASHYEKLKGSPEDNEQKQLFVEQHKHYLDEIIEQISEFSKRVILADANLDKVLSAYNKHRDKPIREQAENIIHLFTLTNLGAPAAFKYFDTTIDRKRYTSTKEVLDATLIHQSITGLYETRIDLSQLGGDGGGSSGSSGSSGSSGSSGGVLNLEEEYRLHEKPVPSSIDPSWLQLFPTVWAERAGMGLANQVPPVVVELRSGASPVAVRQYPMSKEAREGIRPHIQRFLDLGVLVPCQSPWNTPLLPVKKPGTNDYRPVQDLREINKRVQDIHPTVPNPYNLLSSLPPSHTWYSVLDLKDAFFCLKLHPNSQPLFAFEWRDPEKGNTGQLTWTRLPQGFKNSPTLFNEALHRDLAPFRALNPQVVLLQYVDDLLVAAPTYRDCKEGTQKLLQELSKLGYRVSAKKAQLCQKEVTYLGYLLKEGKRWLTPARKATVMKIPPPTTPRQVREFLGTAGFCRLWIPGFASLAAPLYPLTKPSIPFIWTEEHQKAFDRIKEALLSAPALALPDLTKPFTLYVDERAGVARGVLTQTLGPWRRPVAYLSKKLDPVASGWPTCLKAVAAVALLLKDADKLTLGQNVTVIASHSLESIVRQPPDRWMTNARMTHYQSLLLNERVSFAPPAVLNPATLLPVESEATPVHRCSEILAEETGTRRDLKDQPLPGVPAWYTDGSSFIAEGKRRAGAAIVDGKRTVWASSLPEGTSAQKAELVALTQALRLAEGKDINIYTDSRYAFATAHIHGAIYKQRGWLTSAGKDIKNKEEILALLEAIHLPKRVAIIHCPGHQKGNDPVATGNRRADEAAKQAALSTRVLAETTKPAGKRTADGSEFEKRTADGSEFESPKKKAKVE

SEQ ID NO: 814 - protein, 2094 aa, synthetic construct
MPAAKRVKLDGGDKKYSIGLDIGTNSVGWAVITDEYKVPSKKFKVLGNTDRHSIKKNLIGALLFDSGETAEATRLKRTARRRYTRRKNRICYLQEIFSNEMAKVDDSFFHRLEESFLVEEDKKHERHPIFGNIVDEVAYHEKYPTIYHLRKKLVDSTDKADLRLIYLALAHMIKFRGHFLIEGDLNPDNSDVDKLFIQLVQTYNQLFEENPINASGVDAKAILSARLSKSRRLENLIAQLPGEKKNGLFGNLIALSLGLTPNFKSNFDLAEDAKLQLSKDTYDDDLDNLLAQIGDQYADLFLAAKNLSDAILLSDILRVNTEITKAPLSASMIKRYDEHHQDLTLLKALVRQQLPEKYKEIFFDQSKNGYAGYIDGGASQEEFYKFIKPILEKMDGTEELLVKLNREDLLRKQRTFDNGSIPHQIHLGELHAILRRQEDFYPFLKDNREKIEKILTFRIPYYVGPLARGNSRFAWMTRKSEETITPWNFEEVVDKGASAQSFIERMTNFDKNLPNEKVLPKHSLLYEYFTVYNELTKVKYVTEGMRKPAFLSGEQKKAIVDLLFKTNRKVTVKQLKEDYFKKIECFDSVEISGVEDRFNASLGTYHDLLKIIKDKDFLDNEENEDILEDIVLTLTLFEDREMIEERLKTYAHLFDDKVMKQLKRRRYTGWGRLSRKLINGIRDKQSGKTILDFLKSDGFANRNFMQLIHDDSLTFKEDIQKAQVSGQGDSLHEHIANLAGSPAIKKGILQTVKVVDELVKVMGRHKPENIVIEMARENQTTQKGQKNSRERMKRIEEGIKELGSQILKEHPVENTQLQNEKLYLYYLQNGRDMYVDQELDINRLSDYDVDHIVPQSFLKDDSIDNKVLTRSDKARGKSDNVPSEEVVKKMKNYWRQLLNAKLITQRKFDNLTKAERGGLSELDKAGFIKRQLVETRQITKHVAQILDSRMNTKYDENDKLIREVKVITLKSKLVSDFRKDFQFYKVREINNYHHAHDAYLNAVVGTALIKKYPKLESEFVYGDYKVYDVRKMIAKSEQEIGKATAKYFFYSNIMNFFKTEITLANGEIRKRPLIETNGETGEIVWDKGRDFATVRKVLSMPQVNIVKKTEVQTGGFSKESILPKRNSDKLIARKKDWDPKKYGGFDSPTVAYSVLVVAKVEKGKSKKLKSVKELLGITIMERSSFEKNPIDFLEAKGYKEVKKDLIIKLPKYSLFELENGRKRMLASAGELQKGNELALPSKYVNFLYLASHYEKLKGSPEDNEQKQLFVEQHKHYLDEIIEQISEFSKRVILADANLDKVLSAYNKHRDKPIREQAENIIHLFTLTNLGAPAAFKYFDTTIDRKRYTSTKEVLDATLIHQSITGLYETRIDLSQLGGDGGPAPAPAPAPAPGGVLNLEEEYRLHEKPVPSSIDPSWLQLFPTVWAERAGMGLANQVPPVVVELRSGASPVAVRQYPMSKEAREGIRPHIQRFLDLGVLVPCQSPWNTPLLPVKKPGTNDYRPVQDLREINKRVQDIHPTVPNPYNLLSSLPPSHTWYSVLDLKDAFFCLKLHPNSQPLFAFEWRDPEKGNTGQLTWTRLPQGFKNSPTLFNEALHRDLAPFRALNPQVVLLQYVDDLLVAAPTYRDCKEGTQKLLQELSKLGYRVSAKKAQLCQKEVTYLGYLLKEGKRWLTPARKATVMKIPPPTTPRQVREFLGTAGFCRLWIPGFASLAAPLYPLTKPSIPFIWTEEHQKAFDRIKEALLSAPALALPDLTKPFTLYVDERAGVARGVLTQTLGPWRRPVAYLSKKLDPVASGWPTCLKAVAAVALLLKDADKLTLGQNVTVIASHSLESIVRQPPDRWMTNARMTHYQSLLLNERVSFAPPAVLNPATLLPVESEATPVHRCSEILAEETGTRRDLKDQPLPGVPAWYTDGSSFIAEGKRRAGAAIVDGKRTVWASSLPEGTSAQKAELVALTQALRLAEGKDINIYTDSRYAFATAHIHGAIYKQRGWLTSAGKDIKNKEEILALLEAIHLPKRVAIIHCPGHQKGNDPVATGNRRADEAAKQAALSTRVLAETTKPAGKRTADGSEFEKRTADGSEFESPKKKAKVE

SEQ ID NO: 815 - protein, 2086 aa, synthetic construct
MPAAKRVKLDGGDKKYSIGLDIGTNSVGWAVITDEYKVPSKKFKVLGNTDRHSIKKNLIGALLFDSGETAEATRLKRTARRRYTRRKNRICYLQEIFSNEMAKVDDSFFHRLEESFLVEEDKKHERHPIFGNIVDEVAYHEKYPTIYHLRKKLVDSTDKADLRLIYLALAHMIKFRGHFLIEGDLNPDNSDVDKLFIQLVQTYNQLFEENPINASGVDAKAILSARLSKSRRLENLIAQLPGEKKNGLFGNLIALSLGLTPNFKSNFDLAEDAKLQLSKDTYDDDLDNLLAQIGDQYADLFLAAKNLSDAILLSDILRVNTEITKAPLSASMIKRYDEHHQDLTLLKALVRQQLPEKYKEIFFDQSKNGYAGYIDGGASQEEFYKFIKPILEKMDGTEELLVKLNREDLLRKQRTFDNGSIPHQIHLGELHAILRRQEDFYPFLKDNREKIEKILTFRIPYYVGPLARGNSRFAWMTRKSEETITPWNFEEVVDKGASAQSFIERMTNFDKNLPNEKVLPKHSLLYEYFTVYNELTKVKYVTEGMRKPAFLSGEQKKAIVDLLFKTNRKVTVKQLKEDYFKKIECFDSVEISGVEDRFNASLGTYHDLLKIIKDKDFLDNEENEDILEDIVLTLTLFEDREMIEERLKTYAHLFDDKVMKQLKRRRYTGWGRLSRKLINGIRDKQSGKTILDFLKSDGFANRNFMQLIHDDSLTFKEDIQKAQVSGQGDSLHEHIANLAGSPAIKKGILQTVKVVDELVKVMGRHKPENIVIEMARENQTTQKGQKNSRERMKRIEEGIKELGSQILKEHPVENTQLQNEKLYLYYLQNGRDMYVDQELDINRLSDYDVDHIVPQSFLKDDSIDNKVLTRSDKARGKSDNVPSEEVVKKMKNYWRQLLNAKLITQRKFDNLTKAERGGLSELDKAGFIKRQLVETRQITKHVAQILDSRMNTKYDENDKLIREVKVITLKSKLVSDFRKDFQFYKVREINNYHHAHDAYLNAVVGTALIKKYPKLESEFVYGDYKVYDVRKMIAKSEQEIGKATAKYFFYSNIMNFFKTEITLANGEIRKRPLIETNGETGEIVWDKGRDFATVRKVLSMPQVNIVKKTEVQTGGFSKESILPKRNSDKLIARKKDWDPKKYGGFDSPTVAYSVLVVAKVEKGKSKKLKSVKELLGITIMERSSFEKNPIDFLEAKGYKEVKKDLIIKLPKYSLFELENGRKRMLASAGELQKGNELALPSKYVNFLYLASHYEKLKGSPEDNEQKQLFVEQHKHYLDEIIEQISEFSKRVILADANLDKVLSAYNKHRDKPIREQAENIIHLFTLTNLGAPAAFKYFDTTIDRKRYTSTKEVLDATLIHQSITGLYETRIDLSQLGGDGGGGGGGVLNLEEEYRLHEKPVPSSIDPSWLQLFPTVWAERAGMGLANQVPPVVVELRSGASPVAVRQYPMSKEAREGIRPHIQRFLDLGVLVPCQSPWNTPLLPVKKPGTNDYRPVQDLREINKRVQDIHPTVPNPYNLLSSLPPSHTWYSVLDLKDAFFCLKLHPNSQPLFAFEWRDPEKGNTGQLTWTRLPQGFKNSPTLFNEALHRDLAPFRALNPQVVLLQYVDDLLVAAPTYRDCKEGTQKLLQELSKLGYRVSAKKAQLCQKEVTYLGYLLKEGKRWLTPARKATVMKIPPPTTPRQVREFLGTAGFCRLWIPGFASLAAPLYPLTKPSIPFIWTEEHQKAFDRIKEALLSAPALALPDLTKPFTLYVDERAGVARGVLTQTLGPWRRPVAYLSKKLDPVASGWPTCLKAVAAVALLLKDADKLTLGQNVTVIASHSLESIVRQPPDRWMTNARMTHYQSLLLNERVSFAPPAVLNPATLLPVESEATPVHRCSEILAEETGTRRDLKDQPLPGVPAWYTDGSSFIAEGKRRAGAAIVDGKRTVWASSLPEGTSAQKAELVALTQALRLAEGKDINIYTDSRYAFATAHIHGAIYKQRGWLTSAGKDIKNKEEILALLEAIHLPKRVAIIHCPGHQKGNDPVATGNRRADEAAKQAALSTRVLAETTKPAGKRTADGSEFEKRTADGSEFESPKKKAKVE

SEQ ID NO: 816 - protein, 2087 aa, synthetic construct
MPAAKRVKLDGGDKKYSIGLDIGTNSVGWAVITDEYKVPSKKFKVLGNTDRHSIKKNLIGALLFDSGETAEATRLKRTARRRYTRRKNRICYLQEIFSNEMAKVDDSFFHRLEESFLVEEDKKHERHPIFGNIVDEVAYHEKYPTIYHLRKKLVDSTDKADLRLIYLALAHMIKFRGHFLIEGDLNPDNSDVDKLFIQLVQTYNQLFEENPINASGVDAKAILSARLSKSRRLENLIAQLPGEKKNGLFGNLIALSLGLTPNFKSNFDLAEDAKLQLSKDTYDDDLDNLLAQIGDQYADLFLAAKNLSDAILLSDILRVNTEITKAPLSASMIKRYDEHHQDLTLLKALVRQQLPEKYKEIFFDQSKNGYAGYIDGGASQEEFYKFIKPILEKMDGTEELLVKLNREDLLRKQRTFDNGSIPHQIHLGELHAILRRQEDFYPFLKDNREKIEKILTFRIPYYVGPLARGNSRFAWMTRKSEETITPWNFEEVVDKGASAQSFIERMTNFDKNLPNEKVLPKHSLLYEYFTVYNELTKVKYVTEGMRKPAFLSGEQKKAIVDLLFKTNRKVTVKQLKEDYFKKIECFDSVEISGVEDRFNASLGTYHDLLKIIKDKDFLDNEENEDILEDIVLTLTLFEDREMIEERLKTYAHLFDDKVMKQLKRRRYTGWGRLSRKLINGIRDKQSGKTILDFLKSDGFANRNFMQLIHDDSLTFKEDIQKAQVSGQGDSLHEHIANLAGSPAIKKGILQTVKVVDELVKVMGRHKPENIVIEMARENQTTQKGQKNSRERMKRIEEGIKELGSQILKEHPVENTQLQNEKLYLYYLQNGRDMYVDQELDINRLSDYDVDHIVPQSFLKDDSIDNKVLTRSDKARGKSDNVPSEEVVKKMKNYWRQLLNAKLITQRKFDNLTKAERGGLSELDKAGFIKRQLVETRQITKHVAQILDSRMNTKYDENDKLIREVKVITLKSKLVSDFRKDFQFYKVREINNYHHAHDAYLNAVVGTALIKKYPKLESEFVYGDYKVYDVRKMIAKSEQEIGKATAKYFFYSNIMNFFKTEITLANGEIRKRPLIETNGETGEIVWDKGRDFATVRKVLSMPQVNIVKKTEVQTGGFSKESILPKRNSDKLIARKKDWDPKKYGGFDSPTVAYSVLVVAKVEKGKSKKLKSVKELLGITIMERSSFEKNPIDFLEAKGYKEVKKDLIIKLPKYSLFELENGRKRMLASAGELQKGNELALPSKYVNFLYLASHYEKLKGSPEDNEQKQLFVEQHKHYLDEIIEQISEFSKRVILADANLDKVLSAYNKHRDKPIREQAENIIHLFTLTNLGAPAAFKYFDTTIDRKRYTSTKEVLDATLIHQSITGLYETRIDLSQLGGDGGGGGGGGVLNLEEEYRLHEKPVPSSIDPSWLQLFPTVWAERAGMGLANQVPPVVVELRSGASPVAVRQYPMSKEAREGIRPHIQRFLDLGVLVPCQSPWNTPLLPVKKPGTNDYRPVQDLREINKRVQDIHPTVPNPYNLLSSLPPSHTWYSVLDLKDAFFCLKLHPNSQPLFAFEWRDPEKGNTGQLTWTRLPQGFKNSPTLFNEALHRDLAPFRALNPQVVLLQYVDDLLVAAPTYRDCKEGTQKLLQELSKLGYRVSAKKAQLCQKEVTYLGYLLKEGKRWLTPARKATVMKIPPPTTPRQVREFLGTAGFCRLWIPGFASLAAPLYPLTKPSIPFIWTEEHQKAFDRIKEALLSAPALALPDLTKPFTLYVDERAGVARGVLTQTLGPWRRPVAYLSKKLDPVASGWPTCLKAVAAVALLLKDADKLTLGQNVTVIASHSLESIVRQPPDRWMTNARMTHYQSLLLNERVSFAPPAVLNPATLLPVESEATPVHRCSEILAEETGTRRDLKDQPLPGVPAWYTDGSSFIAEGKRRAGAAIVDGKRTVWASSLPEGTSAQKAELVALTQALRLAEGKDINIYTDSRYAFATAHIHGAIYKQRGWLTSAGKDIKNKEEILALLEAIHLPKRVAIIHCPGHQKGNDPVATGNRRADEAAKQAALSTRVLAETTKPAGKRTADGSEFEKRTADGSEFESPKKKAKVE

SEQ ID NO: 817 - protein, 2091 aa, synthetic construct
MPAAKRVKLDGGDKKYSIGLDIGTNSVGWAVITDEYKVPSKKFKVLGNTDRHSIKKNLIGALLFDSGETAEATRLKRTARRRYTRRKNRICYLQEIFSNEMAKVDDSFFHRLEESFLVEEDKKHERHPIFGNIVDEVAYHEKYPTIYHLRKKLVDSTDKADLRLIYLALAHMIKFRGHFLIEGDLNPDNSDVDKLFIQLVQTYNQLFEENPINASGVDAKAILSARLSKSRRLENLIAQLPGEKKNGLFGNLIALSLGLTPNFKSNFDLAEDAKLQLSKDTYDDDLDNLLAQIGDQYADLFLAAKNLSDAILLSDILRVNTEITKAPLSASMIKRYDEHHQDLTLLKALVRQQLPEKYKEIFFDQSKNGYAGYIDGGASQEEFYKFIKPILEKMDGTEELLVKLNREDLLRKQRTFDNGSIPHQIHLGELHAILRRQEDFYPFLKDNREKIEKILTFRIPYYVGPLARGNSRFAWMTRKSEETITPWNFEEVVDKGASAQSFIERMTNFDKNLPNEKVLPKHSLLYEYFTVYNELTKVKYVTEGMRKPAFLSGEQKKAIVDLLFKTNRKVTVKQLKEDYFKKIECFDSVEISGVEDRFNASLGTYHDLLKIIKDKDFLDNEENEDILEDIVLTLTLFEDREMIEERLKTYAHLFDDKVMKQLKRRRYTGWGRLSRKLINGIRDKQSGKTILDFLKSDGFANRNFMQLIHDDSLTFKEDIQKAQVSGQGDSLHEHIANLAGSPAIKKGILQTVKVVDELVKVMGRHKPENIVIEMARENQTTQKGQKNSRERMKRIEEGIKELGSQILKEHPVENTQLQNEKLYLYYLQNGRDMYVDQELDINRLSDYDVDHIVPQSFLKDDSIDNKVLTRSDKARGKSDNVPSEEVVKKMKNYWRQLLNAKLITQRKFDNLTKAERGGLSELDKAGFIKRQLVETRQITKHVAQILDSRMNTKYDENDKLIREVKVITLKSKLVSDFRKDFQFYKVREINNYHHAHDAYLNAVVGTALIKKYPKLESEFVYGDYKVYDVRKMIAKSEQEIGKATAKYFFYSNIMNFFKTEITLANGEIRKRPLIETNGETGEIVWDKGRDFATVRKVLSMPQVNIVKKTEVQTGGFSKESILPKRNSDKLIARKKDWDPKKYGGFDSPTVAYSVLVVAKVEKGKSKKLKSVKELLGITIMERSSFEKNPIDFLEAKGYKEVKKDLIIKLPKYSLFELENGRKRMLASAGELQKGNELALPSKYVNFLYLASHYEKLKGSPEDNEQKQLFVEQHKHYLDEIIEQISEFSKRVILADANLDKVLSAYNKHRDKPIREQAENIIHLFTLTNLGAPAAFKYFDTTIDRKRYTSTKEVLDATLIHQSITGLYETRIDLSQLGGDGGEAAAKGGGGGVLNLEEEYRLHEKPVPSSIDPSWLQLFPTVWAERAGMGLANQVPPVVVELRSGASPVAVRQYPMSKEAREGIRPHIQRFLDLGVLVPCQSPWNTPLLPVKKPGTNDYRPVQDLREINKRVQDIHPTVPNPYNLLSSLPPSHTWYSVLDLKDAFFCLKLHPNSQPLFAFEWRDPEKGNTGQLTWTRLPQGFKNSPTLFNEALHRDLAPFRALNPQVVLLQYVDDLLVAAPTYRDCKEGTQKLLQELSKLGYRVSAKKAQLCQKEVTYLGYLLKEGKRWLTPARKATVMKIPPPTTPRQVREFLGTAGFCRLWIPGFASLAAPLYPLTKPSIPFIWTEEHQKAFDRIKEALLSAPALALPDLTKPFTLYVDERAGVARGVLTQTLGPWRRPVAYLSKKLDPVASGWPTCLKAVAAVALLLKDADKLTLGQNVTVIASHSLESIVRQPPDRWMTNARMTHYQSLLLNERVSFAPPAVLNPATLLPVESEATPVHRCSEILAEETGTRRDLKDQPLPGVPAWYTDGSSFIAEGKRRAGAAIVDGKRTVWASSLPEGTSAQKAELVALTQALRLAEGKDINIYTDSRYAFATAHIHGAIYKQRGWLTSAGKDIKNKEEILALLEAIHLPKRVAIIHCPGHQKGNDPVATGNRRADEAAKQAALSTRVLAETTKPAGKRTADGSEFEKRTADGSEFESPKKKAKVE

SEQ ID NO: 818 - protein, 2101 aa, synthetic construct
MPAAKRVKLDGGDKKYSIGLDIGTNSVGWAVITDEYKVPSKKFKVLGNTDRHSIKKNLIGALLFDSGETAEATRLKRTARRRYTRRKNRICYLQEIFSNEMAKVDDSFFHRLEESFLVEEDKKHERHPIFGNIVDEVAYHEKYPTIYHLRKKLVDSTDKADLRLIYLALAHMIKFRGHFLIEGDLNPDNSDVDKLFIQLVQTYNQLFEENPINASGVDAKAILSARLSKSRRLENLIAQLPGEKKNGLFGNLIALSLGLTPNFKSNFDLAEDAKLQLSKDTYDDDLDNLLAQIGDQYADLFLAAKNLSDAILLSDILRVNTEITKAPLSASMIKRYDEHHQDLTLLKALVRQQLPEKYKEIFFDQSKNGYAGYIDGGASQEEFYKFIKPILEKMDGTEELLVKLNREDLLRKQRTFDNGSIPHQIHLGELHAILRRQEDFYPFLKDNREKIEKILTFRIPYYVGPLARGNSRFAWMTRKSEETITPWNFEEVVDKGASAQSFIERMTNFDKNLPNEKVLPKHSLLYEYFTVYNELTKVKYVTEGMRKPAFLSGEQKKAIVDLLFKTNRKVTVKQLKEDYFKKIECFDSVEISGVEDRFNASLGTYHDLLKIIKDKDFLDNEENEDILEDIVLTLTLFEDREMIEERLKTYAHLFDDKVMKQLKRRRYTGWGRLSRKLINGIRDKQSGKTILDFLKSDGFANRNFMQLIHDDSLTFKEDIQKAQVSGQGDSLHEHIANLAGSPAIKKGILQTVKVVDELVKVMGRHKPENIVIEMARENQTTQKGQKNSRERMKRIEEGIKELGSQILKEHPVENTQLQNEKLYLYYLQNGRDMYVDQELDINRLSDYDVDHIVPQSFLKDDSIDNKVLTRSDKARGKSDNVPSEEVVKKMKNYWRQLLNAKLITQRKFDNLTKAERGGLSELDKAGFIKRQLVETRQITKHVAQILDSRMNTKYDENDKLIREVKVITLKSKLVSDFRKDFQFYKVREINNYHHAHDAYLNAVVGTALIKKYPKLESEFVYGDYKVYDVRKMIAKSEQEIGKATAKYFFYSNIMNFFKTEITLANGEIRKRPLIETNGETGEIVWDKGRDFATVRKVLSMPQVNIVKKTEVQTGGFSKESILPKRNSDKLIARKKDWDPKKYGGFDSPTVAYSVLVVAKVEKGKSKKLKSVKELLGITIMERSSFEKNPIDFLEAKGYKEVKKDLIIKLPKYSLFELENGRKRMLASAGELQKGNELALPSKYVNFLYLASHYEKLKGSPEDNEQKQLFVEQHKHYLDEIIEQISEFSKRVILADANLDKVLSAYNKHRDKPIREQAENIIHLFTLTNLGAPAAFKYFDTTIDRKRYTSTKEVLDATLIHQSITGLYETRIDLSQLGGDGGGSSGSSGSSGSSGSSGSSGGVLNLEEEYRLHEKPVPSSIDPSWLQLFPTVWAERAGMGLANQVPPVVVELRSGASPVAVRQYPMSKEAREGIRPHIQRFLDLGVLVPCQSPWNTPLLPVKKPGTNDYRPVQDLREINKRVQDIHPTVPNPYNLLSSLPPSHTWYSVLDLKDAFFCLKLHPNSQPLFAFEWRDPEKGNTGQLTWTRLPQGFKNSPTLFNEALHRDLAPFRALNPQVVLLQYVDDLLVAAPTYRDCKEGTQKLLQELSKLGYRVSAKKAQLCQKEVTYLGYLLKEGKRWLTPARKATVMKIPPPTTPRQVREFLGTAGFCRLWIPGFASLAAPLYPLTKPSIPFIWTEEHQKAFDRIKEALLSAPALALPDLTKPFTLYVDERAGVARGVLTQTLGPWRRPVAYLSKKLDPVASGWPTCLKAVAAVALLLKDADKLTLGQNVTVIASHSLESIVRQPPDRWMTNARMTHYQSLLLNERVSFAPPAVLNPATLLPVESEATPVHRCSEILAEETGTRRDLKDQPLPGVPAWYTDGSSFIAEGKRRAGAAIVDGKRTVWASSLPEGTSAQKAELVALTQALRLAEGKDINIYTDSRYAFATAHIHGAIYKQRGWLTSAGKDIKNKEEILALLEAIHLPKRVAIIHCPGHQKGNDPVATGNRRADEAAKQAALSTRVLAETTKPAGKRTADGSEFEKRTADGSEFESPKKKAKVE

SEQ ID NO: 819 - protein, 2091 aa, synthetic construct
MPAAKRVKLDGGDKKYSIGLDIGTNSVGWAVITDEYKVPSKKFKVLGNTDRHSIKKNLIGALLFDSGETAEATRLKRTARRRYTRRKNRICYLQEIFSNEMAKVDDSFFHRLEESFLVEEDKKHERHPIFGNIVDEVAYHEKYPTIYHLRKKLVDSTDKADLRLIYLALAHMIKFRGHFLIEGDLNPDNSDVDKLFIQLVQTYNQLFEENPINASGVDAKAILSARLSKSRRLENLIAQLPGEKKNGLFGNLIALSLGLTPNFKSNFDLAEDAKLQLSKDTYDDDLDNLLAQIGDQYADLFLAAKNLSDAILLSDILRVNTEITKAPLSASMIKRYDEHHQDLTLLKALVRQQLPEKYKEIFFDQSKNGYAGYIDGGASQEEFYKFIKPILEKMDGTEELLVKLNREDLLRKQRTFDNGSIPHQIHLGELHAILRRQEDFYPFLKDNREKIEKILTFRIPYYVGPLARGNSRFAWMTRKSEETITPWNFEEVVDKGASAQSFIERMTNFDKNLPNEKVLPKHSLLYEYFTVYNELTKVKYVTEGMRKPAFLSGEQKKAIVDLLFKTNRKVTVKQLKEDYFKKIECFDSVEISGVEDRFNASLGTYHDLLKIIKDKDFLDNEENEDILEDIVLTLTLFEDREMIEERLKTYAHLFDDKVMKQLKRRRYTGWGRLSRKLINGIRDKQSGKTILDFLKSDGFANRNFMQLIHDDSLTFKEDIQKAQVSGQGDSLHEHIANLAGSPAIKKGILQTVKVVDELVKVMGRHKPENIVIEMARENQTTQKGQKNSRERMKRIEEGIKELGSQILKEHPVENTQLQNEKLYLYYLQNGRDMYVDQELDINRLSDYDVDHIVPQSFLKDDSIDNKVLTRSDKARGKSDNVPSEEVVKKMKNYWRQLLNAKLITQRKFDNLTKAERGGLSELDKAGFIKRQLVETRQITKHVAQILDSRMNTKYDENDKLIREVKVITLKSKLVSDFRKDFQFYKVREINNYHHAHDAYLNAVVGTALIKKYPKLESEFVYGDYKVYDVRKMIAKSEQEIGKATAKYFFYSNIMNFFKTEITLANGEIRKRPLIETNGETGEIVWDKGRDFATVRKVLSMPQVNIVKKTEVQTGGFSKESILPKRNSDKLIARKKDWDPKKYGGFDSPTVAYSVLVVAKVEKGKSKKLKSVKELLGITIMERSSFEKNPIDFLEAKGYKEVKKDLIIKLPKYSLFELENGRKRMLASAGELQKGNELALPSKYVNFLYLASHYEKLKGSPEDNEQKQLFVEQHKHYLDEIIEQISEFSKRVILADANLDKVLSAYNKHRDKPIREQAENIIHLFTLTNLGAPAAFKYFDTTIDRKRYTSTKEVLDATLIHQSITGLYETRIDLSQLGGDGGPAPEAAAKGGVLNLEEEYRLHEKPVPSSIDPSWLQLFPTVWAERAGMGLANQVPPVVVELRSGASPVAVRQYPMSKEAREGIRPHIQRFLDLGVLVPCQSPWNTPLLPVKKPGTNDYRPVQDLREINKRVQDIHPTVPNPYNLLSSLPPSHTWYSVLDLKDAFFCLKLHPNSQPLFAFEWRDPEKGNTGQLTWTRLPQGFKNSPTLFNEALHRDLAPFRALNPQVVLLQYVDDLLVAAPTYRDCKEGTQKLLQELSKLGYRVSAKKAQLCQKEVTYLGYLLKEGKRWLTPARKATVMKIPPPTTPRQVREFLGTAGFCRLWIPGFASLAAPLYPLTKPSIPFIWTEEHQKAFDRIKEALLSAPALALPDLTKPFTLYVDERAGVARGVLTQTLGPWRRPVAYLSKKLDPVASGWPTCLKAVAAVALLLKDADKLTLGQNVTVIASHSLESIVRQPPDRWMTNARMTHYQSLLLNERVSFAPPAVLNPATLLPVESEATPVHRCSEILAEETGTRRDLKDQPLPGVPAWYTDGSSFIAEGKRRAGAAIVDGKRTVWASSLPEGTSAQKAELVALTQALRLAEGKDINIYTDSRYAFATAHIHGAIYKQRGWLTSAGKDIKNKEEILALLEAIHLPKRVAIIHCPGHQKGNDPVATGNRRADEAAKQAALSTRVLAETTKPAGKRTADGSEFEKRTADGSEFESPKKKAKVE

SEQ ID NO: 820 - protein, 2094 aa, synthetic construct
MPAAKRVKLDGGDKKYSIGLDIGTNSVGWAVITDEYKVPSKKFKVLGNTDRHSIKKNLIGALLFDSGETAEATRLKRTARRRYTRRKNRICYLQEIFSNEMAKVDDSFFHRLEESFLVEEDKKHERHPIFGNIVDEVAYHEKYPTIYHLRKKLVDSTDKADLRLIYLALAHMIKFRGHFLIEGDLNPDNSDVDKLFIQLVQTYNQLFEENPINASGVDAKAILSARLSKSRRLENLIAQLPGEKKNGLFGNLIALSLGLTPNFKSNFDLAEDAKLQLSKDTYDDDLDNLLAQIGDQYADLFLAAKNLSDAILLSDILRVNTEITKAPLSASMIKRYDEHHQDLTLLKALVRQQLPEKYKEIFFDQSKNGYAGYIDGGASQEEFYKFIKPILEKMDGTEELLVKLNREDLLRKQRTFDNGSIPHQIHLGELHAILRRQEDFYPFLKDNREKIEKILTFRIPYYVGPLARGNSRFAWMTRKSEETITPWNFEEVVDKGASAQSFIERMTNFDKNLPNEKVLPKHSLLYEYFTVYNELTKVKYVTEGMRKPAFLSGEQKKAIVDLLFKTNRKVTVKQLKEDYFKKIECFDSVEISGVEDRFNASLGTYHDLLKIIKDKDFLDNEENEDILEDIVLTLTLFEDREMIEERLKTYAHLFDDKVMKQLKRRRYTGWGRLSRKLINGIRDKQSGKTILDFLKSDGFANRNFMQLIHDDSLTFKEDIQKAQVSGQGDSLHEHIANLAGSPAIKKGILQTVKVVDELVKVMGRHKPENIVIEMARENQTTQKGQKNSRERMKRIEEGIKELGSQILKEHPVENTQLQNEKLYLYYLQNGRDMYVDQELDINRLSDYDVDHIVPQSFLKDDSIDNKVLTRSDKARGKSDNVPSEEVVKKMKNYWRQLLNAKLITQRKFDNLTKAERGGLSELDKAGFIKRQLVETRQITKHVAQILDSRMNTKYDENDKLIREVKVITLKSKLVSDFRKDFQFYKVREINNYHHAHDAYLNAVVGTALIKKYPKLESEFVYGDYKVYDVRKMIAKSEQEIGKATAKYFFYSNIMNFFKTEITLANGEIRKRPLIETNGETGEIVWDKGRDFATVRKVLSMPQVNIVKKTEVQTGGFSKESILPKRNSDKLIARKKDWDPKKYGGFDSPTVAYSVLVVAKVEKGKSKKLKSVKELLGITIMERSSFEKNPIDFLEAKGYKEVKKDLIIKLPKYSLFELENGRKRMLASAGELQKGNELALPSKYVNFLYLASHYEKLKGSPEDNEQKQLFVEQHKHYLDEIIEQISEFSKRVILADANLDKVLSAYNKHRDKPIREQAENIIHLFTLTNLGAPAAFKYFDTTIDRKRYTSTKEVLDATLIHQSITGLYETRIDLSQLGGDGGEAAAKGGSGSSGGVLNLEEEYRLHEKPVPSSIDPSWLQLFPTVWAERAGMGLANQVPPVVVELRSGASPVAVRQYPMSKEAREGIRPHIQRFLDLGVLVPCQSPWNTPLLPVKKPGTNDYRPVQDLREINKRVQDIHPTVPNPYNLLSSLPPSHTWYSVLDLKDAFFCLKLHPNSQPLFAFEWRDPEKGNTGQLTWTRLPQGFKNSPTLFNEALHRDLAPFRALNPQVVLLQYVDDLLVAAPTYRDCKEGTQKLLQELSKLGYRVSAKKAQLCQKEVTYLGYLLKEGKRWLTPARKATVMKIPPPTTPRQVREFLGTAGFCRLWIPGFASLAAPLYPLTKPSIPFIWTEEHQKAFDRIKEALLSAPALALPDLTKPFTLYVDERAGVARGVLTQTLGPWRRPVAYLSKKLDPVASGWPTCLKAVAAVALLLKDADKLTLGQNVTVIASHSLESIVRQPPDRWMTNARMTHYQSLLLNERVSFAPPAVLNPATLLPVESEATPVHRCSEILAEETGTRRDLKDQPLPGVPAWYTDGSSFIAEGKRRAGAAIVDGKRTVWASSLPEGTSAQKAELVALTQALRLAEGKDINIYTDSRYAFATAHIHGAIYKQRGWLTSAGKDIKNKEEILALLEAIHLPKRVAIIHCPGHQKGNDPVATGNRRADEAAKQAALSTRVLAETTKPAGKRTADGSEFEKRTADGSEFESPKKKAKVE

SEQ ID NO: 821 - protein, 2092 aa, synthetic construct
MPAAKRVKLDGGDKKYSIGLDIGTNSVGWAVITDEYKVPSKKFKVLGNTDRHSIKKNLIGALLFDSGETAEATRLKRTARRRYTRRKNRICYLQEIFSNEMAKVDDSFFHRLEESFLVEEDKKHERHPIFGNIVDEVAYHEKYPTIYHLRKKLVDSTDKADLRLIYLALAHMIKFRGHFLIEGDLNPDNSDVDKLFIQLVQTYNQLFEENPINASGVDAKAILSARLSKSRRLENLIAQLPGEKKNGLFGNLIALSLGLTPNFKSNFDLAEDAKLQLSKDTYDDDLDNLLAQIGDQYADLFLAAKNLSDAILLSDILRVNTEITKAPLSASMIKRYDEHHQDLTLLKALVRQQLPEKYKEIFFDQSKNGYAGYIDGGASQEEFYKFIKPILEKMDGTEELLVKLNREDLLRKQRTFDNGSIPHQIHLGELHAILRRQEDFYPFLKDNREKIEKILTFRIPYYVGPLARGNSRFAWMTRKSEETITPWNFEEVVDKGASAQSFIERMTNFDKNLPNEKVLPKHSLLYEYFTVYNELTKVKYVTEGMRKPAFLSGEQKKAIVDLLFKTNRKVTVKQLKEDYFKKIECFDSVEISGVEDRFNASLGTYHDLLKIIKDKDFLDNEENEDILEDIVLTLTLFEDREMIEERLKTYAHLFDDKVMKQLKRRRYTGWGRLSRKLINGIRDKQSGKTILDFLKSDGFANRNFMQLIHDDSLTFKEDIQKAQVSGQGDSLHEHIANLAGSPAIKKGILQTVKVVDELVKVMGRHKPENIVIEMARENQTTQKGQKNSRERMKRIEEGIKELGSQILKEHPVENTQLQNEKLYLYYLQNGRDMYVDQELDINRLSDYDVDHIVPQSFLKDDSIDNKVLTRSDKARGKSDNVPSEEVVKKMKNYWRQLLNAKLITQRKFDNLTKAERGGLSELDKAGFIKRQLVETRQITKHVAQILDSRMNTKYDENDKLIREVKVITLKSKLVSDFRKDFQFYKVREINNYHHAHDAYLNAVVGTALIKKYPKLESEFVYGDYKVYDVRKMIAKSEQEIGKATAKYFFYSNIMNFFKTEITLANGEIRKRPLIETNGETGEIVWDKGRDFATVRKVLSMPQVNIVKKTEVQTGGFSKESILPKRNSDKLIARKKDWDPKKYGGFDSPTVAYSVLVVAKVEKGKSKKLKSVKELLGITIMERSSFEKNPIDFLEAKGYKEVKKDLIIKLPKYSLFELENGRKRMLASAGELQKGNELALPSKYVNFLYLASHYEKLKGSPEDNEQKQLFVEQHKHYLDEIIEQISEFSKRVILADANLDKVLSAYNKHRDKPIREQAENIIHLFTLTNLGAPAAFKYFDTTIDRKRYTSTKEVLDATLIHQSITGLYETRIDLSQLGGDGGPAPAPAPAPGGVLNLEEEYRLHEKPVPSSIDPSWLQLFPTVWAERAGMGLANQVPPVVVELRSGASPVAVRQYPMSKEAREGIRPHIQRFLDLGVLVPCQSPWNTPLLPVKKPGTNDYRPVQDLREINKRVQDIHPTVPNPYNLLSSLPPSHTWYSVLDLKDAFFCLKLHPNSQPLFAFEWRDPEKGNTGQLTWTRLPQGFKNSPTLFNEALHRDLAPFRALNPQVVLLQYVDDLLVAAPTYRDCKEGTQKLLQELSKLGYRVSAKKAQLCQKEVTYLGYLLKEGKRWLTPARKATVMKIPPPTTPRQVREFLGTAGFCRLWIPGFASLAAPLYPLTKPSIPFIWTEEHQKAFDRIKEALLSAPALALPDLTKPFTLYVDERAGVARGVLTQTLGPWRRPVAYLSKKLDPVASGWPTCLKAVAAVALLLKDADKLTLGQNVTVIASHSLESIVRQPPDRWMTNARMTHYQSLLLNERVSFAPPAVLNPATLLPVESEATPVHRCSEILAEETGTRRDLKDQPLPGVPAWYTDGSSFIAEGKRRAGAAIVDGKRTVWASSLPEGTSAQKAELVALTQALRLAEGKDINIYTDSRYAFATAHIHGAIYKQRGWLTSAGKDIKNKEEILALLEAIHLPKRVAIIHCPGHQKGNDPVATGNRRADEAAKQAALSTRVLAETTKPAGKRTADGSEFEKRTADGSEFESPKKKAKVE

SEQ ID NO: 822 - protein, 2094 aa, synthetic construct
MPAAKRVKLDGGDKKYSIGLDIGTNSVGWAVITDEYKVPSKKFKVLGNTDRHSIKKNLIGALLFDSGETAEATRLKRTARRRYTRRKNRICYLQEIFSNEMAKVDDSFFHRLEESFLVEEDKKHERHPIFGNIVDEVAYHEKYPTIYHLRKKLVDSTDKADLRLIYLALAHMIKFRGHFLIEGDLNPDNSDVDKLFIQLVQTYNQLFEENPINASGVDAKAILSARLSKSRRLENLIAQLPGEKKNGLFGNLIALSLGLTPNFKSNFDLAEDAKLQLSKDTYDDDLDNLLAQIGDQYADLFLAAKNLSDAILLSDILRVNTEITKAPLSASMIKRYDEHHQDLTLLKALVRQQLPEKYKEIFFDQSKNGYAGYIDGGASQEEFYKFIKPILEKMDGTEELLVKLNREDLLRKQRTFDNGSIPHQIHLGELHAILRRQEDFYPFLKDNREKIEKILTFRIPYYVGPLARGNSRFAWMTRKSEETITPWNFEEVVDKGASAQSFIERMTNFDKNLPNEKVLPKHSLLYEYFTVYNELTKVKYVTEGMRKPAFLSGEQKKAIVDLLFKTNRKVTVKQLKEDYFKKIECFDSVEISGVEDRFNASLGTYHDLLKIIKDKDFLDNEENEDILEDIVLTLTLFEDREMIEERLKTYAHLFDDKVMKQLKRRRYTGWGRLSRKLINGIRDKQSGKTILDFLKSDGFANRNFMQLIHDDSLTFKEDIQKAQVSGQGDSLHEHIANLAGSPAIKKGILQTVKVVDELVKVMGRHKPENIVIEMARENQTTQKGQKNSRERMKRIEEGIKELGSQILKEHPVENTQLQNEKLYLYYLQNGRDMYVDQELDINRLSDYDVDHIVPQSFLKDDSIDNKVLTRSDKARGKSDNVPSEEVVKKMKNYWRQLLNAKLITQRKFDNLTKAERGGLSELDKAGFIKRQLVETRQITKHVAQILDSRMNTKYDENDKLIREVKVITLKSKLVSDFRKDFQFYKVREINNYHHAHDAYLNAVVGTALIKKYPKLESEFVYGDYKVYDVRKMIAKSEQEIGKATAKYFFYSNIMNFFKTEITLANGEIRKRPLIETNGETGEIVWDKGRDFATVRKVLSMPQVNIVKKTEVQTGGFSKESILPKRNSDKLIARKKDWDPKKYGGFDSPTVAYSVLVVAKVEKGKSKKLKSVKELLGITIMERSSFEKNPIDFLEAKGYKEVKKDLIIKLPKYSLFELENGRKRMLASAGELQKGNELALPSKYVNFLYLASHYEKLKGSPEDNEQKQLFVEQHKHYLDEIIEQISEFSKRVILADANLDKVLSAYNKHRDKPIREQAENIIHLFTLTNLGAPAAFKYFDTTIDRKRYTSTKEVLDATLIHQSITGLYETRIDLSQLGGDGGEAAAKGGGPAPGGVLNLEEEYRLHEKPVPSSIDPSWLQLFPTVWAERAGMGLANQVPPVVVELRSGASPVAVRQYPMSKEAREGIRPHIQRFLDLGVLVPCQSPWNTPLLPVKKPGTNDYRPVQDLREINKRVQDIHPTVPNPYNLLSSLPPSHTWYSVLDLKDAFFCLKLHPNSQPLFAFEWRDPEKGNTGQLTWTRLPQGFKNSPTLFNEALHRDLAPFRALNPQVVLLQYVDDLLVAAPTYRDCKEGTQKLLQELSKLGYRVSAKKAQLCQKEVTYLGYLLKEGKRWLTPARKATVMKIPPPTTPRQVREFLGTAGFCRLWIPGFASLAAPLYPLTKPSIPFIWTEEHQKAFDRIKEALLSAPALALPDLTKPFTLYVDERAGVARGVLTQTLGPWRRPVAYLSKKLDPVASGWPTCLKAVAAVALLLKDADKLTLGQNVTVIASHSLESIVRQPPDRWMTNARMTHYQSLLLNERVSFAPPAVLNPATLLPVESEATPVHRCSEILAEETGTRRDLKDQPLPGVPAWYTDGSSFIAEGKRRAGAAIVDGKRTVWASSLPEGTSAQKAELVALTQALRLAEGKDINIYTDSRYAFATAHIHGAIYKQRGWLTSAGKDIKNKEEILALLEAIHLPKRVAIIHCPGHQKGNDPVATGNRRADEAAKQAALSTRVLAETTKPAGKRTADGSEFEKRTADGSEFESPKKKAKVE

SEQ ID NO: 823 - protein, 2088 aa, synthetic construct
MPAAKRVKLDGGDKKYSIGLDIGTNSVGWAVITDEYKVPSKKFKVLGNTDRHSIKKNLIGALLFDSGETAEATRLKRTARRRYTRRKNRICYLQEIFSNEMAKVDDSFFHRLEESFLVEEDKKHERHPIFGNIVDEVAYHEKYPTIYHLRKKLVDSTDKADLRLIYLALAHMIKFRGHFLIEGDLNPDNSDVDKLFIQLVQTYNQLFEENPINASGVDAKAILSARLSKSRRLENLIAQLPGEKKNGLFGNLIALSLGLTPNFKSNFDLAEDAKLQLSKDTYDDDLDNLLAQIGDQYADLFLAAKNLSDAILLSDILRVNTEITKAPLSASMIKRYDEHHQDLTLLKALVRQQLPEKYKEIFFDQSKNGYAGYIDGGASQEEFYKFIKPILEKMDGTEELLVKLNREDLLRKQRTFDNGSIPHQIHLGELHAILRRQEDFYPFLKDNREKIEKILTFRIPYYVGPLARGNSRFAWMTRKSEETITPWNFEEVVDKGASAQSFIERMTNFDKNLPNEKVLPKHSLLYEYFTVYNELTKVKYVTEGMRKPAFLSGEQKKAIVDLLFKTNRKVTVKQLKEDYFKKIECFDSVEISGVEDRFNASLGTYHDLLKIIKDKDFLDNEENEDILEDIVLTLTLFEDREMIEERLKTYAHLFDDKVMKQLKRRRYTGWGRLSRKLINGIRDKQSGKTILDFLKSDGFANRNFMQLIHDDSLTFKEDIQKAQVSGQGDSLHEHIANLAGSPAIKKGILQTVKVVDELVKVMGRHKPENIVIEMARENQTTQKGQKNSRERMKRIEEGIKELGSQILKEHPVENTQLQNEKLYLYYLQNGRDMYVDQELDINRLSDYDVDHIVPQSFLKDDSIDNKVLTRSDKARGKSDNVPSEEVVKKMKNYWRQLLNAKLITQRKFDNLTKAERGGLSELDKAGFIKRQLVETRQITKHVAQILDSRMNTKYDENDKLIREVKVITLKSKLVSDFRKDFQFYKVREINNYHHAHDAYLNAVVGTALIKKYPKLESEFVYGDYKVYDVRKMIAKSEQEIGKATAKYFFYSNIMNFFKTEITLANGEIRKRPLIETNGETGEIVWDKGRDFATVRKVLSMPQVNIVKKTEVQTGGFSKESILPKRNSDKLIARKKDWDPKKYGGFDSPTVAYSVLVVAKVEKGKSKKLKSVKELLGITIMERSSFEKNPIDFLEAKGYKEVKKDLIIKLPKYSLFELENGRKRMLASAGELQKGNELALPSKYVNFLYLASHYEKLKGSPEDNEQKQLFVEQHKHYLDEIIEQISEFSKRVILADANLDKVLSAYNKHRDKPIREQAENIIHLFTLTNLGAPAAFKYFDTTIDRKRYTSTKEVLDATLIHQSITGLYETRIDLSQLGGDGGEAAAKGGVLNLEEEYRLHEKPVPSSIDPSWLQLFPTVWAERAGMGLANQVPPVVVELRSGASPVAVRQYPMSKEAREGIRPHIQRFLDLGVLVPCQSPWNTPLLPVKKPGTNDYRPVQDLREINKRVQDIHPTVPNPYNLLSSLPPSHTWYSVLDLKDAFFCLKLHPNSQPLFAFEWRDPEKGNTGQLTWTRLPQGFKNSPTLFNEALHRDLAPFRALNPQVVLLQYVDDLLVAAPTYRDCKEGTQKLLQELSKLGYRVSAKKAQLCQKEVTYLGYLLKEGKRWLTPARKATVMKIPPPTTPRQVREFLGTAGFCRLWIPGFASLAAPLYPLTKPSIPFIWTEEHQKAFDRIKEALLSAPALALPDLTKPFTLYVDERAGVARGVLTQTLGPWRRPVAYLSKKLDPVASGWPTCLKAVAAVALLLKDADKLTLGQNVTVIASHSLESIVRQPPDRWMTNARMTHYQSLLLNERVSFAPPAVLNPATLLPVESEATPVHRCSEILAEETGTRRDLKDQPLPGVPAWYTDGSSFIAEGKRRAGAAIVDGKRTVWASSLPEGTSAQKAELVALTQALRLAEGKDINIYTDSRYAFATAHIHGAIYKQRGWLTSAGKDIKNKEEILALLEAIHLPKRVAIIHCPGHQKGNDPVATGNRRADEAAKQAALSTRVLAETTKPAGKRTADGSEFEKRTADGSEFESPKKKAKVE

SEQ ID NO: 824 - protein, 2095 aa, synthetic construct
MPAAKRVKLDGGDKKYSIGLDIGTNSVGWAVITDEYKVPSKKFKVLGNTDRHSIKKNLIGALLFDSGETAEATRLKRTARRRYTRRKNRICYLQEIFSNEMAKVDDSFFHRLEESFLVEEDKKHERHPIFGNIVDEVAYHEKYPTIYHLRKKLVDSTDKADLRLIYLALAHMIKFRGHFLIEGDLNPDNSDVDKLFIQLVQTYNQLFEENPINASGVDAKAILSARLSKSRRLENLIAQLPGEKKNGLFGNLIALSLGLTPNFKSNFDLAEDAKLQLSKDTYDDDLDNLLAQIGDQYADLFLAAKNLSDAILLSDILRVNTEITKAPLSASMIKRYDEHHQDLTLLKALVRQQLPEKYKEIFFDQSKNGYAGYIDGGASQEEFYKFIKPILEKMDGTEELLVKLNREDLLRKQRTFDNGSIPHQIHLGELHAILRRQEDFYPFLKDNREKIEKILTFRIPYYVGPLARGNSRFAWMTRKSEETITPWNFEEVVDKGASAQSFIERMTNFDKNLPNEKVLPKHSLLYEYFTVYNELTKVKYVTEGMRKPAFLSGEQKKAIVDLLFKTNRKVTVKQLKEDYFKKIECFDSVEISGVEDRFNASLGTYHDLLKIIKDKDFLDNEENEDILEDIVLTLTLFEDREMIEERLKTYAHLFDDKVMKQLKRRRYTGWGRLSRKLINGIRDKQSGKTILDFLKSDGFANRNFMQLIHDDSLTFKEDIQKAQVSGQGDSLHEHIANLAGSPAIKKGILQTVKVVDELVKVMGRHKPENIVIEMARENQTTQKGQKNSRERMKRIEEGIKELGSQILKEHPVENTQLQNEKLYLYYLQNGRDMYVDQELDINRLSDYDVDHIVPQSFLKDDSIDNKVLTRSDKARGKSDNVPSEEVVKKMKNYWRQLLNAKLITQRKFDNLTKAERGGLSELDKAGFIKRQLVETRQITKHVAQILDSRMNTKYDENDKLIREVKVITLKSKLVSDFRKDFQFYKVREINNYHHAHDAYLNAVVGTALIKKYPKLESEFVYGDYKVYDVRKMIAKSEQEIGKATAKYFFYSNIMNFFKTEITLANGEIRKRPLIETNGETGEIVWDKGRDFATVRKVLSMPQVNIVKKTEVQTGGFSKESILPKRNSDKLIARKKDWDPKKYGGFDSPTVAYSVLVVAKVEKGKSKKLKSVKELLGITIMERSSFEKNPIDFLEAKGYKEVKKDLIIKLPKYSLFELENGRKRMLASAGELQKGNELALPSKYVNFLYLASHYEKLKGSPEDNEQKQLFVEQHKHYLDEIIEQISEFSKRVILADANLDKVLSAYNKHRDKPIREQAENIIHLFTLTNLGAPAAFKYFDTTIDRKRYTSTKEVLDATLIHQSITGLYETRIDLSQLGGDGGGGSGGSGGSGGSGGVLNLEEEYRLHEKPVPSSIDPSWLQLFPTVWAERAGMGLANQVPPVVVELRSGASPVAVRQYPMSKEAREGIRPHIQRFLDLGVLVPCQSPWNTPLLPVKKPGTNDYRPVQDLREINKRVQDIHPTVPNPYNLLSSLPPSHTWYSVLDLKDAFFCLKLHPNSQPLFAFEWRDPEKGNTGQLTWTRLPQGFKNSPTLFNEALHRDLAPFRALNPQVVLLQYVDDLLVAAPTYRDCKEGTQKLLQELSKLGYRVSAKKAQLCQKEVTYLGYLLKEGKRWLTPARKATVMKIPPPTTPRQVREFLGTAGFCRLWIPGFASLAAPLYPLTKPSIPFIWTEEHQKAFDRIKEALLSAPALALPDLTKPFTLYVDERAGVARGVLTQTLGPWRRPVAYLSKKLDPVASGWPTCLKAVAAVALLLKDADKLTLGQNVTVIASHSLESIVRQPPDRWMTNARMTHYQSLLLNERVSFAPPAVLNPATLLPVESEATPVHRCSEILAEETGTRRDLKDQPLPGVPAWYTDGSSFIAEGKRRAGAAIVDGKRTVWASSLPEGTSAQKAELVALTQALRLAEGKDINIYTDSRYAFATAHIHGAIYKQRGWLTSAGKDIKNKEEILALLEAIHLPKRVAIIHCPGHQKGNDPVATGNRRADEAAKQAALSTRVLAETTKPAGKRTADGSEFEKRTADGSEFESPKKKAKVE

SEQ ID NO: 825 - protein, 2094 aa, synthetic construct
MPAAKRVKLDGGDKKYSIGLDIGTNSVGWAVITDEYKVPSKKFKVLGNTDRHSIKKNLIGALLFDSGETAEATRLKRTARRRYTRRKNRICYLQEIFSNEMAKVDDSFFHRLEESFLVEEDKKHERHPIFGNIVDEVAYHEKYPTIYHLRKKLVDSTDKADLRLIYLALAHMIKFRGHFLIEGDLNPDNSDVDKLFIQLVQTYNQLFEENPINASGVDAKAILSARLSKSRRLENLIAQLPGEKKNGLFGNLIALSLGLTPNFKSNFDLAEDAKLQLSKDTYDDDLDNLLAQIGDQYADLFLAAKNLSDAILLSDILRVNTEITKAPLSASMIKRYDEHHQDLTLLKALVRQQLPEKYKEIFFDQSKNGYAGYIDGGASQEEFYKFIKPILEKMDGTEELLVKLNREDLLRKQRTFDNGSIPHQIHLGELHAILRRQEDFYPFLKDNREKIEKILTFRIPYYVGPLARGNSRFAWMTRKSEETITPWNFEEVVDKGASAQSFIERMTNFDKNLPNEKVLPKHSLLYEYFTVYNELTKVKYVTEGMRKPAFLSGEQKKAIVDLLFKTNRKVTVKQLKEDYFKKIECFDSVEISGVEDRFNASLGTYHDLLKIIKDKDFLDNEENEDILEDIVLTLTLFEDREMIEERLKTYAHLFDDKVMKQLKRRRYTGWGRLSRKLINGIRDKQSGKTILDFLKSDGFANRNFMQLIHDDSLTFKEDIQKAQVSGQGDSLHEHIANLAGSPAIKKGILQTVKVVDELVKVMGRHKPENIVIEMARENQTTQKGQKNSRERMKRIEEGIKELGSQILKEHPVENTQLQNEKLYLYYLQNGRDMYVDQELDINRLSDYDVDHIVPQSFLKDDSIDNKVLTRSDKARGKSDNVPSEEVVKKMKNYWRQLLNAKLITQRKFDNLTKAERGGLSELDKAGFIKRQLVETRQITKHVAQILDSRMNTKYDENDKLIREVKVITLKSKLVSDFRKDFQFYKVREINNYHHAHDAYLNAVVGTALIKKYPKLESEFVYGDYKVYDVRKMIAKSEQEIGKATAKYFFYSNIMNFFKTEITLANGEIRKRPLIETNGETGEIVWDKGRDFATVRKVLSMPQVNIVKKTEVQTGGFSKESILPKRNSDKLIARKKDWDPKKYGGFDSPTVAYSVLVVAKVEKGKSKKLKSVKELLGITIMERSSFEKNPIDFLEAKGYKEVKKDLIIKLPKYSLFELENGRKRMLASAGELQKGNELALPSKYVNFLYLASHYEKLKGSPEDNEQKQLFVEQHKHYLDEIIEQISEFSKRVILADANLDKVLSAYNKHRDKPIREQAENIIHLFTLTNLGAPAAFKYFDTTIDRKRYTSTKEVLDATLIHQSITGLYETRIDLSQLGGDGGGGSGSSEAAAKGGVLNLEEEYRLHEKPVPSSIDPSWLQLFPTVWAERAGMGLANQVPPVVVELRSGASPVAVRQYPMSKEAREGIRPHIQRFLDLGVLVPCQSPWNTPLLPVKKPGTNDYRPVQDLREINKRVQDIHPTVPNPYNLLSSLPPSHTWYSVLDLKDAFFCLKLHPNSQPLFAFEWRDPEKGNTGQLTWTRLPQGFKNSPTLFNEALHRDLAPFRALNPQVVLLQYVDDLLVAAPTYRDCKEGTQKLLQELSKLGYRVSAKKAQLCQKEVTYLGYLLKEGKRWLTPARKATVMKIPPPTTPRQVREFLGTAGFCRLWIPGFASLAAPLYPLTKPSIPFIWTEEHQKAFDRIKEALLSAPALALPDLTKPFTLYVDERAGVARGVLTQTLGPWRRPVAYLSKKLDPVASGWPTCLKAVAAVALLLKDADKLTLGQNVTVIASHSLESIVRQPPDRWMTNARMTHYQSLLLNERVSFAPPAVLNPATLLPVESEATPVHRCSEILAEETGTRRDLKDQPLPGVPAWYTDGSSFIAEGKRRAGAAIVDGKRTVWASSLPEGTSAQKAELVALTQALRLAEGKDINIYTDSRYAFATAHIHGAIYKQRGWLTSAGKDIKNKEEILALLEAIHLPKRVAIIHCPGHQKGNDPVATGNRRADEAAKQAALSTRVLAETTKPAGKRTADGSEFEKRTADGSEFESPKKKAKVE

SEQ ID NO: 826 - protein, 2094 aa, synthetic construct
MPAAKRVKLDGGDKKYSIGLDIGTNSVGWAVITDEYKVPSKKFKVLGNTDRHSIKKNLIGALLFDSGETAEATRLKRTARRRYTRRKNRICYLQEIFSNEMAKVDDSFFHRLEESFLVEEDKKHERHPIFGNIVDEVAYHEKYPTIYHLRKKLVDSTDKADLRLIYLALAHMIKFRGHFLIEGDLNPDNSDVDKLFIQLVQTYNQLFEENPINASGVDAKAILSARLSKSRRLENLIAQLPGEKKNGLFGNLIALSLGLTPNFKSNFDLAEDAKLQLSKDTYDDDLDNLLAQIGDQYADLFLAAKNLSDAILLSDILRVNTEITKAPLSASMIKRYDEHHQDLTLLKALVRQQLPEKYKEIFFDQSKNGYAGYIDGGASQEEFYKFIKPILEKMDGTEELLVKLNREDLLRKQRTFDNGSIPHQIHLGELHAILRRQEDFYPFLKDNREKIEKILTFRIPYYVGPLARGNSRFAWMTRKSEETITPWNFEEVVDKGASAQSFIERMTNFDKNLPNEKVLPKHSLLYEYFTVYNELTKVKYVTEGMRKPAFLSGEQKKAIVDLLFKTNRKVTVKQLKEDYFKKIECFDSVEISGVEDRFNASLGTYHDLLKIIKDKDFLDNEENEDILEDIVLTLTLFEDREMIEERLKTYAHLFDDKVMKQLKRRRYTGWGRLSRKLINGIRDKQSGKTILDFLKSDGFANRNFMQLIHDDSLTFKEDIQKAQVSGQGDSLHEHIANLAGSPAIKKGILQTVKVVDELVKVMGRHKPENIVIEMARENQTTQKGQKNSRERMKRIEEGIKELGSQILKEHPVENTQLQNEKLYLYYLQNGRDMYVDQELDINRLSDYDVDHIVPQSFLKDDSIDNKVLTRSDKARGKSDNVPSEEVVKKMKNYWRQLLNAKLITQRKFDNLTKAERGGLSELDKAGFIKRQLVETRQITKHVAQILDSRMNTKYDENDKLIREVKVITLKSKLVSDFRKDFQFYKVREINNYHHAHDAYLNAVVGTALIKKYPKLESEFVYGDYKVYDVRKMIAKSEQEIGKATAKYFFYSNIMNFFKTEITLANGEIRKRPLIETNGETGEIVWDKGRDFATVRKVLSMPQVNIVKKTEVQTGGFSKESILPKRNSDKLIARKKDWDPKKYGGFDSPTVAYSVLVVAKVEKGKSKKLKSVKELLGITIMERSSFEKNPIDFLEAKGYKEVKKDLIIKLPKYSLFELENGRKRMLASAGELQKGNELALPSKYVNFLYLASHYEKLKGSPEDNEQKQLFVEQHKHYLDEIIEQISEFSKRVILADANLDKVLSAYNKHRDKPIREQAENIIHLFTLTNLGAPAAFKYFDTTIDRKRYTSTKEVLDATLIHQSITGLYETRIDLSQLGGDGGEAAAKGGGGSSGGVLNLEEEYRLHEKPVPSSIDPSWLQLFPTVWAERAGMGLANQVPPVVVELRSGASPVAVRQYPMSKEAREGIRPHIQRFLDLGVLVPCQSPWNTPLLPVKKPGTNDYRPVQDLREINKRVQDIHPTVPNPYNLLSSLPPSHTWYSVLDLKDAFFCLKLHPNSQPLFAFEWRDPEKGNTGQLTWTRLPQGFKNSPTLFNEALHRDLAPFRALNPQVVLLQYVDDLLVAAPTYRDCKEGTQKLLQELSKLGYRVSAKKAQLCQKEVTYLGYLLKEGKRWLTPARKATVMKIPPPTTPRQVREFLGTAGFCRLWIPGFASLAAPLYPLTKPSIPFIWTEEHQKAFDRIKEALLSAPALALPDLTKPFTLYVDERAGVARGVLTQTLGPWRRPVAYLSKKLDPVASGWPTCLKAVAAVALLLKDADKLTLGQNVTVIASHSLESIVRQPPDRWMTNARMTHYQSLLLNERVSFAPPAVLNPATLLPVESEATPVHRCSEILAEETGTRRDLKDQPLPGVPAWYTDGSSFIAEGKRRAGAAIVDGKRTVWASSLPEGTSAQKAELVALTQALRLAEGKDINIYTDSRYAFATAHIHGAIYKQRGWLTSAGKDIKNKEEILALLEAIHLPKRVAIIHCPGHQKGNDPVATGNRRADEAAKQAALSTRVLAETTKPAGKRTADGSEFEKRTADGSEFESPKKKAKVE

SEQ ID NO: 827 - protein, 2103 aa, synthetic construct
MPAAKRVKLDGGDKKYSIGLDIGTNSVGWAVITDEYKVPSKKFKVLGNTDRHSIKKNLIGALLFDSGETAEATRLKRTARRRYTRRKNRICYLQEIFSNEMAKVDDSFFHRLEESFLVEEDKKHERHPIFGNIVDEVAYHEKYPTIYHLRKKLVDSTDKADLRLIYLALAHMIKFRGHFLIEGDLNPDNSDVDKLFIQLVQTYNQLFEENPINASGVDAKAILSARLSKSRRLENLIAQLPGEKKNGLFGNLIALSLGLTPNFKSNFDLAEDAKLQLSKDTYDDDLDNLLAQIGDQYADLFLAAKNLSDAILLSDILRVNTEITKAPLSASMIKRYDEHHQDLTLLKALVRQQLPEKYKEIFFDQSKNGYAGYIDGGASQEEFYKFIKPILEKMDGTEELLVKLNREDLLRKQRTFDNGSIPHQIHLGELHAILRRQEDFYPFLKDNREKIEKILTFRIPYYVGPLARGNSRFAWMTRKSEETITPWNFEEVVDKGASAQSFIERMTNFDKNLPNEKVLPKHSLLYEYFTVYNELTKVKYVTEGMRKPAFLSGEQKKAIVDLLFKTNRKVTVKQLKEDYFKKIECFDSVEISGVEDRFNASLGTYHDLLKIIKDKDFLDNEENEDILEDIVLTLTLFEDREMIEERLKTYAHLFDDKVMKQLKRRRYTGWGRLSRKLINGIRDKQSGKTILDFLKSDGFANRNFMQLIHDDSLTFKEDIQKAQVSGQGDSLHEHIANLAGSPAIKKGILQTVKVVDELVKVMGRHKPENIVIEMARENQTTQKGQKNSRERMKRIEEGIKELGSQILKEHPVENTQLQNEKLYLYYLQNGRDMYVDQELDINRLSDYDVDHIVPQSFLKDDSIDNKVLTRSDKARGKSDNVPSEEVVKKMKNYWRQLLNAKLITQRKFDNLTKAERGGLSELDKAGFIKRQLVETRQITKHVAQILDSRMNTKYDENDKLIREVKVITLKSKLVSDFRKDFQFYKVREINNYHHAHDAYLNAVVGTALIKKYPKLESEFVYGDYKVYDVRKMIAKSEQEIGKATAKYFFYSNIMNFFKTEITLANGEIRKRPLIETNGETGEIVWDKGRDFATVRKVLSMPQVNIVKKTEVQTGGFSKESILPKRNSDKLIARKKDWDPKKYGGFDSPTVAYSVLVVAKVEKGKSKKLKSVKELLGITIMERSSFEKNPIDFLEAKGYKEVKKDLIIKLPKYSLFELENGRKRMLASAGELQKGNELALPSKYVNFLYLASHYEKLKGSPEDNEQKQLFVEQHKHYLDEIIEQISEFSKRVILADANLDKVLSAYNKHRDKPIREQAENIIHLFTLTNLGAPAAFKYFDTTIDRKRYTSTKEVLDATLIHQSITGLYETRIDLSQLGGDGGEAAAKEAAAKEAAAKEAAAKGGVLNLEEEYRLHEKPVPSSIDPSWLQLFPTVWAERAGMGLANQVPPVVVELRSGASPVAVRQYPMSKEAREGIRPHIQRFLDLGVLVPCQSPWNTPLLPVKKPGTNDYRPVQDLREINKRVQDIHPTVPNPYNLLSSLPPSHTWYSVLDLKDAFFCLKLHPNSQPLFAFEWRDPEKGNTGQLTWTRLPQGFKNSPTLFNEALHRDLAPFRALNPQVVLLQYVDDLLVAAPTYRDCKEGTQKLLQELSKLGYRVSAKKAQLCQKEVTYLGYLLKEGKRWLTPARKATVMKIPPPTTPRQVREFLGTAGFCRLWIPGFASLAAPLYPLTKPSIPFIWTEEHQKAFDRIKEALLSAPALALPDLTKPFTLYVDERAGVARGVLTQTLGPWRRPVAYLSKKLDPVASGWPTCLKAVAAVALLLKDADKLTLGQNVTVIASHSLESIVRQPPDRWMTNARMTHYQSLLLNERVSFAPPAVLNPATLLPVESEATPVHRCSEILAEETGTRRDLKDQPLPGVPAWYTDGSSFIAEGKRRAGAAIVDGKRTVWASSLPEGTSAQKAELVALTQALRLAEGKDINIYTDSRYAFATAHIHGAIYKQRGWLTSAGKDIKNKEEILALLEAIHLPKRVAIIHCPGHQKGNDPVATGNRRADEAAKQAALSTRVLAETTKPAGKRTADGSEFEKRTADGSEFESPKKKAKVE

SEQ ID NO: 828 - protein, 2092 aa, synthetic construct
MPAAKRVKLDGGDKKYSIGLDIGTNSVGWAVITDEYKVPSKKFKVLGNTDRHSIKKNLIGALLFDSGETAEATRLKRTARRRYTRRKNRICYLQEIFSNEMAKVDDSFFHRLEESFLVEEDKKHERHPIFGNIVDEVAYHEKYPTIYHLRKKLVDSTDKADLRLIYLALAHMIKFRGHFLIEGDLNPDNSDVDKLFIQLVQTYNQLFEENPINASGVDAKAILSARLSKSRRLENLIAQLPGEKKNGLFGNLIALSLGLTPNFKSNFDLAEDAKLQLSKDTYDDDLDNLLAQIGDQYADLFLAAKNLSDAILLSDILRVNTEITKAPLSASMIKRYDEHHQDLTLLKALVRQQLPEKYKEIFFDQSKNGYAGYIDGGASQEEFYKFIKPILEKMDGTEELLVKLNREDLLRKQRTFDNGSIPHQIHLGELHAILRRQEDFYPFLKDNREKIEKILTFRIPYYVGPLARGNSRFAWMTRKSEETITPWNFEEVVDKGASAQSFIERMTNFDKNLPNEKVLPKHSLLYEYFTVYNELTKVKYVTEGMRKPAFLSGEQKKAIVDLLFKTNRKVTVKQLKEDYFKKIECFDSVEISGVEDRFNASLGTYHDLLKIIKDKDFLDNEENEDILEDIVLTLTLFEDREMIEERLKTYAHLFDDKVMKQLKRRRYTGWGRLSRKLINGIRDKQSGKTILDFLKSDGFANRNFMQLIHDDSLTFKEDIQKAQVSGQGDSLHEHIANLAGSPAIKKGILQTVKVVDELVKVMGRHKPENIVIEMARENQTTQKGQKNSRERMKRIEEGIKELGSQILKEHPVENTQLQNEKLYLYYLQNGRDMYVDQELDINRLSDYDVDHIVPQSFLKDDSIDNKVLTRSDKARGKSDNVPSEEVVKKMKNYWRQLLNAKLITQRKFDNLTKAERGGLSELDKAGFIKRQLVETRQITKHVAQILDSRMNTKYDENDKLIREVKVITLKSKLVSDFRKDFQFYKVREINNYHHAHDAYLNAVVGTALIKKYPKLESEFVYGDYKVYDVRKMIAKSEQEIGKATAKYFFYSNIMNFFKTEITLANGEIRKRPLIETNGETGEIVWDKGRDFATVRKVLSMPQVNIVKKTEVQTGGFSKESILPKRNSDKLIARKKDWDPKKYGGFDSPTVAYSVLVVAKVEKGKSKKLKSVKELLGITIMERSSFEKNPIDFLEAKGYKEVKKDLIIKLPKYSLFELENGRKRMLASAGELQKGNELALPSKYVNFLYLASHYEKLKGSPEDNEQKQLFVEQHKHYLDEIIEQISEFSKRVILADANLDKVLSAYNKHRDKPIREQAENIIHLFTLTNLGAPAAFKYFDTTIDRKRYTSTKEVLDATLIHQSITGLYETRIDLSQLGGDGGGGSGGGGSSGGVLNLEEEYRLHEKPVPSSIDPSWLQLFPTVWAERAGMGLANQVPPVVVELRSGASPVAVRQYPMSKEAREGIRPHIQRFLDLGVLVPCQSPWNTPLLPVKKPGTNDYRPVQDLREINKRVQDIHPTVPNPYNLLSSLPPSHTWYSVLDLKDAFFCLKLHPNSQPLFAFEWRDPEKGNTGQLTWTRLPQGFKNSPTLFNEALHRDLAPFRALNPQVVLLQYVDDLLVAAPTYRDCKEGTQKLLQELSKLGYRVSAKKAQLCQKEVTYLGYLLKEGKRWLTPARKATVMKIPPPTTPRQVREFLGTAGFCRLWIPGFASLAAPLYPLTKPSIPFIWTEEHQKAFDRIKEALLSAPALALPDLTKPFTLYVDERAGVARGVLTQTLGPWRRPVAYLSKKLDPVASGWPTCLKAVAAVALLLKDADKLTLGQNVTVIASHSLESIVRQPPDRWMTNARMTHYQSLLLNERVSFAPPAVLNPATLLPVESEATPVHRCSEILAEETGTRRDLKDQPLPGVPAWYTDGSSFIAEGKRRAGAAIVDGKRTVWASSLPEGTSAQKAELVALTQALRLAEGKDINIYTDSRYAFATAHIHGAIYKQRGWLTSAGKDIKNKEEILALLEAIHLPKRVAIIHCPGHQKGNDPVATGNRRADEAAKQAALSTRVLAETTKPAGKRTADGSEFEKRTADGSEFESPKKKAKVE

SEQ ID NO: 829 - protein, 2094 aa, synthetic construct
MPAAKRVKLDGGDKKYSIGLDIGTNSVGWAVITDEYKVPSKKFKVLGNTDRHSIKKNLIGALLFDSGETAEATRLKRTARRRYTRRKNRICYLQEIFSNEMAKVDDSFFHRLEESFLVEEDKKHERHPIFGNIVDEVAYHEKYPTIYHLRKKLVDSTDKADLRLIYLALAHMIKFRGHFLIEGDLNPDNSDVDKLFIQLVQTYNQLFEENPINASGVDAKAILSARLSKSRRLENLIAQLPGEKKNGLFGNLIALSLGLTPNFKSNFDLAEDAKLQLSKDTYDDDLDNLLAQIGDQYADLFLAAKNLSDAILLSDILRVNTEITKAPLSASMIKRYDEHHQDLTLLKALVRQQLPEKYKEIFFDQSKNGYAGYIDGGASQEEFYKFIKPILEKMDGTEELLVKLNREDLLRKQRTFDNGSIPHQIHLGELHAILRRQEDFYPFLKDNREKIEKILTFRIPYYVGPLARGNSRFAWMTRKSEETITPWNFEEVVDKGASAQSFIERMTNFDKNLPNEKVLPKHSLLYEYFTVYNELTKVKYVTEGMRKPAFLSGEQKKAIVDLLFKTNRKVTVKQLKEDYFKKIECFDSVEISGVEDRFNASLGTYHDLLKIIKDKDFLDNEENEDILEDIVLTLTLFEDREMIEERLKTYAHLFDDKVMKQLKRRRYTGWGRLSRKLINGIRDKQSGKTILDFLKSDGFANRNFMQLIHDDSLTFKEDIQKAQVSGQGDSLHEHIANLAGSPAIKKGILQTVKVVDELVKVMGRHKPENIVIEMARENQTTQKGQKNSRERMKRIEEGIKELGSQILKEHPVENTQLQNEKLYLYYLQNGRDMYVDQELDINRLSDYDVDHIVPQSFLKDDSIDNKVLTRSDKARGKSDNVPSEEVVKKMKNYWRQLLNAKLITQRKFDNLTKAERGGLSELDKAGFIKRQLVETRQITKHVAQILDSRMNTKYDENDKLIREVKVITLKSKLVSDFRKDFQFYKVREINNYHHAHDAYLNAVVGTALIKKYPKLESEFVYGDYKVYDVRKMIAKSEQEIGKATAKYFFYSNIMNFFKTEITLANGEIRKRPLIETNGETGEIVWDKGRDFATVRKVLSMPQVNIVKKTEVQTGGFSKESILPKRNSDKLIARKKDWDPKKYGGFDSPTVAYSVLVVAKVEKGKSKKLKSVKELLGITIMERSSFEKNPIDFLEAKGYKEVKKDLIIKLPKYSLFELENGRKRMLASAGELQKGNELALPSKYVNFLYLASHYEKLKGSPEDNEQKQLFVEQHKHYLDEIIEQISEFSKRVILADANLDKVLSAYNKHRDKPIREQAENIIHLFTLTNLGAPAAFKYFDTTIDRKRYTSTKEVLDATLIHQSITGLYETRIDLSQLGGDGGEAAAKGGSPAPGGVLNLEEEYRLHEKPVPSSIDPSWLQLFPTVWAERAGMGLANQVPPVVVELRSGASPVAVRQYPMSKEAREGIRPHIQRFLDLGVLVPCQSPWNTPLLPVKKPGTNDYRPVQDLREINKRVQDIHPTVPNPYNLLSSLPPSHTWYSVLDLKDAFFCLKLHPNSQPLFAFEWRDPEKGNTGQLTWTRLPQGFKNSPTLFNEALHRDLAPFRALNPQVVLLQYVDDLLVAAPTYRDCKEGTQKLLQELSKLGYRVSAKKAQLCQKEVTYLGYLLKEGKRWLTPARKATVMKIPPPTTPRQVREFLGTAGFCRLWIPGFASLAAPLYPLTKPSIPFIWTEEHQKAFDRIKEALLSAPALALPDLTKPFTLYVDERAGVARGVLTQTLGPWRRPVAYLSKKLDPVASGWPTCLKAVAAVALLLKDADKLTLGQNVTVIASHSLESIVRQPPDRWMTNARMTHYQSLLLNERVSFAPPAVLNPATLLPVESEATPVHRCSEILAEETGTRRDLKDQPLPGVPAWYTDGSSFIAEGKRRAGAAIVDGKRTVWASSLPEGTSAQKAELVALTQALRLAEGKDINIYTDSRYAFATAHIHGAIYKQRGWLTSAGKDIKNKEEILALLEAIHLPKRVAIIHCPGHQKGNDPVATGNRRADEAAKQAALSTRVLAETTKPAGKRTADGSEFEKRTADGSEFESPKKKAKVE

SEQ ID NO: 830 - protein, 2094 aa, synthetic construct
MPAAKRVKLDGGDKKYSIGLDIGTNSVGWAVITDEYKVPSKKFKVLGNTDRHSIKKNLIGALLFDSGETAEATRLKRTARRRYTRRKNRICYLQEIFSNEMAKVDDSFFHRLEESFLVEEDKKHERHPIFGNIVDEVAYHEKYPTIYHLRKKLVDSTDKADLRLIYLALAHMIKFRGHFLIEGDLNPDNSDVDKLFIQLVQTYNQLFEENPINASGVDAKAILSARLSKSRRLENLIAQLPGEKKNGLFGNLIALSLGLTPNFKSNFDLAEDAKLQLSKDTYDDDLDNLLAQIGDQYADLFLAAKNLSDAILLSDILRVNTEITKAPLSASMIKRYDEHHQDLTLLKALVRQQLPEKYKEIFFDQSKNGYAGYIDGGASQEEFYKFIKPILEKMDGTEELLVKLNREDLLRKQRTFDNGSIPHQIHLGELHAILRRQEDFYPFLKDNREKIEKILTFRIPYYVGPLARGNSRFAWMTRKSEETITPWNFEEVVDKGASAQSFIERMTNFDKNLPNEKVLPKHSLLYEYFTVYNELTKVKYVTEGMRKPAFLSGEQKKAIVDLLFKTNRKVTVKQLKEDYFKKIECFDSVEISGVEDRFNASLGTYHDLLKIIKDKDFLDNEENEDILEDIVLTLTLFEDREMIEERLKTYAHLFDDKVMKQLKRRRYTGWGRLSRKLINGIRDKQSGKTILDFLKSDGFANRNFMQLIHDDSLTFKEDIQKAQVSGQGDSLHEHIANLAGSPAIKKGILQTVKVVDELVKVMGRHKPENIVIEMARENQTTQKGQKNSRERMKRIEEGIKELGSQILKEHPVENTQLQNEKLYLYYLQNGRDMYVDQELDINRLSDYDVDHIVPQSFLKDDSIDNKVLTRSDKARGKSDNVPSEEVVKKMKNYWRQLLNAKLITQRKFDNLTKAERGGLSELDKAGFIKRQLVETRQITKHVAQILDSRMNTKYDENDKLIREVKVITLKSKLVSDFRKDFQFYKVREINNYHHAHDAYLNAVVGTALIKKYPKLESEFVYGDYKVYDVRKMIAKSEQEIGKATAKYFFYSNIMNFFKTEITLANGEIRKRPLIETNGETGEIVWDKGRDFATVRKVLSMPQVNIVKKTEVQTGGFSKESILPKRNSDKLIARKKDWDPKKYGGFDSPTVAYSVLVVAKVEKGKSKKLKSVKELLGITIMERSSFEKNPIDFLEAKGYKEVKKDLIIKLPKYSLFELENGRKRMLASAGELQKGNELALPSKYVNFLYLASHYEKLKGSPEDNEQKQLFVEQHKHYLDEIIEQISEFSKRVILADANLDKVLSAYNKHRDKPIREQAENIIHLFTLTNLGAPAAFKYFDTTIDRKRYTSTKEVLDATLIHQSITGLYETRIDLSQLGGDGGEAAAKGGGGGSGGVLNLEEEYRLHEKPVPSSIDPSWLQLFPTVWAERAGMGLANQVPPVVVELRSGASPVAVRQYPMSKEAREGIRPHIQRFLDLGVLVPCQSPWNTPLLPVKKPGTNDYRPVQDLREINKRVQDIHPTVPNPYNLLSSLPPSHTWYSVLDLKDAFFCLKLHPNSQPLFAFEWRDPEKGNTGQLTWTRLPQGFKNSPTLFNEALHRDLAPFRALNPQVVLLQYVDDLLVAAPTYRDCKEGTQKLLQELSKLGYRVSAKKAQLCQKEVTYLGYLLKEGKRWLTPARKATVMKIPPPTTPRQVREFLGTAGFCRLWIPGFASLAAPLYPLTKPSIPFIWTEEHQKAFDRIKEALLSAPALALPDLTKPFTLYVDERAGVARGVLTQTLGPWRRPVAYLSKKLDPVASGWPTCLKAVAAVALLLKDADKLTLGQNVTVIASHSLESIVRQPPDRWMTNARMTHYQSLLLNERVSFAPPAVLNPATLLPVESEATPVHRCSEILAEETGTRRDLKDQPLPGVPAWYTDGSSFIAEGKRRAGAAIVDGKRTVWASSLPEGTSAQKAELVALTQALRLAEGKDINIYTDSRYAFATAHIHGAIYKQRGWLTSAGKDIKNKEEILALLEAIHLPKRVAIIHCPGHQKGNDPVATGNRRADEAAKQAALSTRVLAETTKPAGKRTADGSEFEKRTADGSEFESPKKKAKVE

SEQ ID NO: 831 - protein, 2094 aa, synthetic construct
MPAAKRVKLDGGDKKYSIGLDIGTNSVGWAVITDEYKVPSKKFKVLGNTDRHSIKKNLIGALLFDSGETAEATRLKRTARRRYTRRKNRICYLQEIFSNEMAKVDDSFFHRLEESFLVEEDKKHERHPIFGNIVDEVAYHEKYPTIYHLRKKLVDSTDKADLRLIYLALAHMIKFRGHFLIEGDLNPDNSDVDKLFIQLVQTYNQLFEENPINASGVDAKAILSARLSKSRRLENLIAQLPGEKKNGLFGNLIALSLGLTPNFKSNFDLAEDAKLQLSKDTYDDDLDNLLAQIGDQYADLFLAAKNLSDAILLSDILRVNTEITKAPLSASMIKRYDEHHQDLTLLKALVRQQLPEKYKEIFFDQSKNGYAGYIDGGASQEEFYKFIKPILEKMDGTEELLVKLNREDLLRKQRTFDNGSIPHQIHLGELHAILRRQEDFYPFLKDNREKIEKILTFRIPYYVGPLARGNSRFAWMTRKSEETITPWNFEEVVDKGASAQSFIERMTNFDKNLPNEKVLPKHSLLYEYFTVYNELTKVKYVTEGMRKPAFLSGEQKKAIVDLLFKTNRKVTVKQLKEDYFKKIECFDSVEISGVEDRFNASLGTYHDLLKIIKDKDFLDNEENEDILEDIVLTLTLFEDREMIEERLKTYAHLFDDKVMKQLKRRRYTGWGRLSRKLINGIRDKQSGKTILDFLKSDGFANRNFMQLIHDDSLTFKEDIQKAQVSGQGDSLHEHIANLAGSPAIKKGILQTVKVVDELVKVMGRHKPENIVIEMARENQTTQKGQKNSRERMKRIEEGIKELGSQILKEHPVENTQLQNEKLYLYYLQNGRDMYVDQELDINRLSDYDVDHIVPQSFLKDDSIDNKVLTRSDKARGKSDNVPSEEVVKKMKNYWRQLLNAKLITQRKFDNLTKAERGGLSELDKAGFIKRQLVETRQITKHVAQILDSRMNTKYDENDKLIREVKVITLKSKLVSDFRKDFQFYKVREINNYHHAHDAYLNAVVGTALIKKYPKLESEFVYGDYKVYDVRKMIAKSEQEIGKATAKYFFYSNIMNFFKTEITLANGEIRKRPLIETNGETGEIVWDKGRDFATVRKVLSMPQVNIVKKTEVQTGGFSKESILPKRNSDKLIARKKDWDPKKYGGFDSPTVAYSVLVVAKVEKGKSKKLKSVKELLGITIMERSSFEKNPIDFLEAKGYKEVKKDLIIKLPKYSLFELENGRKRMLASAGELQKGNELALPSKYVNFLYLASHYEKLKGSPEDNEQKQLFVEQHKHYLDEIIEQISEFSKRVILADANLDKVLSAYNKHRDKPIREQAENIIHLFTLTNLGAPAAFKYFDTTIDRKRYTSTKEVLDATLIHQSITGLYETRIDLSQLGGDGGPAPGSSEAAAKGGVLNLEEEYRLHEKPVPSSIDPSWLQLFPTVWAERAGMGLANQVPPVVVELRSGASPVAVRQYPMSKEAREGIRPHIQRFLDLGVLVPCQSPWNTPLLPVKKPGTNDYRPVQDLREINKRVQDIHPTVPNPYNLLSSLPPSHTWYSVLDLKDAFFCLKLHPNSQPLFAFEWRDPEKGNTGQLTWTRLPQGFKNSPTLFNEALHRDLAPFRALNPQVVLLQYVDDLLVAAPTYRDCKEGTQKLLQELSKLGYRVSAKKAQLCQKEVTYLGYLLKEGKRWLTPARKATVMKIPPPTTPRQVREFLGTAGFCRLWIPGFASLAAPLYPLTKPSIPFIWTEEHQKAFDRIKEALLSAPALALPDLTKPFTLYVDERAGVARGVLTQTLGPWRRPVAYLSKKLDPVASGWPTCLKAVAAVALLLKDADKLTLGQNVTVIASHSLESIVRQPPDRWMTNARMTHYQSLLLNERVSFAPPAVLNPATLLPVESEATPVHRCSEILAEETGTRRDLKDQPLPGVPAWYTDGSSFIAEGKRRAGAAIVDGKRTVWASSLPEGTSAQKAELVALTQALRLAEGKDINIYTDSRYAFATAHIHGAIYKQRGWLTSAGKDIKNKEEILALLEAIHLPKRVAIIHCPGHQKGNDPVATGNRRADEAAKQAALSTRVLAETTKPAGKRTADGSEFEKRTADGSEFESPKKKAKVE

SEQ ID NO: 832 - protein, 2091 aa, synthetic construct
MPAAKRVKLDGGDKKYSIGLDIGTNSVGWAVITDEYKVPSKKFKVLGNTDRHSIKKNLIGALLFDSGETAEATRLKRTARRRYTRRKNRICYLQEIFSNEMAKVDDSFFHRLEESFLVEEDKKHERHPIFGNIVDEVAYHEKYPTIYHLRKKLVDSTDKADLRLIYLALAHMIKFRGHFLIEGDLNPDNSDVDKLFIQLVQTYNQLFEENPINASGVDAKAILSARLSKSRRLENLIAQLPGEKKNGLFGNLIALSLGLTPNFKSNFDLAEDAKLQLSKDTYDDDLDNLLAQIGDQYADLFLAAKNLSDAILLSDILRVNTEITKAPLSASMIKRYDEHHQDLTLLKALVRQQLPEKYKEIFFDQSKNGYAGYIDGGASQEEFYKFIKPILEKMDGTEELLVKLNREDLLRKQRTFDNGSIPHQIHLGELHAILRRQEDFYPFLKDNREKIEKILTFRIPYYVGPLARGNSRFAWMTRKSEETITPWNFEEVVDKGASAQSFIERMTNFDKNLPNEKVLPKHSLLYEYFTVYNELTKVKYVTEGMRKPAFLSGEQKKAIVDLLFKTNRKVTVKQLKEDYFKKIECFDSVEISGVEDRFNASLGTYHDLLKIIKDKDFLDNEENEDILEDIVLTLTLFEDREMIEERLKTYAHLFDDKVMKQLKRRRYTGWGRLSRKLINGIRDKQSGKTILDFLKSDGFANRNFMQLIHDDSLTFKEDIQKAQVSGQGDSLHEHIANLAGSPAIKKGILQTVKVVDELVKVMGRHKPENIVIEMARENQTTQKGQKNSRERMKRIEEGIKELGSQILKEHPVENTQLQNEKLYLYYLQNGRDMYVDQELDINRLSDYDVDHIVPQSFLKDDSIDNKVLTRSDKARGKSDNVPSEEVVKKMKNYWRQLLNAKLITQRKFDNLTKAERGGLSELDKAGFIKRQLVETRQITKHVAQILDSRMNTKYDENDKLIREVKVITLKSKLVSDFRKDFQFYKVREINNYHHAHDAYLNAVVGTALIKKYPKLESEFVYGDYKVYDVRKMIAKSEQEIGKATAKYFFYSNIMNFFKTEITLANGEIRKRPLIETNGETGEIVWDKGRDFATVRKVLSMPQVNIVKKTEVQTGGFSKESILPKRNSDKLIARKKDWDPKKYGGFDSPTVAYSVLVVAKVEKGKSKKLKSVKELLGITIMERSSFEKNPIDFLEAKGYKEVKKDLIIKLPKYSLFELENGRKRMLASAGELQKGNELALPSKYVNFLYLASHYEKLKGSPEDNEQKQLFVEQHKHYLDEIIEQISEFSKRVILADANLDKVLSAYNKHRDKPIREQAENIIHLFTLTNLGAPAAFKYFDTTIDRKRYTSTKEVLDATLIHQSITGLYETRIDLSQLGGDGGEAAAKGGSGGVLNLEEEYRLHEKPVPSSIDPSWLQLFPTVWAERAGMGLANQVPPVVVELRSGASPVAVRQYPMSKEAREGIRPHIQRFLDLGVLVPCQSPWNTPLLPVKKPGTNDYRPVQDLREINKRVQDIHPTVPNPYNLLSSLPPSHTWYSVLDLKDAFFCLKLHPNSQPLFAFEWRDPEKGNTGQLTWTRLPQGFKNSPTLFNEALHRDLAPFRALNPQVVLLQYVDDLLVAAPTYRDCKEGTQKLLQELSKLGYRVSAKKAQLCQKEVTYLGYLLKEGKRWLTPARKATVMKIPPPTTPRQVREFLGTAGFCRLWIPGFASLAAPLYPLTKPSIPFIWTEEHQKAFDRIKEALLSAPALALPDLTKPFTLYVDERAGVARGVLTQTLGPWRRPVAYLSKKLDPVASGWPTCLKAVAAVALLLKDADKLTLGQNVTVIASHSLESIVRQPPDRWMTNARMTHYQSLLLNERVSFAPPAVLNPATLLPVESEATPVHRCSEILAEETGTRRDLKDQPLPGVPAWYTDGSSFIAEGKRRAGAAIVDGKRTVWASSLPEGTSAQKAELVALTQALRLAEGKDINIYTDSRYAFATAHIHGAIYKQRGWLTSAGKDIKNKEEILALLEAIHLPKRVAIIHCPGHQKGNDPVATGNRRADEAAKQAALSTRVLAETTKPAGKRTADGSEFEKRTADGSEFESPKKKAKVE

SEQ ID NO: 833 - protein, 2093 aa, synthetic construct
MPAAKRVKLDGGDKKYSIGLDIGTNSVGWAVITDEYKVPSKKFKVLGNTDRHSIKKNLIGALLFDSGETAEATRLKRTARRRYTRRKNRICYLQEIFSNEMAKVDDSFFHRLEESFLVEEDKKHERHPIFGNIVDEVAYHEKYPTIYHLRKKLVDSTDKADLRLIYLALAHMIKFRGHFLIEGDLNPDNSDVDKLFIQLVQTYNQLFEENPINASGVDAKAILSARLSKSRRLENLIAQLPGEKKNGLFGNLIALSLGLTPNFKSNFDLAEDAKLQLSKDTYDDDLDNLLAQIGDQYADLFLAAKNLSDAILLSDILRVNTEITKAPLSASMIKRYDEHHQDLTLLKALVRQQLPEKYKEIFFDQSKNGYAGYIDGGASQEEFYKFIKPILEKMDGTEELLVKLNREDLLRKQRTFDNGSIPHQIHLGELHAILRRQEDFYPFLKDNREKIEKILTFRIPYYVGPLARGNSRFAWMTRKSEETITPWNFEEVVDKGASAQSFIERMTNFDKNLPNEKVLPKHSLLYEYFTVYNELTKVKYVTEGMRKPAFLSGEQKKAIVDLLFKTNRKVTVKQLKEDYFKKIECFDSVEISGVEDRFNASLGTYHDLLKIIKDKDFLDNEENEDILEDIVLTLTLFEDREMIEERLKTYAHLFDDKVMKQLKRRRYTGWGRLSRKLINGIRDKQSGKTILDFLKSDGFANRNFMQLIHDDSLTFKEDIQKAQVSGQGDSLHEHIANLAGSPAIKKGILQTVKVVDELVKVMGRHKPENIVIEMARENQTTQKGQKNSRERMKRIEEGIKELGSQILKEHPVENTQLQNEKLYLYYLQNGRDMYVDQELDINRLSDYDVDHIVPQSFLKDDSIDNKVLTRSDKARGKSDNVPSEEVVKKMKNYWRQLLNAKLITQRKFDNLTKAERGGLSELDKAGFIKRQLVETRQITKHVAQILDSRMNTKYDENDKLIREVKVITLKSKLVSDFRKDFQFYKVREINNYHHAHDAYLNAVVGTALIKKYPKLESEFVYGDYKVYDVRKMIAKSEQEIGKATAKYFFYSNIMNFFKTEITLANGEIRKRPLIETNGETGEIVWDKGRDFATVRKVLSMPQVNIVKKTEVQTGGFSKESILPKRNSDKLIARKKDWDPKKYGGFDSPTVAYSVLVVAKVEKGKSKKLKSVKELLGITIMERSSFEKNPIDFLEAKGYKEVKKDLIIKLPKYSLFELENGRKRMLASAGELQKGNELALPSKYVNFLYLASHYEKLKGSPEDNEQKQLFVEQHKHYLDEIIEQISEFSKRVILADANLDKVLSAYNKHRDKPIREQAENIIHLFTLTNLGAPAAFKYFDTTIDRKRYTSTKEVLDATLIHQSITGLYETRIDLSQLGGDGGEAAAKEAAAKGGVLNLEEEYRLHEKPVPSSIDPSWLQLFPTVWAERAGMGLANQVPPVVVELRSGASPVAVRQYPMSKEAREGIRPHIQRFLDLGVLVPCQSPWNTPLLPVKKPGTNDYRPVQDLREINKRVQDIHPTVPNPYNLLSSLPPSHTWYSVLDLKDAFFCLKLHPNSQPLFAFEWRDPEKGNTGQLTWTRLPQGFKNSPTLFNEALHRDLAPFRALNPQVVLLQYVDDLLVAAPTYRDCKEGTQKLLQELSKLGYRVSAKKAQLCQKEVTYLGYLLKEGKRWLTPARKATVMKIPPPTTPRQVREFLGTAGFCRLWIPGFASLAAPLYPLTKPSIPFIWTEEHQKAFDRIKEALLSAPALALPDLTKPFTLYVDERAGVARGVLTQTLGPWRRPVAYLSKKLDPVASGWPTCLKAVAAVALLLKDADKLTLGQNVTVIASHSLESIVRQPPDRWMTNARMTHYQSLLLNERVSFAPPAVLNPATLLPVESEATPVHRCSEILAEETGTRRDLKDQPLPGVPAWYTDGSSFIAEGKRRAGAAIVDGKRTVWASSLPEGTSAQKAELVALTQALRLAEGKDINIYTDSRYAFATAHIHGAIYKQRGWLTSAGKDIKNKEEILALLEAIHLPKRVAIIHCPGHQKGNDPVATGNRRADEAAKQAALSTRVLAETTKPAGKRTADGSEFEKRTADGSEFESPKKKAKVE

SEQ ID NO: 834 - protein, 2094 aa, synthetic construct
MPAAKRVKLDGGDKKYSIGLDIGTNSVGWAVITDEYKVPSKKFKVLGNTDRHSIKKNLIGALLFDSGETAEATRLKRTARRRYTRRKNRICYLQEIFSNEMAKVDDSFFHRLEESFLVEEDKKHERHPIFGNIVDEVAYHEKYPTIYHLRKKLVDSTDKADLRLIYLALAHMIKFRGHFLIEGDLNPDNSDVDKLFIQLVQTYNQLFEENPINASGVDAKAILSARLSKSRRLENLIAQLPGEKKNGLFGNLIALSLGLTPNFKSNFDLAEDAKLQLSKDTYDDDLDNLLAQIGDQYADLFLAAKNLSDAILLSDILRVNTEITKAPLSASMIKRYDEHHQDLTLLKALVRQQLPEKYKEIFFDQSKNGYAGYIDGGASQEEFYKFIKPILEKMDGTEELLVKLNREDLLRKQRTFDNGSIPHQIHLGELHAILRRQEDFYPFLKDNREKIEKILTFRIPYYVGPLARGNSRFAWMTRKSEETITPWNFEEVVDKGASAQSFIERMTNFDKNLPNEKVLPKHSLLYEYFTVYNELTKVKYVTEGMRKPAFLSGEQKKAIVDLLFKTNRKVTVKQLKEDYFKKIECFDSVEISGVEDRFNASLGTYHDLLKIIKDKDFLDNEENEDILEDIVLTLTLFEDREMIEERLKTYAHLFDDKVMKQLKRRRYTGWGRLSRKLINGIRDKQSGKTILDFLKSDGFANRNFMQLIHDDSLTFKEDIQKAQVSGQGDSLHEHIANLAGSPAIKKGILQTVKVVDELVKVMGRHKPENIVIEMARENQTTQKGQKNSRERMKRIEEGIKELGSQILKEHPVENTQLQNEKLYLYYLQNGRDMYVDQELDINRLSDYDVDHIVPQSFLKDDSIDNKVLTRSDKARGKSDNVPSEEVVKKMKNYWRQLLNAKLITQRKFDNLTKAERGGLSELDKAGFIKRQLVETRQITKHVAQILDSRMNTKYDENDKLIREVKVITLKSKLVSDFRKDFQFYKVREINNYHHAHDAYLNAVVGTALIKKYPKLESEFVYGDYKVYDVRKMIAKSEQEIGKATAKYFFYSNIMNFFKTEITLANGEIRKRPLIETNGETGEIVWDKGRDFATVRKVLSMPQVNIVKKTEVQTGGFSKESILPKRNSDKLIARKKDWDPKKYGGFDSPTVAYSVLVVAKVEKGKSKKLKSVKELLGITIMERSSFEKNPIDFLEAKGYKEVKKDLIIKLPKYSLFELENGRKRMLASAGELQKGNELALPSKYVNFLYLASHYEKLKGSPEDNEQKQLFVEQHKHYLDEIIEQISEFSKRVILADANLDKVLSAYNKHRDKPIREQAENIIHLFTLTNLGAPAAFKYFDTTIDRKRYTSTKEVLDATLIHQSITGLYETRIDLSQLGGDGGEAAAKPAPGSSGGVLNLEEEYRLHEKPVPSSIDPSWLQLFPTVWAERAGMGLANQVPPVVVELRSGASPVAVRQYPMSKEAREGIRPHIQRFLDLGVLVPCQSPWNTPLLPVKKPGTNDYRPVQDLREINKRVQDIHPTVPNPYNLLSSLPPSHTWYSVLDLKDAFFCLKLHPNSQPLFAFEWRDPEKGNTGQLTWTRLPQGFKNSPTLFNEALHRDLAPFRALNPQVVLLQYVDDLLVAAPTYRDCKEGTQKLLQELSKLGYRVSAKKAQLCQKEVTYLGYLLKEGKRWLTPARKATVMKIPPPTTPRQVREFLGTAGFCRLWIPGFASLAAPLYPLTKPSIPFIWTEEHQKAFDRIKEALLSAPALALPDLTKPFTLYVDERAGVARGVLTQTLGPWRRPVAYLSKKLDPVASGWPTCLKAVAAVALLLKDADKLTLGQNVTVIASHSLESIVRQPPDRWMTNARMTHYQSLLLNERVSFAPPAVLNPATLLPVESEATPVHRCSEILAEETGTRRDLKDQPLPGVPAWYTDGSSFIAEGKRRAGAAIVDGKRTVWASSLPEGTSAQKAELVALTQALRLAEGKDINIYTDSRYAFATAHIHGAIYKQRGWLTSAGKDIKNKEEILALLEAIHLPKRVAIIHCPGHQKGNDPVATGNRRADEAAKQAALSTRVLAETTKPAGKRTADGSEFEKRTADGSEFESPKKKAKVE

SEQ ID NO: 835 - protein, 2092 aa, synthetic construct
MPAAKRVKLDGGDKKYSIGLDIGTNSVGWAVITDEYKVPSKKFKVLGNTDRHSIKKNLIGALLFDSGETAEATRLKRTARRRYTRRKNRICYLQEIFSNEMAKVDDSFFHRLEESFLVEEDKKHERHPIFGNIVDEVAYHEKYPTIYHLRKKLVDSTDKADLRLIYLALAHMIKFRGHFLIEGDLNPDNSDVDKLFIQLVQTYNQLFEENPINASGVDAKAILSARLSKSRRLENLIAQLPGEKKNGLFGNLIALSLGLTPNFKSNFDLAEDAKLQLSKDTYDDDLDNLLAQIGDQYADLFLAAKNLSDAILLSDILRVNTEITKAPLSASMIKRYDEHHQDLTLLKALVRQQLPEKYKEIFFDQSKNGYAGYIDGGASQEEFYKFIKPILEKMDGTEELLVKLNREDLLRKQRTFDNGSIPHQIHLGELHAILRRQEDFYPFLKDNREKIEKILTFRIPYYVGPLARGNSRFAWMTRKSEETITPWNFEEVVDKGASAQSFIERMTNFDKNLPNEKVLPKHSLLYEYFTVYNELTKVKYVTEGMRKPAFLSGEQKKAIVDLLFKTNRKVTVKQLKEDYFKKIECFDSVEISGVEDRFNASLGTYHDLLKIIKDKDFLDNEENEDILEDIVLTLTLFEDREMIEERLKTYAHLFDDKVMKQLKRRRYTGWGRLSRKLINGIRDKQSGKTILDFLKSDGFANRNFMQLIHDDSLTFKEDIQKAQVSGQGDSLHEHIANLAGSPAIKKGILQTVKVVDELVKVMGRHKPENIVIEMARENQTTQKGQKNSRERMKRIEEGIKELGSQILKEHPVENTQLQNEKLYLYYLQNGRDMYVDQELDINRLSDYDVDHIVPQSFLKDDSIDNKVLTRSDKARGKSDNVPSEEVVKKMKNYWRQLLNAKLITQRKFDNLTKAERGGLSELDKAGFIKRQLVETRQITKHVAQILDSRMNTKYDENDKLIREVKVITLKSKLVSDFRKDFQFYKVREINNYHHAHDAYLNAVVGTALIKKYPKLESEFVYGDYKVYDVRKMIAKSEQEIGKATAKYFFYSNIMNFFKTEITLANGEIRKRPLIETNGETGEIVWDKGRDFATVRKVLSMPQVNIVKKTEVQTGGFSKESILPKRNSDKLIARKKDWDPKKYGGFDSPTVAYSVLVVAKVEKGKSKKLKSVKELLGITIMERSSFEKNPIDFLEAKGYKEVKKDLIIKLPKYSLFELENGRKRMLASAGELQKGNELALPSKYVNFLYLASHYEKLKGSPEDNEQKQLFVEQHKHYLDEIIEQISEFSKRVILADANLDKVLSAYNKHRDKPIREQAENIIHLFTLTNLGAPAAFKYFDTTIDRKRYTSTKEVLDATLIHQSITGLYETRIDLSQLGGDGGGSSGSSGSSGGVLNLEEEYRLHEKPVPSSIDPSWLQLFPTVWAERAGMGLANQVPPVVVELRSGASPVAVRQYPMSKEAREGIRPHIQRFLDLGVLVPCQSPWNTPLLPVKKPGTNDYRPVQDLREINKRVQDIHPTVPNPYNLLSSLPPSHTWYSVLDLKDAFFCLKLHPNSQPLFAFEWRDPEKGNTGQLTWTRLPQGFKNSPTLFNEALHRDLAPFRALNPQVVLLQYVDDLLVAAPTYRDCKEGTQKLLQELSKLGYRVSAKKAQLCQKEVTYLGYLLKEGKRWLTPARKATVMKIPPPTTPRQVREFLGTAGFCRLWIPGFASLAAPLYPLTKPSIPFIWTEEHQKAFDRIKEALLSAPALALPDLTKPFTLYVDERAGVARGVLTQTLGPWRRPVAYLSKKLDPVASGWPTCLKAVAAVALLLKDADKLTLGQNVTVIASHSLESIVRQPPDRWMTNARMTHYQSLLLNERVSFAPPAVLNPATLLPVESEATPVHRCSEILAEETGTRRDLKDQPLPGVPAWYTDGSSFIAEGKRRAGAAIVDGKRTVWASSLPEGTSAQKAELVALTQALRLAEGKDINIYTDSRYAFATAHIHGAIYKQRGWLTSAGKDIKNKEEILALLEAIHLPKRVAIIHCPGHQKGNDPVATGNRRADEAAKQAALSTRVLAETTKPAGKRTADGSEFEKRTADGSEFESPKKKAKVE

SEQ ID NO: 836 - protein, 2091 aa, synthetic construct
MPAAKRVKLDGGDKKYSIGLDIGTNSVGWAVITDEYKVPSKKFKVLGNTDRHSIKKNLIGALLFDSGETAEATRLKRTARRRYTRRKNRICYLQEIFSNEMAKVDDSFFHRLEESFLVEEDKKHERHPIFGNIVDEVAYHEKYPTIYHLRKKLVDSTDKADLRLIYLALAHMIKFRGHFLIEGDLNPDNSDVDKLFIQLVQTYNQLFEENPINASGVDAKAILSARLSKSRRLENLIAQLPGEKKNGLFGNLIALSLGLTPNFKSNFDLAEDAKLQLSKDTYDDDLDNLLAQIGDQYADLFLAAKNLSDAILLSDILRVNTEITKAPLSASMIKRYDEHHQDLTLLKALVRQQLPEKYKEIFFDQSKNGYAGYIDGGASQEEFYKFIKPILEKMDGTEELLVKLNREDLLRKQRTFDNGSIPHQIHLGELHAILRRQEDFYPFLKDNREKIEKILTFRIPYYVGPLARGNSRFAWMTRKSEETITPWNFEEVVDKGASAQSFIERMTNFDKNLPNEKVLPKHSLLYEYFTVYNELTKVKYVTEGMRKPAFLSGEQKKAIVDLLFKTNRKVTVKQLKEDYFKKIECFDSVEISGVEDRFNASLGTYHDLLKIIKDKDFLDNEENEDILEDIVLTLTLFEDREMIEERLKTYAHLFDDKVMKQLKRRRYTGWGRLSRKLINGIRDKQSGKTILDFLKSDGFANRNFMQLIHDDSLTFKEDIQKAQVSGQGDSLHEHIANLAGSPAIKKGILQTVKVVDELVKVMGRHKPENIVIEMARENQTTQKGQKNSRERMKRIEEGIKELGSQILKEHPVENTQLQNEKLYLYYLQNGRDMYVDQELDINRLSDYDVDHIVPQSFLKDDSIDNKVLTRSDKARGKSDNVPSEEVVKKMKNYWRQLLNAKLITQRKFDNLTKAERGGLSELDKAGFIKRQLVETRQITKHVAQILDSRMNTKYDENDKLIREVKVITLKSKLVSDFRKDFQFYKVREINNYHHAHDAYLNAVVGTALIKKYPKLESEFVYGDYKVYDVRKMIAKSEQEIGKATAKYFFYSNIMNFFKTEITLANGEIRKRPLIETNGETGEIVWDKGRDFATVRKVLSMPQVNIVKKTEVQTGGFSKESILPKRNSDKLIARKKDWDPKKYGGFDSPTVAYSVLVVAKVEKGKSKKLKSVKELLGITIMERSSFEKNPIDFLEAKGYKEVKKDLIIKLPKYSLFELENGRKRMLASAGELQKGNELALPSKYVNFLYLASHYEKLKGSPEDNEQKQLFVEQHKHYLDEIIEQISEFSKRVILADANLDKVLSAYNKHRDKPIREQAENIIHLFTLTNLGAPAAFKYFDTTIDRKRYTSTKEVLDATLIHQSITGLYETRIDLSQLGGDGGEAAAKGSSGGVLNLEEEYRLHEKPVPSSIDPSWLQLFPTVWAERAGMGLANQVPPVVVELRSGASPVAVRQYPMSKEAREGIRPHIQRFLDLGVLVPCQSPWNTPLLPVKKPGTNDYRPVQDLREINKRVQDIHPTVPNPYNLLSSLPPSHTWYSVLDLKDAFFCLKLHPNSQPLFAFEWRDPEKGNTGQLTWTRLPQGFKNSPTLFNEALHRDLAPFRALNPQVVLLQYVDDLLVAAPTYRDCKEGTQKLLQELSKLGYRVSAKKAQLCQKEVTYLGYLLKEGKRWLTPARKATVMKIPPPTTPRQVREFLGTAGFCRLWIPGFASLAAPLYPLTKPSIPFIWTEEHQKAFDRIKEALLSAPALALPDLTKPFTLYVDERAGVARGVLTQTLGPWRRPVAYLSKKLDPVASGWPTCLKAVAAVALLLKDADKLTLGQNVTVIASHSLESIVRQPPDRWMTNARMTHYQSLLLNERVSFAPPAVLNPATLLPVESEATPVHRCSEILAEETGTRRDLKDQPLPGVPAWYTDGSSFIAEGKRRAGAAIVDGKRTVWASSLPEGTSAQKAELVALTQALRLAEGKDINIYTDSRYAFATAHIHGAIYKQRGWLTSAGKDIKNKEEILALLEAIHLPKRVAIIHCPGHQKGNDPVATGNRRADEAAKQAALSTRVLAETTKPAGKRTADGSEFEKRTADGSEFESPKKKAKVE

SEQ ID NO: 837 - protein, 2091 aa, synthetic construct
MPAAKRVKLDGGDKKYSIGLDIGTNSVGWAVITDEYKVPSKKFKVLGNTDRHSIKKNLIGALLFDSGETAEATRLKRTARRRYTRRKNRICYLQEIFSNEMAKVDDSFFHRLEESFLVEEDKKHERHPIFGNIVDEVAYHEKYPTIYHLRKKLVDSTDKADLRLIYLALAHMIKFRGHFLIEGDLNPDNSDVDKLFIQLVQTYNQLFEENPINASGVDAKAILSARLSKSRRLENLIAQLPGEKKNGLFGNLIALSLGLTPNFKSNFDLAEDAKLQLSKDTYDDDLDNLLAQIGDQYADLFLAAKNLSDAILLSDILRVNTEITKAPLSASMIKRYDEHHQDLTLLKALVRQQLPEKYKEIFFDQSKNGYAGYIDGGASQEEFYKFIKPILEKMDGTEELLVKLNREDLLRKQRTFDNGSIPHQIHLGELHAILRRQEDFYPFLKDNREKIEKILTFRIPYYVGPLARGNSRFAWMTRKSEETITPWNFEEVVDKGASAQSFIERMTNFDKNLPNEKVLPKHSLLYEYFTVYNELTKVKYVTEGMRKPAFLSGEQKKAIVDLLFKTNRKVTVKQLKEDYFKKIECFDSVEISGVEDRFNASLGTYHDLLKIIKDKDFLDNEENEDILEDIVLTLTLFEDREMIEERLKTYAHLFDDKVMKQLKRRRYTGWGRLSRKLINGIRDKQSGKTILDFLKSDGFANRNFMQLIHDDSLTFKEDIQKAQVSGQGDSLHEHIANLAGSPAIKKGILQTVKVVDELVKVMGRHKPENIVIEMARENQTTQKGQKNSRERMKRIEEGIKELGSQILKEHPVENTQLQNEKLYLYYLQNGRDMYVDQELDINRLSDYDVDHIVPQSFLKDDSIDNKVLTRSDKARGKSDNVPSEEVVKKMKNYWRQLLNAKLITQRKFDNLTKAERGGLSELDKAGFIKRQLVETRQITKHVAQILDSRMNTKYDENDKLIREVKVITLKSKLVSDFRKDFQFYKVREINNYHHAHDAYLNAVVGTALIKKYPKLESEFVYGDYKVYDVRKMIAKSEQEIGKATAKYFFYSNIMNFFKTEITLANGEIRKRPLIETNGETGEIVWDKGRDFATVRKVLSMPQVNIVKKTEVQTGGFSKESILPKRNSDKLIARKKDWDPKKYGGFDSPTVAYSVLVVAKVEKGKSKKLKSVKELLGITIMERSSFEKNPIDFLEAKGYKEVKKDLIIKLPKYSLFELENGRKRMLASAGELQKGNELALPSKYVNFLYLASHYEKLKGSPEDNEQKQLFVEQHKHYLDEIIEQISEFSKRVILADANLDKVLSAYNKHRDKPIREQAENIIHLFTLTNLGAPAAFKYFDTTIDRKRYTSTKEVLDATLIHQSITGLYETRIDLSQLGGDGGGGGEAAAKGGVLNLEEEYRLHEKPVPSSIDPSWLQLFPTVWAERAGMGLANQVPPVVVELRSGASPVAVRQYPMSKEAREGIRPHIQRFLDLGVLVPCQSPWNTPLLPVKKPGTNDYRPVQDLREINKRVQDIHPTVPNPYNLLSSLPPSHTWYSVLDLKDAFFCLKLHPNSQPLFAFEWRDPEKGNTGQLTWTRLPQGFKNSPTLFNEALHRDLAPFRALNPQVVLLQYVDDLLVAAPTYRDCKEGTQKLLQELSKLGYRVSAKKAQLCQKEVTYLGYLLKEGKRWLTPARKATVMKIPPPTTPRQVREFLGTAGFCRLWIPGFASLAAPLYPLTKPSIPFIWTEEHQKAFDRIKEALLSAPALALPDLTKPFTLYVDERAGVARGVLTQTLGPWRRPVAYLSKKLDPVASGWPTCLKAVAAVALLLKDADKLTLGQNVTVIASHSLESIVRQPPDRWMTNARMTHYQSLLLNERVSFAPPAVLNPATLLPVESEATPVHRCSEILAEETGTRRDLKDQPLPGVPAWYTDGSSFIAEGKRRAGAAIVDGKRTVWASSLPEGTSAQKAELVALTQALRLAEGKDINIYTDSRYAFATAHIHGAIYKQRGWLTSAGKDIKNKEEILALLEAIHLPKRVAIIHCPGHQKGNDPVATGNRRADEAAKQAALSTRVLAETTKPAGKRTADGSEFEKRTADGSEFESPKKKAKVE

SEQ ID NO: 838 - protein, 2091 aa, synthetic construct
MPAAKRVKLDGGDKKYSIGLDIGTNSVGWAVITDEYKVPSKKFKVLGNTDRHSIKKNLIGALLFDSGETAEATRLKRTARRRYTRRKNRICYLQEIFSNEMAKVDDSFFHRLEESFLVEEDKKHERHPIFGNIVDEVAYHEKYPTIYHLRKKLVDSTDKADLRLIYLALAHMIKFRGHFLIEGDLNPDNSDVDKLFIQLVQTYNQLFEENPINASGVDAKAILSARLSKSRRLENLIAQLPGEKKNGLFGNLIALSLGLTPNFKSNFDLAEDAKLQLSKDTYDDDLDNLLAQIGDQYADLFLAAKNLSDAILLSDILRVNTEITKAPLSASMIKRYDEHHQDLTLLKALVRQQLPEKYKEIFFDQSKNGYAGYIDGGASQEEFYKFIKPILEKMDGTEELLVKLNREDLLRKQRTFDNGSIPHQIHLGELHAILRRQEDFYPFLKDNREKIEKILTFRIPYYVGPLARGNSRFAWMTRKSEETITPWNFEEVVDKGASAQSFIERMTNFDKNLPNEKVLPKHSLLYEYFTVYNELTKVKYVTEGMRKPAFLSGEQKKAIVDLLFKTNRKVTVKQLKEDYFKKIECFDSVEISGVEDRFNASLGTYHDLLKIIKDKDFLDNEENEDILEDIVLTLTLFEDREMIEERLKTYAHLFDDKVMKQLKRRRYTGWGRLSRKLINGIRDKQSGKTILDFLKSDGFANRNFMQLIHDDSLTFKEDIQKAQVSGQGDSLHEHIANLAGSPAIKKGILQTVKVVDELVKVMGRHKPENIVIEMARENQTTQKGQKNSRERMKRIEEGIKELGSQILKEHPVENTQLQNEKLYLYYLQNGRDMYVDQELDINRLSDYDVDHIVPQSFLKDDSIDNKVLTRSDKARGKSDNVPSEEVVKKMKNYWRQLLNAKLITQRKFDNLTKAERGGLSELDKAGFIKRQLVETRQITKHVAQILDSRMNTKYDENDKLIREVKVITLKSKLVSDFRKDFQFYKVREINNYHHAHDAYLNAVVGTALIKKYPKLESEFVYGDYKVYDVRKMIAKSEQEIGKATAKYFFYSNIMNFFKTEITLANGEIRKRPLIETNGETGEIVWDKGRDFATVRKVLSMPQVNIVKKTEVQTGGFSKESILPKRNSDKLIARKKDWDPKKYGGFDSPTVAYSVLVVAKVEKGKSKKLKSVKELLGITIMERSSFEKNPIDFLEAKGYKEVKKDLIIKLPKYSLFELENGRKRMLASAGELQKGNELALPSKYVNFLYLASHYEKLKGSPEDNEQKQLFVEQHKHYLDEIIEQISEFSKRVILADANLDKVLSAYNKHRDKPIREQAENIIHLFTLTNLGAPAAFKYFDTTIDRKRYTSTKEVLDATLIHQSITGLYETRIDLSQLGGDGGGSSEAAAKGGVLNLEEEYRLHEKPVPSSIDPSWLQLFPTVWAERAGMGLANQVPPVVVELRSGASPVAVRQYPMSKEAREGIRPHIQRFLDLGVLVPCQSPWNTPLLPVKKPGTNDYRPVQDLREINKRVQDIHPTVPNPYNLLSSLPPSHTWYSVLDLKDAFFCLKLHPNSQPLFAFEWRDPEKGNTGQLTWTRLPQGFKNSPTLFNEALHRDLAPFRALNPQVVLLQYVDDLLVAAPTYRDCKEGTQKLLQELSKLGYRVSAKKAQLCQKEVTYLGYLLKEGKRWLTPARKATVMKIPPPTTPRQVREFLGTAGFCRLWIPGFASLAAPLYPLTKPSIPFIWTEEHQKAFDRIKEALLSAPALALPDLTKPFTLYVDERAGVARGVLTQTLGPWRRPVAYLSKKLDPVASGWPTCLKAVAAVALLLKDADKLTLGQNVTVIASHSLESIVRQPPDRWMTNARMTHYQSLLLNERVSFAPPAVLNPATLLPVESEATPVHRCSEILAEETGTRRDLKDQPLPGVPAWYTDGSSFIAEGKRRAGAAIVDGKRTVWASSLPEGTSAQKAELVALTQALRLAEGKDINIYTDSRYAFATAHIHGAIYKQRGWLTSAGKDIKNKEEILALLEAIHLPKRVAIIHCPGHQKGNDPVATGNRRADEAAKQAALSTRVLAETTKPAGKRTADGSEFEKRTADGSEFESPKKKAKVE

SEQ ID NO: 839 - protein, 2094 aa, synthetic construct
MPAAKRVKLDGGDKKYSIGLDIGTNSVGWAVITDEYKVPSKKFKVLGNTDRHSIKKNLIGALLFDSGETAEATRLKRTARRRYTRRKNRICYLQEIFSNEMAKVDDSFFHRLEESFLVEEDKKHERHPIFGNIVDEVAYHEKYPTIYHLRKKLVDSTDKADLRLIYLALAHMIKFRGHFLIEGDLNPDNSDVDKLFIQLVQTYNQLFEENPINASGVDAKAILSARLSKSRRLENLIAQLPGEKKNGLFGNLIALSLGLTPNFKSNFDLAEDAKLQLSKDTYDDDLDNLLAQIGDQYADLFLAAKNLSDAILLSDILRVNTEITKAPLSASMIKRYDEHHQDLTLLKALVRQQLPEKYKEIFFDQSKNGYAGYIDGGASQEEFYKFIKPILEKMDGTEELLVKLNREDLLRKQRTFDNGSIPHQIHLGELHAILRRQEDFYPFLKDNREKIEKILTFRIPYYVGPLARGNSRFAWMTRKSEETITPWNFEEVVDKGASAQSFIERMTNFDKNLPNEKVLPKHSLLYEYFTVYNELTKVKYVTEGMRKPAFLSGEQKKAIVDLLFKTNRKVTVKQLKEDYFKKIECFDSVEISGVEDRFNASLGTYHDLLKIIKDKDFLDNEENEDILEDIVLTLTLFEDREMIEERLKTYAHLFDDKVMKQLKRRRYTGWGRLSRKLINGIRDKQSGKTILDFLKSDGFANRNFMQLIHDDSLTFKEDIQKAQVSGQGDSLHEHIANLAGSPAIKKGILQTVKVVDELVKVMGRHKPENIVIEMARENQTTQKGQKNSRERMKRIEEGIKELGSQILKEHPVENTQLQNEKLYLYYLQNGRDMYVDQELDINRLSDYDVDHIVPQSFLKDDSIDNKVLTRSDKARGKSDNVPSEEVVKKMKNYWRQLLNAKLITQRKFDNLTKAERGGLSELDKAGFIKRQLVETRQITKHVAQILDSRMNTKYDENDKLIREVKVITLKSKLVSDFRKDFQFYKVREINNYHHAHDAYLNAVVGTALIKKYPKLESEFVYGDYKVYDVRKMIAKSEQEIGKATAKYFFYSNIMNFFKTEITLANGEIRKRPLIETNGETGEIVWDKGRDFATVRKVLSMPQVNIVKKTEVQTGGFSKESILPKRNSDKLIARKKDWDPKKYGGFDSPTVAYSVLVVAKVEKGKSKKLKSVKELLGITIMERSSFEKNPIDFLEAKGYKEVKKDLIIKLPKYSLFELENGRKRMLASAGELQKGNELALPSKYVNFLYLASHYEKLKGSPEDNEQKQLFVEQHKHYLDEIIEQISEFSKRVILADANLDKVLSAYNKHRDKPIREQAENIIHLFTLTNLGAPAAFKYFDTTIDRKRYTSTKEVLDATLIHQSITGLYETRIDLSQLGGDGGGSSPAPEAAAKGGVLNLEEEYRLHEKPVPSSIDPSWLQLFPTVWAERAGMGLANQVPPVVVELRSGASPVAVRQYPMSKEAREGIRPHIQRFLDLGVLVPCQSPWNTPLLPVKKPGTNDYRPVQDLREINKRVQDIHPTVPNPYNLLSSLPPSHTWYSVLDLKDAFFCLKLHPNSQPLFAFEWRDPEKGNTGQLTWTRLPQGFKNSPTLFNEALHRDLAPFRALNPQVVLLQYVDDLLVAAPTYRDCKEGTQKLLQELSKLGYRVSAKKAQLCQKEVTYLGYLLKEGKRWLTPARKATVMKIPPPTTPRQVREFLGTAGFCRLWIPGFASLAAPLYPLTKPSIPFIWTEEHQKAFDRIKEALLSAPALALPDLTKPFTLYVDERAGVARGVLTQTLGPWRRPVAYLSKKLDPVASGWPTCLKAVAAVALLLKDADKLTLGQNVTVIASHSLESIVRQPPDRWMTNARMTHYQSLLLNERVSFAPPAVLNPATLLPVESEATPVHRCSEILAEETGTRRDLKDQPLPGVPAWYTDGSSFIAEGKRRAGAAIVDGKRTVWASSLPEGTSAQKAELVALTQALRLAEGKDINIYTDSRYAFATAHIHGAIYKQRGWLTSAGKDIKNKEEILALLEAIHLPKRVAIIHCPGHQKGNDPVATGNRRADEAAKQAALSTRVLAETTKPAGKRTADGSEFEKRTADGSEFESPKKKAKVE

SEQ ID NO: 840 - protein, 2092 aa, synthetic construct
MPAAKRVKLDGGDKKYSIGLDIGTNSVGWAVITDEYKVPSKKFKVLGNTDRHSIKKNLIGALLFDSGETAEATRLKRTARRRYTRRKNRICYLQEIFSNEMAKVDDSFFHRLEESFLVEEDKKHERHPIFGNIVDEVAYHEKYPTIYHLRKKLVDSTDKADLRLIYLALAHMIKFRGHFLIEGDLNPDNSDVDKLFIQLVQTYNQLFEENPINASGVDAKAILSARLSKSRRLENLIAQLPGEKKNGLFGNLIALSLGLTPNFKSNFDLAEDAKLQLSKDTYDDDLDNLLAQIGDQYADLFLAAKNLSDAILLSDILRVNTEITKAPLSASMIKRYDEHHQDLTLLKALVRQQLPEKYKEIFFDQSKNGYAGYIDGGASQEEFYKFIKPILEKMDGTEELLVKLNREDLLRKQRTFDNGSIPHQIHLGELHAILRRQEDFYPFLKDNREKIEKILTFRIPYYVGPLARGNSRFAWMTRKSEETITPWNFEEVVDKGASAQSFIERMTNFDKNLPNEKVLPKHSLLYEYFTVYNELTKVKYVTEGMRKPAFLSGEQKKAIVDLLFKTNRKVTVKQLKEDYFKKIECFDSVEISGVEDRFNASLGTYHDLLKIIKDKDFLDNEENEDILEDIVLTLTLFEDREMIEERLKTYAHLFDDKVMKQLKRRRYTGWGRLSRKLINGIRDKQSGKTILDFLKSDGFANRNFMQLIHDDSLTFKEDIQKAQVSGQGDSLHEHIANLAGSPAIKKGILQTVKVVDELVKVMGRHKPENIVIEMARENQTTQKGQKNSRERMKRIEEGIKELGSQILKEHPVENTQLQNEKLYLYYLQNGRDMYVDQELDINRLSDYDVDHIVPQSFLKDDSIDNKVLTRSDKARGKSDNVPSEEVVKKMKNYWRQLLNAKLITQRKFDNLTKAERGGLSELDKAGFIKRQLVETRQITKHVAQILDSRMNTKYDENDKLIREVKVITLKSKLVSDFRKDFQFYKVREINNYHHAHDAYLNAVVGTALIKKYPKLESEFVYGDYKVYDVRKMIAKSEQEIGKATAKYFFYSNIMNFFKTEITLANGEIRKRPLIETNGETGEIVWDKGRDFATVRKVLSMPQVNIVKKTEVQTGGFSKESILPKRNSDKLIARKKDWDPKKYGGFDSPTVAYSVLVVAKVEKGKSKKLKSVKELLGITIMERSSFEKNPIDFLEAKGYKEVKKDLIIKLPKYSLFELENGRKRMLASAGELQKGNELALPSKYVNFLYLASHYEKLKGSPEDNEQKQLFVEQHKHYLDEIIEQISEFSKRVILADANLDKVLSAYNKHRDKPIREQAENIIHLFTLTNLGAPAAFKYFDTTIDRKRYTSTKEVLDATLIHQSITGLYETRIDLSQLGGDGGGSSPAPGGSGGVLNLEEEYRLHEKPVPSSIDPSWLQLFPTVWAERAGMGLANQVPPVVVELRSGASPVAVRQYPMSKEAREGIRPHIQRFLDLGVLVPCQSPWNTPLLPVKKPGTNDYRPVQDLREINKRVQDIHPTVPNPYNLLSSLPPSHTWYSVLDLKDAFFCLKLHPNSQPLFAFEWRDPEKGNTGQLTWTRLPQGFKNSPTLFNEALHRDLAPFRALNPQVVLLQYVDDLLVAAPTYRDCKEGTQKLLQELSKLGYRVSAKKAQLCQKEVTYLGYLLKEGKRWLTPARKATVMKIPPPTTPRQVREFLGTAGFCRLWIPGFASLAAPLYPLTKPSIPFIWTEEHQKAFDRIKEALLSAPALALPDLTKPFTLYVDERAGVARGVLTQTLGPWRRPVAYLSKKLDPVASGWPTCLKAVAAVALLLKDADKLTLGQNVTVIASHSLESIVRQPPDRWMTNARMTHYQSLLLNERVSFAPPAVLNPATLLPVESEATPVHRCSEILAEETGTRRDLKDQPLPGVPAWYTDGSSFIAEGKRRAGAAIVDGKRTVWASSLPEGTSAQKAELVALTQALRLAEGKDINIYTDSRYAFATAHIHGAIYKQRGWLTSAGKDIKNKEEILALLEAIHLPKRVAIIHCPGHQKGNDPVATGNRRADEAAKQAALSTRVLAETTKPAGKRTADGSEFEKRTADGSEFESPKKKAKVE

SEQ ID NO: 841 - protein, 2094 aa, synthetic construct
MPAAKRVKLDGGDKKYSIGLDIGTNSVGWAVITDEYKVPSKKFKVLGNTDRHSIKKNLIGALLFDSGETAEATRLKRTARRRYTRRKNRICYLQEIFSNEMAKVDDSFFHRLEESFLVEEDKKHERHPIFGNIVDEVAYHEKYPTIYHLRKKLVDSTDKADLRLIYLALAHMIKFRGHFLIEGDLNPDNSDVDKLFIQLVQTYNQLFEENPINASGVDAKAILSARLSKSRRLENLIAQLPGEKKNGLFGNLIALSLGLTPNFKSNFDLAEDAKLQLSKDTYDDDLDNLLAQIGDQYADLFLAAKNLSDAILLSDILRVNTEITKAPLSASMIKRYDEHHQDLTLLKALVRQQLPEKYKEIFFDQSKNGYAGYIDGGASQEEFYKFIKPILEKMDGTEELLVKLNREDLLRKQRTFDNGSIPHQIHLGELHAILRRQEDFYPFLKDNREKIEKILTFRIPYYVGPLARGNSRFAWMTRKSEETITPWNFEEVVDKGASAQSFIERMTNFDKNLPNEKVLPKHSLLYEYFTVYNELTKVKYVTEGMRKPAFLSGEQKKAIVDLLFKTNRKVTVKQLKEDYFKKIECFDSVEISGVEDRFNASLGTYHDLLKIIKDKDFLDNEENEDILEDIVLTLTLFEDREMIEERLKTYAHLFDDKVMKQLKRRRYTGWGRLSRKLINGIRDKQSGKTILDFLKSDGFANRNFMQLIHDDSLTFKEDIQKAQVSGQGDSLHEHIANLAGSPAIKKGILQTVKVVDELVKVMGRHKPENIVIEMARENQTTQKGQKNSRERMKRIEEGIKELGSQILKEHPVENTQLQNEKLYLYYLQNGRDMYVDQELDINRLSDYDVDHIVPQSFLKDDSIDNKVLTRSDKARGKSDNVPSEEVVKKMKNYWRQLLNAKLITQRKFDNLTKAERGGLSELDKAGFIKRQLVETRQITKHVAQILDSRMNTKYDENDKLIREVKVITLKSKLVSDFRKDFQFYKVREINNYHHAHDAYLNAVVGTALIKKYPKLESEFVYGDYKVYDVRKMIAKSEQEIGKATAKYFFYSNIMNFFKTEITLANGEIRKRPLIETNGETGEIVWDKGRDFATVRKVLSMPQVNIVKKTEVQTGGFSKESILPKRNSDKLIARKKDWDPKKYGGFDSPTVAYSVLVVAKVEKGKSKKLKSVKELLGITIMERSSFEKNPIDFLEAKGYKEVKKDLIIKLPKYSLFELENGRKRMLASAGELQKGNELALPSKYVNFLYLASHYEKLKGSPEDNEQKQLFVEQHKHYLDEIIEQISEFSKRVILADANLDKVLSAYNKHRDKPIREQAENIIHLFTLTNLGAPAAFKYFDTTIDRKRYTSTKEVLDATLIHQSITGLYETRIDLSQLGGDGGGGGEAAAKGGSGGVLNLEEEYRLHEKPVPSSIDPSWLQLFPTVWAERAGMGLANQVPPVVVELRSGASPVAVRQYPMSKEAREGIRPHIQRFLDLGVLVPCQSPWNTPLLPVKKPGTNDYRPVQDLREINKRVQDIHPTVPNPYNLLSSLPPSHTWYSVLDLKDAFFCLKLHPNSQPLFAFEWRDPEKGNTGQLTWTRLPQGFKNSPTLFNEALHRDLAPFRALNPQVVLLQYVDDLLVAAPTYRDCKEGTQKLLQELSKLGYRVSAKKAQLCQKEVTYLGYLLKEGKRWLTPARKATVMKIPPPTTPRQVREFLGTAGFCRLWIPGFASLAAPLYPLTKPSIPFIWTEEHQKAFDRIKEALLSAPALALPDLTKPFTLYVDERAGVARGVLTQTLGPWRRPVAYLSKKLDPVASGWPTCLKAVAAVALLLKDADKLTLGQNVTVIASHSLESIVRQPPDRWMTNARMTHYQSLLLNERVSFAPPAVLNPATLLPVESEATPVHRCSEILAEETGTRRDLKDQPLPGVPAWYTDGSSFIAEGKRRAGAAIVDGKRTVWASSLPEGTSAQKAELVALTQALRLAEGKDINIYTDSRYAFATAHIHGAIYKQRGWLTSAGKDIKNKEEILALLEAIHLPKRVAIIHCPGHQKGNDPVATGNRRADEAAKQAALSTRVLAETTKPAGKRTADGSEFEKRTADGSEFESPKKKAKVE

SEQ ID NO: 842 - protein, 2091 aa, synthetic construct
MPAAKRVKLDGGDKKYSIGLDIGTNSVGWAVITDEYKVPSKKFKVLGNTDRHSIKKNLIGALLFDSGETAEATRLKRTARRRYTRRKNRICYLQEIFSNEMAKVDDSFFHRLEESFLVEEDKKHERHPIFGNIVDEVAYHEKYPTIYHLRKKLVDSTDKADLRLIYLALAHMIKFRGHFLIEGDLNPDNSDVDKLFIQLVQTYNQLFEENPINASGVDAKAILSARLSKSRRLENLIAQLPGEKKNGLFGNLIALSLGLTPNFKSNFDLAEDAKLQLSKDTYDDDLDNLLAQIGDQYADLFLAAKNLSDAILLSDILRVNTEITKAPLSASMIKRYDEHHQDLTLLKALVRQQLPEKYKEIFFDQSKNGYAGYIDGGASQEEFYKFIKPILEKMDGTEELLVKLNREDLLRKQRTFDNGSIPHQIHLGELHAILRRQEDFYPFLKDNREKIEKILTFRIPYYVGPLARGNSRFAWMTRKSEETITPWNFEEVVDKGASAQSFIERMTNFDKNLPNEKVLPKHSLLYEYFTVYNELTKVKYVTEGMRKPAFLSGEQKKAIVDLLFKTNRKVTVKQLKEDYFKKIECFDSVEISGVEDRFNASLGTYHDLLKIIKDKDFLDNEENEDILEDIVLTLTLFEDREMIEERLKTYAHLFDDKVMKQLKRRRYTGWGRLSRKLINGIRDKQSGKTILDFLKSDGFANRNFMQLIHDDSLTFKEDIQKAQVSGQGDSLHEHIANLAGSPAIKKGILQTVKVVDELVKVMGRHKPENIVIEMARENQTTQKGQKNSRERMKRIEEGIKELGSQILKEHPVENTQLQNEKLYLYYLQNGRDMYVDQELDINRLSDYDVDHIVPQSFLKDDSIDNKVLTRSDKARGKSDNVPSEEVVKKMKNYWRQLLNAKLITQRKFDNLTKAERGGLSELDKAGFIKRQLVETRQITKHVAQILDSRMNTKYDENDKLIREVKVITLKSKLVSDFRKDFQFYKVREINNYHHAHDAYLNAVVGTALIKKYPKLESEFVYGDYKVYDVRKMIAKSEQEIGKATAKYFFYSNIMNFFKTEITLANGEIRKRPLIETNGETGEIVWDKGRDFATVRKVLSMPQVNIVKKTEVQTGGFSKESILPKRNSDKLIARKKDWDPKKYGGFDSPTVAYSVLVVAKVEKGKSKKLKSVKELLGITIMERSSFEKNPIDFLEAKGYKEVKKDLIIKLPKYSLFELENGRKRMLASAGELQKGNELALPSKYVNFLYLASHYEKLKGSPEDNEQKQLFVEQHKHYLDEIIEQISEFSKRVILADANLDKVLSAYNKHRDKPIREQAENIIHLFTLTNLGAPAAFKYFDTTIDRKRYTSTKEVLDATLIHQSITGLYETRIDLSQLGGDGGGGGGGGGGGGVLNLEEEYRLHEKPVPSSIDPSWLQLFPTVWAERAGMGLANQVPPVVVELRSGASPVAVRQYPMSKEAREGIRPHIQRFLDLGVLVPCQSPWNTPLLPVKKPGTNDYRPVQDLREINKRVQDIHPTVPNPYNLLSSLPPSHTWYSVLDLKDAFFCLKLHPNSQPLFAFEWRDPEKGNTGQLTWTRLPQGFKNSPTLFNEALHRDLAPFRALNPQVVLLQYVDDLLVAAPTYRDCKEGTQKLLQELSKLGYRVSAKKAQLCQKEVTYLGYLLKEGKRWLTPARKATVMKIPPPTTPRQVREFLGTAGFCRLWIPGFASLAAPLYPLTKPSIPFIWTEEHQKAFDRIKEALLSAPALALPDLTKPFTLYVDERAGVARGVLTQTLGPWRRPVAYLSKKLDPVASGWPTCLKAVAAVALLLKDADKLTLGQNVTVIASHSLESIVRQPPDRWMTNARMTHYQSLLLNERVSFAPPAVLNPATLLPVESEATPVHRCSEILAEETGTRRDLKDQPLPGVPAWYTDGSSFIAEGKRRAGAAIVDGKRTVWASSLPEGTSAQKAELVALTQALRLAEGKDINIYTDSRYAFATAHIHGAIYKQRGWLTSAGKDIKNKEEILALLEAIHLPKRVAIIHCPGHQKGNDPVATGNRRADEAAKQAALSTRVLAETTKPAGKRTADGSEFEKRTADGSEFESPKKKAKVE

SEQ ID NO: 843 - protein, 2103 aa, synthetic construct
MPAAKRVKLDGGDKKYSIGLDIGTNSVGWAVITDEYKVPSKKFKVLGNTDRHSIKKNLIGALLFDSGETAEATRLKRTARRRYTRRKNRICYLQEIFSNEMAKVDDSFFHRLEESFLVEEDKKHERHPIFGNIVDEVAYHEKYPTIYHLRKKLVDSTDKADLRLIYLALAHMIKFRGHFLIEGDLNPDNSDVDKLFIQLVQTYNQLFEENPINASGVDAKAILSARLSKSRRLENLIAQLPGEKKNGLFGNLIALSLGLTPNFKSNFDLAEDAKLQLSKDTYDDDLDNLLAQIGDQYADLFLAAKNLSDAILLSDILRVNTEITKAPLSASMIKRYDEHHQDLTLLKALVRQQLPEKYKEIFFDQSKNGYAGYIDGGASQEEFYKFIKPILEKMDGTEELLVKLNREDLLRKQRTFDNGSIPHQIHLGELHAILRRQEDFYPFLKDNREKIEKILTFRIPYYVGPLARGNSRFAWMTRKSEETITPWNFEEVVDKGASAQSFIERMTNFDKNLPNEKVLPKHSLLYEYFTVYNELTKVKYVTEGMRKPAFLSGEQKKAIVDLLFKTNRKVTVKQLKEDYFKKIECFDSVEISGVEDRFNASLGTYHDLLKIIKDKDFLDNEENEDILEDIVLTLTLFEDREMIEERLKTYAHLFDDKVMKQLKRRRYTGWGRLSRKLINGIRDKQSGKTILDFLKSDGFANRNFMQLIHDDSLTFKEDIQKAQVSGQGDSLHEHIANLAGSPAIKKGILQTVKVVDELVKVMGRHKPENIVIEMARENQTTQKGQKNSRERMKRIEEGIKELGSQILKEHPVENTQLQNEKLYLYYLQNGRDMYVDQELDINRLSDYDVDHIVPQSFLKDDSIDNKVLTRSDKARGKSDNVPSEEVVKKMKNYWRQLLNAKLITQRKFDNLTKAERGGLSELDKAGFIKRQLVETRQITKHVAQILDSRMNTKYDENDKLIREVKVITLKSKLVSDFRKDFQFYKVREINNYHHAHDAYLNAVVGTALIKKYPKLESEFVYGDYKVYDVRKMIAKSEQEIGKATAKYFFYSNIMNFFKTEITLANGEIRKRPLIETNGETGEIVWDKGRDFATVRKVLSMPQVNIVKKTEVQTGGFSKESILPKRNSDKLIARKKDWDPKKYGGFDSPTVAYSVLVVAKVEKGKSKKLKSVKELLGITIMERSSFEKNPIDFLEAKGYKEVKKDLIIKLPKYSLFELENGRKRMLASAGELQKGNELALPSKYVNFLYLASHYEKLKGSPEDNEQKQLFVEQHKHYLDEIIEQISEFSKRVILADANLDKVLSAYNKHRDKPIREQAENIIHLFTLTNLGAPAAFKYFDTTIDRKRYTSTKEVLDATLIHQSITGLYETRIDLSQLGGDGGGGGGSGGGGSGGGGSGGGGSGGVLNLEEEYRLHEKPVPSSIDPSWLQLFPTVWAERAGMGLANQVPPVVVELRSGASPVAVRQYPMSKEAREGIRPHIQRFLDLGVLVPCQSPWNTPLLPVKKPGTNDYRPVQDLREINKRVQDIHPTVPNPYNLLSSLPPSHTWYSVLDLKDAFFCLKLHPNSQPLFAFEWRDPEKGNTGQLTWTRLPQGFKNSPTLFNEALHRDLAPFRALNPQVVLLQYVDDLLVAAPTYRDCKEGTQKLLQELSKLGYRVSAKKAQLCQKEVTYLGYLLKEGKRWLTPARKATVMKIPPPTTPRQVREFLGTAGFCRLWIPGFASLAAPLYPLTKPSIPFIWTEEHQKAFDRIKEALLSAPALALPDLTKPFTLYVDERAGVARGVLTQTLGPWRRPVAYLSKKLDPVASGWPTCLKAVAAVALLLKDADKLTLGQNVTVIASHSLESIVRQPPDRWMTNARMTHYQSLLLNERVSFAPPAVLNPATLLPVESEATPVHRCSEILAEETGTRRDLKDQPLPGVPAWYTDGSSFIAEGKRRAGAAIVDGKRTVWASSLPEGTSAQKAELVALTQALRLAEGKDINIYTDSRYAFATAHIHGAIYKQRGWLTSAGKDIKNKEEILALLEAIHLPKRVAIIHCPGHQKGNDPVATGNRRADEAAKQAALSTRVLAETTKPAGKRTADGSEFEKRTADGSEFESPKKKAKVE

SEQ ID NO: 844 - protein, 2094 aa, synthetic construct
MPAAKRVKLDGGDKKYSIGLDIGTNSVGWAVITDEYKVPSKKFKVLGNTDRHSIKKNLIGALLFDSGETAEATRLKRTARRRYTRRKNRICYLQEIFSNEMAKVDDSFFHRLEESFLVEEDKKHERHPIFGNIVDEVAYHEKYPTIYHLRKKLVDSTDKADLRLIYLALAHMIKFRGHFLIEGDLNPDNSDVDKLFIQLVQTYNQLFEENPINASGVDAKAILSARLSKSRRLENLIAQLPGEKKNGLFGNLIALSLGLTPNFKSNFDLAEDAKLQLSKDTYDDDLDNLLAQIGDQYADLFLAAKNLSDAILLSDILRVNTEITKAPLSASMIKRYDEHHQDLTLLKALVRQQLPEKYKEIFFDQSKNGYAGYIDGGASQEEFYKFIKPILEKMDGTEELLVKLNREDLLRKQRTFDNGSIPHQIHLGELHAILRRQEDFYPFLKDNREKIEKILTFRIPYYVGPLARGNSRFAWMTRKSEETITPWNFEEVVDKGASAQSFIERMTNFDKNLPNEKVLPKHSLLYEYFTVYNELTKVKYVTEGMRKPAFLSGEQKKAIVDLLFKTNRKVTVKQLKEDYFKKIECFDSVEISGVEDRFNASLGTYHDLLKIIKDKDFLDNEENEDILEDIVLTLTLFEDREMIEERLKTYAHLFDDKVMKQLKRRRYTGWGRLSRKLINGIRDKQSGKTILDFLKSDGFANRNFMQLIHDDSLTFKEDIQKAQVSGQGDSLHEHIANLAGSPAIKKGILQTVKVVDELVKVMGRHKPENIVIEMARENQTTQKGQKNSRERMKRIEEGIKELGSQILKEHPVENTQLQNEKLYLYYLQNGRDMYVDQELDINRLSDYDVDHIVPQSFLKDDSIDNKVLTRSDKARGKSDNVPSEEVVKKMKNYWRQLLNAKLITQRKFDNLTKAERGGLSELDKAGFIKRQLVETRQITKHVAQILDSRMNTKYDENDKLIREVKVITLKSKLVSDFRKDFQFYKVREINNYHHAHDAYLNAVVGTALIKKYPKLESEFVYGDYKVYDVRKMIAKSEQEIGKATAKYFFYSNIMNFFKTEITLANGEIRKRPLIETNGETGEIVWDKGRDFATVRKVLSMPQVNIVKKTEVQTGGFSKESILPKRNSDKLIARKKDWDPKKYGGFDSPTVAYSVLVVAKVEKGKSKKLKSVKELLGITIMERSSFEKNPIDFLEAKGYKEVKKDLIIKLPKYSLFELENGRKRMLASAGELQKGNELALPSKYVNFLYLASHYEKLKGSPEDNEQKQLFVEQHKHYLDEIIEQISEFSKRVILADANLDKVLSAYNKHRDKPIREQAENIIHLFTLTNLGAPAAFKYFDTTIDRKRYTSTKEVLDATLIHQSITGLYETRIDLSQLGGDGGGGSEAAAKPAPGGVLNLEEEYRLHEKPVPSSIDPSWLQLFPTVWAERAGMGLANQVPPVVVELRSGASPVAVRQYPMSKEAREGIRPHIQRFLDLGVLVPCQSPWNTPLLPVKKPGTNDYRPVQDLREINKRVQDIHPTVPNPYNLLSSLPPSHTWYSVLDLKDAFFCLKLHPNSQPLFAFEWRDPEKGNTGQLTWTRLPQGFKNSPTLFNEALHRDLAPFRALNPQVVLLQYVDDLLVAAPTYRDCKEGTQKLLQELSKLGYRVSAKKAQLCQKEVTYLGYLLKEGKRWLTPARKATVMKIPPPTTPRQVREFLGTAGFCRLWIPGFASLAAPLYPLTKPSIPFIWTEEHQKAFDRIKEALLSAPALALPDLTKPFTLYVDERAGVARGVLTQTLGPWRRPVAYLSKKLDPVASGWPTCLKAVAAVALLLKDADKLTLGQNVTVIASHSLESIVRQPPDRWMTNARMTHYQSLLLNERVSFAPPAVLNPATLLPVESEATPVHRCSEILAEETGTRRDLKDQPLPGVPAWYTDGSSFIAEGKRRAGAAIVDGKRTVWASSLPEGTSAQKAELVALTQALRLAEGKDINIYTDSRYAFATAHIHGAIYKQRGWLTSAGKDIKNKEEILALLEAIHLPKRVAIIHCPGHQKGNDPVATGNRRADEAAKQAALSTRVLAETTKPAGKRTADGSEFEKRTADGSEFESPKKKAKVE

SEQ ID NO: 845 - protein, 2092 aa, synthetic construct
MPAAKRVKLDGGDKKYSIGLDIGTNSVGWAVITDEYKVPSKKFKVLGNTDRHSIKKNLIGALLFDSGETAEATRLKRTARRRYTRRKNRICYLQEIFSNEMAKVDDSFFHRLEESFLVEEDKKHERHPIFGNIVDEVAYHEKYPTIYHLRKKLVDSTDKADLRLIYLALAHMIKFRGHFLIEGDLNPDNSDVDKLFIQLVQTYNQLFEENPINASGVDAKAILSARLSKSRRLENLIAQLPGEKKNGLFGNLIALSLGLTPNFKSNFDLAEDAKLQLSKDTYDDDLDNLLAQIGDQYADLFLAAKNLSDAILLSDILRVNTEITKAPLSASMIKRYDEHHQDLTLLKALVRQQLPEKYKEIFFDQSKNGYAGYIDGGASQEEFYKFIKPILEKMDGTEELLVKLNREDLLRKQRTFDNGSIPHQIHLGELHAILRRQEDFYPFLKDNREKIEKILTFRIPYYVGPLARGNSRFAWMTRKSEETITPWNFEEVVDKGASAQSFIERMTNFDKNLPNEKVLPKHSLLYEYFTVYNELTKVKYVTEGMRKPAFLSGEQKKAIVDLLFKTNRKVTVKQLKEDYFKKIECFDSVEISGVEDRFNASLGTYHDLLKIIKDKDFLDNEENEDILEDIVLTLTLFEDREMIEERLKTYAHLFDDKVMKQLKRRRYTGWGRLSRKLINGIRDKQSGKTILDFLKSDGFANRNFMQLIHDDSLTFKEDIQKAQVSGQGDSLHEHIANLAGSPAIKKGILQTVKVVDELVKVMGRHKPENIVIEMARENQTTQKGQKNSRERMKRIEEGIKELGSQILKEHPVENTQLQNEKLYLYYLQNGRDMYVDQELDINRLSDYDVDHIVPQSFLKDDSIDNKVLTRSDKARGKSDNVPSEEVVKKMKNYWRQLLNAKLITQRKFDNLTKAERGGLSELDKAGFIKRQLVETRQITKHVAQILDSRMNTKYDENDKLIREVKVITLKSKLVSDFRKDFQFYKVREINNYHHAHDAYLNAVVGTALIKKYPKLESEFVYGDYKVYDVRKMIAKSEQEIGKATAKYFFYSNIMNFFKTEITLANGEIRKRPLIETNGETGEIVWDKGRDFATVRKVLSMPQVNIVKKTEVQTGGFSKESILPKRNSDKLIARKKDWDPKKYGGFDSPTVAYSVLVVAKVEKGKSKKLKSVKELLGITIMERSSFEKNPIDFLEAKGYKEVKKDLIIKLPKYSLFELENGRKRMLASAGELQKGNELALPSKYVNFLYLASHYEKLKGSPEDNEQKQLFVEQHKHYLDEIIEQISEFSKRVILADANLDKVLSAYNKHRDKPIREQAENIIHLFTLTNLGAPAAFKYFDTTIDRKRYTSTKEVLDATLIHQSITGLYETRIDLSQLGGDGGGSSPAPGGGGGVLNLEEEYRLHEKPVPSSIDPSWLQLFPTVWAERAGMGLANQVPPVVVELRSGASPVAVRQYPMSKEAREGIRPHIQRFLDLGVLVPCQSPWNTPLLPVKKPGTNDYRPVQDLREINKRVQDIHPTVPNPYNLLSSLPPSHTWYSVLDLKDAFFCLKLHPNSQPLFAFEWRDPEKGNTGQLTWTRLPQGFKNSPTLFNEALHRDLAPFRALNPQVVLLQYVDDLLVAAPTYRDCKEGTQKLLQELSKLGYRVSAKKAQLCQKEVTYLGYLLKEGKRWLTPARKATVMKIPPPTTPRQVREFLGTAGFCRLWIPGFASLAAPLYPLTKPSIPFIWTEEHQKAFDRIKEALLSAPALALPDLTKPFTLYVDERAGVARGVLTQTLGPWRRPVAYLSKKLDPVASGWPTCLKAVAAVALLLKDADKLTLGQNVTVIASHSLESIVRQPPDRWMTNARMTHYQSLLLNERVSFAPPAVLNPATLLPVESEATPVHRCSEILAEETGTRRDLKDQPLPGVPAWYTDGSSFIAEGKRRAGAAIVDGKRTVWASSLPEGTSAQKAELVALTQALRLAEGKDINIYTDSRYAFATAHIHGAIYKQRGWLTSAGKDIKNKEEILALLEAIHLPKRVAIIHCPGHQKGNDPVATGNRRADEAAKQAALSTRVLAETTKPAGKRTADGSEFEKRTADGSEFESPKKKAKVE

SEQ ID NO: 846 - protein, 2095 aa, synthetic construct
MPAAKRVKLDGGDKKYSIGLDIGTNSVGWAVITDEYKVPSKKFKVLGNTDRHSIKKNLIGALLFDSGETAEATRLKRTARRRYTRRKNRICYLQEIFSNEMAKVDDSFFHRLEESFLVEEDKKHERHPIFGNIVDEVAYHEKYPTIYHLRKKLVDSTDKADLRLIYLALAHMIKFRGHFLIEGDLNPDNSDVDKLFIQLVQTYNQLFEENPINASGVDAKAILSARLSKSRRLENLIAQLPGEKKNGLFGNLIALSLGLTPNFKSNFDLAEDAKLQLSKDTYDDDLDNLLAQIGDQYADLFLAAKNLSDAILLSDILRVNTEITKAPLSASMIKRYDEHHQDLTLLKALVRQQLPEKYKEIFFDQSKNGYAGYIDGGASQEEFYKFIKPILEKMDGTEELLVKLNREDLLRKQRTFDNGSIPHQIHLGELHAILRRQEDFYPFLKDNREKIEKILTFRIPYYVGPLARGNSRFAWMTRKSEETITPWNFEEVVDKGASAQSFIERMTNFDKNLPNEKVLPKHSLLYEYFTVYNELTKVKYVTEGMRKPAFLSGEQKKAIVDLLFKTNRKVTVKQLKEDYFKKIECFDSVEISGVEDRFNASLGTYHDLLKIIKDKDFLDNEENEDILEDIVLTLTLFEDREMIEERLKTYAHLFDDKVMKQLKRRRYTGWGRLSRKLINGIRDKQSGKTILDFLKSDGFANRNFMQLIHDDSLTFKEDIQKAQVSGQGDSLHEHIANLAGSPAIKKGILQTVKVVDELVKVMGRHKPENIVIEMARENQTTQKGQKNSRERMKRIEEGIKELGSQILKEHPVENTQLQNEKLYLYYLQNGRDMYVDQELDINRLSDYDVDHIVPQSFLKDDSIDNKVLTRSDKARGKSDNVPSEEVVKKMKNYWRQLLNAKLITQRKFDNLTKAERGGLSELDKAGFIKRQLVETRQITKHVAQILDSRMNTKYDENDKLIREVKVITLKSKLVSDFRKDFQFYKVREINNYHHAHDAYLNAVVGTALIKKYPKLESEFVYGDYKVYDVRKMIAKSEQEIGKATAKYFFYSNIMNFFKTEITLANGEIRKRPLIETNGETGEIVWDKGRDFATVRKVLSMPQVNIVKKTEVQTGGFSKESILPKRNSDKLIARKKDWDPKKYGGFDSPTVAYSVLVVAKVEKGKSKKLKSVKELLGITIMERSSFEKNPIDFLEAKGYKEVKKDLIIKLPKYSLFELENGRKRMLASAGELQKGNELALPSKYVNFLYLASHYEKLKGSPEDNEQKQLFVEQHKHYLDEIIEQISEFSKRVILADANLDKVLSAYNKHRDKPIREQAENIIHLFTLTNLGAPAAFKYFDTTIDRKRYTSTKEVLDATLIHQSITGLYETRIDLSQLGGDGGGSSGSSGSSGSSGGVLNLEEEYRLHEKPVPSSIDPSWLQLFPTVWAERAGMGLANQVPPVVVELRSGASPVAVRQYPMSKEAREGIRPHIQRFLDLGVLVPCQSPWNTPLLPVKKPGTNDYRPVQDLREINKRVQDIHPTVPNPYNLLSSLPPSHTWYSVLDLKDAFFCLKLHPNSQPLFAFEWRDPEKGNTGQLTWTRLPQGFKNSPTLFNEALHRDLAPFRALNPQVVLLQYVDDLLVAAPTYRDCKEGTQKLLQELSKLGYRVSAKKAQLCQKEVTYLGYLLKEGKRWLTPARKATVMKIPPPTTPRQVREFLGTAGFCRLWIPGFASLAAPLYPLTKPSIPFIWTEEHQKAFDRIKEALLSAPALALPDLTKPFTLYVDERAGVARGVLTQTLGPWRRPVAYLSKKLDPVASGWPTCLKAVAAVALLLKDADKLTLGQNVTVIASHSLESIVRQPPDRWMTNARMTHYQSLLLNERVSFAPPAVLNPATLLPVESEATPVHRCSEILAEETGTRRDLKDQPLPGVPAWYTDGSSFIAEGKRRAGAAIVDGKRTVWASSLPEGTSAQKAELVALTQALRLAEGKDINIYTDSRYAFATAHIHGAIYKQRGWLTSAGKDIKNKEEILALLEAIHLPKRVAIIHCPGHQKGNDPVATGNRRADEAAKQAALSTRVLAETTKPAGKRTADGSEFEKRTADGSEFESPKKKAKVE

SEQ ID NO: 847 - protein, 2094 aa, synthetic construct
MPAAKRVKLDGGDKKYSIGLDIGTNSVGWAVITDEYKVPSKKFKVLGNTDRHSIKKNLIGALLFDSGETAEATRLKRTARRRYTRRKNRICYLQEIFSNEMAKVDDSFFHRLEESFLVEEDKKHERHPIFGNIVDEVAYHEKYPTIYHLRKKLVDSTDKADLRLIYLALAHMIKFRGHFLIEGDLNPDNSDVDKLFIQLVQTYNQLFEENPINASGVDAKAILSARLSKSRRLENLIAQLPGEKKNGLFGNLIALSLGLTPNFKSNFDLAEDAKLQLSKDTYDDDLDNLLAQIGDQYADLFLAAKNLSDAILLSDILRVNTEITKAPLSASMIKRYDEHHQDLTLLKALVRQQLPEKYKEIFFDQSKNGYAGYIDGGASQEEFYKFIKPILEKMDGTEELLVKLNREDLLRKQRTFDNGSIPHQIHLGELHAILRRQEDFYPFLKDNREKIEKILTFRIPYYVGPLARGNSRFAWMTRKSEETITPWNFEEVVDKGASAQSFIERMTNFDKNLPNEKVLPKHSLLYEYFTVYNELTKVKYVTEGMRKPAFLSGEQKKAIVDLLFKTNRKVTVKQLKEDYFKKIECFDSVEISGVEDRFNASLGTYHDLLKIIKDKDFLDNEENEDILEDIVLTLTLFEDREMIEERLKTYAHLFDDKVMKQLKRRRYTGWGRLSRKLINGIRDKQSGKTILDFLKSDGFANRNFMQLIHDDSLTFKEDIQKAQVSGQGDSLHEHIANLAGSPAIKKGILQTVKVVDELVKVMGRHKPENIVIEMARENQTTQKGQKNSRERMKRIEEGIKELGSQILKEHPVENTQLQNEKLYLYYLQNGRDMYVDQELDINRLSDYDVDHIVPQSFLKDDSIDNKVLTRSDKARGKSDNVPSEEVVKKMKNYWRQLLNAKLITQRKFDNLTKAERGGLSELDKAGFIKRQLVETRQITKHVAQILDSRMNTKYDENDKLIREVKVITLKSKLVSDFRKDFQFYKVREINNYHHAHDAYLNAVVGTALIKKYPKLESEFVYGDYKVYDVRKMIAKSEQEIGKATAKYFFYSNIMNFFKTEITLANGEIRKRPLIETNGETGEIVWDKGRDFATVRKVLSMPQVNIVKKTEVQTGGFSKESILPKRNSDKLIARKKDWDPKKYGGFDSPTVAYSVLVVAKVEKGKSKKLKSVKELLGITIMERSSFEKNPIDFLEAKGYKEVKKDLIIKLPKYSLFELENGRKRMLASAGELQKGNELALPSKYVNFLYLASHYEKLKGSPEDNEQKQLFVEQHKHYLDEIIEQISEFSKRVILADANLDKVLSAYNKHRDKPIREQAENIIHLFTLTNLGAPAAFKYFDTTIDRKRYTSTKEVLDATLIHQSITGLYETRIDLSQLGGDGGPAPGGSEAAAKGGVLNLEEEYRLHEKPVPSSIDPSWLQLFPTVWAERAGMGLANQVPPVVVELRSGASPVAVRQYPMSKEAREGIRPHIQRFLDLGVLVPCQSPWNTPLLPVKKPGTNDYRPVQDLREINKRVQDIHPTVPNPYNLLSSLPPSHTWYSVLDLKDAFFCLKLHPNSQPLFAFEWRDPEKGNTGQLTWTRLPQGFKNSPTLFNEALHRDLAPFRALNPQVVLLQYVDDLLVAAPTYRDCKEGTQKLLQELSKLGYRVSAKKAQLCQKEVTYLGYLLKEGKRWLTPARKATVMKIPPPTTPRQVREFLGTAGFCRLWIPGFASLAAPLYPLTKPSIPFIWTEEHQKAFDRIKEALLSAPALALPDLTKPFTLYVDERAGVARGVLTQTLGPWRRPVAYLSKKLDPVASGWPTCLKAVAAVALLLKDADKLTLGQNVTVIASHSLESIVRQPPDRWMTNARMTHYQSLLLNERVSFAPPAVLNPATLLPVESEATPVHRCSEILAEETGTRRDLKDQPLPGVPAWYTDGSSFIAEGKRRAGAAIVDGKRTVWASSLPEGTSAQKAELVALTQALRLAEGKDINIYTDSRYAFATAHIHGAIYKQRGWLTSAGKDIKNKEEILALLEAIHLPKRVAIIHCPGHQKGNDPVATGNRRADEAAKQAALSTRVLAETTKPAGKRTADGSEFEKRTADGSEFESPKKKAKVE

SEQ ID NO: 848 - protein, 2088 aa, synthetic construct
MPAAKRVKLDGGDKKYSIGLDIGTNSVGWAVITDEYKVPSKKFKVLGNTDRHSIKKNLIGALLFDSGETAEATRLKRTARRRYTRRKNRICYLQEIFSNEMAKVDDSFFHRLEESFLVEEDKKHERHPIFGNIVDEVAYHEKYPTIYHLRKKLVDSTDKADLRLIYLALAHMIKFRGHFLIEGDLNPDNSDVDKLFIQLVQTYNQLFEENPINASGVDAKAILSARLSKSRRLENLIAQLPGEKKNGLFGNLIALSLGLTPNFKSNFDLAEDAKLQLSKDTYDDDLDNLLAQIGDQYADLFLAAKNLSDAILLSDILRVNTEITKAPLSASMIKRYDEHHQDLTLLKALVRQQLPEKYKEIFFDQSKNGYAGYIDGGASQEEFYKFIKPILEKMDGTEELLVKLNREDLLRKQRTFDNGSIPHQIHLGELHAILRRQEDFYPFLKDNREKIEKILTFRIPYYVGPLARGNSRFAWMTRKSEETITPWNFEEVVDKGASAQSFIERMTNFDKNLPNEKVLPKHSLLYEYFTVYNELTKVKYVTEGMRKPAFLSGEQKKAIVDLLFKTNRKVTVKQLKEDYFKKIECFDSVEISGVEDRFNASLGTYHDLLKIIKDKDFLDNEENEDILEDIVLTLTLFEDREMIEERLKTYAHLFDDKVMKQLKRRRYTGWGRLSRKLINGIRDKQSGKTILDFLKSDGFANRNFMQLIHDDSLTFKEDIQKAQVSGQGDSLHEHIANLAGSPAIKKGILQTVKVVDELVKVMGRHKPENIVIEMARENQTTQKGQKNSRERMKRIEEGIKELGSQILKEHPVENTQLQNEKLYLYYLQNGRDMYVDQELDINRLSDYDVDHIVPQSFLKDDSIDNKVLTRSDKARGKSDNVPSEEVVKKMKNYWRQLLNAKLITQRKFDNLTKAERGGLSELDKAGFIKRQLVETRQITKHVAQILDSRMNTKYDENDKLIREVKVITLKSKLVSDFRKDFQFYKVREINNYHHAHDAYLNAVVGTALIKKYPKLESEFVYGDYKVYDVRKMIAKSEQEIGKATAKYFFYSNIMNFFKTEITLANGEIRKRPLIETNGETGEIVWDKGRDFATVRKVLSMPQVNIVKKTEVQTGGFSKESILPKRNSDKLIARKKDWDPKKYGGFDSPTVAYSVLVVAKVEKGKSKKLKSVKELLGITIMERSSFEKNPIDFLEAKGYKEVKKDLIIKLPKYSLFELENGRKRMLASAGELQKGNELALPSKYVNFLYLASHYEKLKGSPEDNEQKQLFVEQHKHYLDEIIEQISEFSKRVILADANLDKVLSAYNKHRDKPIREQAENIIHLFTLTNLGAPAAFKYFDTTIDRKRYTSTKEVLDATLIHQSITGLYETRIDLSQLGGDGGPAPAPGGVLNLEEEYRLHEKPVPSSIDPSWLQLFPTVWAERAGMGLANQVPPVVVELRSGASPVAVRQYPMSKEAREGIRPHIQRFLDLGVLVPCQSPWNTPLLPVKKPGTNDYRPVQDLREINKRVQDIHPTVPNPYNLLSSLPPSHTWYSVLDLKDAFFCLKLHPNSQPLFAFEWRDPEKGNTGQLTWTRLPQGFKNSPTLFNEALHRDLAPFRALNPQVVLLQYVDDLLVAAPTYRDCKEGTQKLLQELSKLGYRVSAKKAQLCQKEVTYLGYLLKEGKRWLTPARKATVMKIPPPTTPRQVREFLGTAGFCRLWIPGFASLAAPLYPLTKPSIPFIWTEEHQKAFDRIKEALLSAPALALPDLTKPFTLYVDERAGVARGVLTQTLGPWRRPVAYLSKKLDPVASGWPTCLKAVAAVALLLKDADKLTLGQNVTVIASHSLESIVRQPPDRWMTNARMTHYQSLLLNERVSFAPPAVLNPATLLPVESEATPVHRCSEILAEETGTRRDLKDQPLPGVPAWYTDGSSFIAEGKRRAGAAIVDGKRTVWASSLPEGTSAQKAELVALTQALRLAEGKDINIYTDSRYAFATAHIHGAIYKQRGWLTSAGKDIKNKEEILALLEAIHLPKRVAIIHCPGHQKGNDPVATGNRRADEAAKQAALSTRVLAETTKPAGKRTADGSEFEKRTADGSEFESPKKKAKVE

SEQ ID NO: 849 - protein, 2092 aa, synthetic construct
MPAAKRVKLDGGDKKYSIGLDIGTNSVGWAVITDEYKVPSKKFKVLGNTDRHSIKKNLIGALLFDSGETAEATRLKRTARRRYTRRKNRICYLQEIFSNEMAKVDDSFFHRLEESFLVEEDKKHERHPIFGNIVDEVAYHEKYPTIYHLRKKLVDSTDKADLRLIYLALAHMIKFRGHFLIEGDLNPDNSDVDKLFIQLVQTYNQLFEENPINASGVDAKAILSARLSKSRRLENLIAQLPGEKKNGLFGNLIALSLGLTPNFKSNFDLAEDAKLQLSKDTYDDDLDNLLAQIGDQYADLFLAAKNLSDAILLSDILRVNTEITKAPLSASMIKRYDEHHQDLTLLKALVRQQLPEKYKEIFFDQSKNGYAGYIDGGASQEEFYKFIKPILEKMDGTEELLVKLNREDLLRKQRTFDNGSIPHQIHLGELHAILRRQEDFYPFLKDNREKIEKILTFRIPYYVGPLARGNSRFAWMTRKSEETITPWNFEEVVDKGASAQSFIERMTNFDKNLPNEKVLPKHSLLYEYFTVYNELTKVKYVTEGMRKPAFLSGEQKKAIVDLLFKTNRKVTVKQLKEDYFKKIECFDSVEISGVEDRFNASLGTYHDLLKIIKDKDFLDNEENEDILEDIVLTLTLFEDREMIEERLKTYAHLFDDKVMKQLKRRRYTGWGRLSRKLINGIRDKQSGKTILDFLKSDGFANRNFMQLIHDDSLTFKEDIQKAQVSGQGDSLHEHIANLAGSPAIKKGILQTVKVVDELVKVMGRHKPENIVIEMARENQTTQKGQKNSRERMKRIEEGIKELGSQILKEHPVENTQLQNEKLYLYYLQNGRDMYVDQELDINRLSDYDVDHIVPQSFLKDDSIDNKVLTRSDKARGKSDNVPSEEVVKKMKNYWRQLLNAKLITQRKFDNLTKAERGGLSELDKAGFIKRQLVETRQITKHVAQILDSRMNTKYDENDKLIREVKVITLKSKLVSDFRKDFQFYKVREINNYHHAHDAYLNAVVGTALIKKYPKLESEFVYGDYKVYDVRKMIAKSEQEIGKATAKYFFYSNIMNFFKTEITLANGEIRKRPLIETNGETGEIVWDKGRDFATVRKVLSMPQVNIVKKTEVQTGGFSKESILPKRNSDKLIARKKDWDPKKYGGFDSPTVAYSVLVVAKVEKGKSKKLKSVKELLGITIMERSSFEKNPIDFLEAKGYKEVKKDLIIKLPKYSLFELENGRKRMLASAGELQKGNELALPSKYVNFLYLASHYEKLKGSPEDNEQKQLFVEQHKHYLDEIIEQISEFSKRVILADANLDKVLSAYNKHRDKPIREQAENIIHLFTLTNLGAPAAFKYFDTTIDRKRYTSTKEVLDATLIHQSITGLYETRIDLSQLGGDGGGSSGGGGGSGGVLNLEEEYRLHEKPVPSSIDPSWLQLFPTVWAERAGMGLANQVPPVVVELRSGASPVAVRQYPMSKEAREGIRPHIQRFLDLGVLVPCQSPWNTPLLPVKKPGTNDYRPVQDLREINKRVQDIHPTVPNPYNLLSSLPPSHTWYSVLDLKDAFFCLKLHPNSQPLFAFEWRDPEKGNTGQLTWTRLPQGFKNSPTLFNEALHRDLAPFRALNPQVVLLQYVDDLLVAAPTYRDCKEGTQKLLQELSKLGYRVSAKKAQLCQKEVTYLGYLLKEGKRWLTPARKATVMKIPPPTTPRQVREFLGTAGFCRLWIPGFASLAAPLYPLTKPSIPFIWTEEHQKAFDRIKEALLSAPALALPDLTKPFTLYVDERAGVARGVLTQTLGPWRRPVAYLSKKLDPVASGWPTCLKAVAAVALLLKDADKLTLGQNVTVIASHSLESIVRQPPDRWMTNARMTHYQSLLLNERVSFAPPAVLNPATLLPVESEATPVHRCSEILAEETGTRRDLKDQPLPGVPAWYTDGSSFIAEGKRRAGAAIVDGKRTVWASSLPEGTSAQKAELVALTQALRLAEGKDINIYTDSRYAFATAHIHGAIYKQRGWLTSAGKDIKNKEEILALLEAIHLPKRVAIIHCPGHQKGNDPVATGNRRADEAAKQAALSTRVLAETTKPAGKRTADGSEFEKRTADGSEFESPKKKAKVE

SEQ ID NO: 850 - protein, 2092 aa, synthetic construct
MPAAKRVKLDGGDKKYSIGLDIGTNSVGWAVITDEYKVPSKKFKVLGNTDRHSIKKNLIGALLFDSGETAEATRLKRTARRRYTRRKNRICYLQEIFSNEMAKVDDSFFHRLEESFLVEEDKKHERHPIFGNIVDEVAYHEKYPTIYHLRKKLVDSTDKADLRLIYLALAHMIKFRGHFLIEGDLNPDNSDVDKLFIQLVQTYNQLFEENPINASGVDAKAILSARLSKSRRLENLIAQLPGEKKNGLFGNLIALSLGLTPNFKSNFDLAEDAKLQLSKDTYDDDLDNLLAQIGDQYADLFLAAKNLSDAILLSDILRVNTEITKAPLSASMIKRYDEHHQDLTLLKALVRQQLPEKYKEIFFDQSKNGYAGYIDGGASQEEFYKFIKPILEKMDGTEELLVKLNREDLLRKQRTFDNGSIPHQIHLGELHAILRRQEDFYPFLKDNREKIEKILTFRIPYYVGPLARGNSRFAWMTRKSEETITPWNFEEVVDKGASAQSFIERMTNFDKNLPNEKVLPKHSLLYEYFTVYNELTKVKYVTEGMRKPAFLSGEQKKAIVDLLFKTNRKVTVKQLKEDYFKKIECFDSVEISGVEDRFNASLGTYHDLLKIIKDKDFLDNEENEDILEDIVLTLTLFEDREMIEERLKTYAHLFDDKVMKQLKRRRYTGWGRLSRKLINGIRDKQSGKTILDFLKSDGFANRNFMQLIHDDSLTFKEDIQKAQVSGQGDSLHEHIANLAGSPAIKKGILQTVKVVDELVKVMGRHKPENIVIEMARENQTTQKGQKNSRERMKRIEEGIKELGSQILKEHPVENTQLQNEKLYLYYLQNGRDMYVDQELDINRLSDYDVDHIVPQSFLKDDSIDNKVLTRSDKARGKSDNVPSEEVVKKMKNYWRQLLNAKLITQRKFDNLTKAERGGLSELDKAGFIKRQLVETRQITKHVAQILDSRMNTKYDENDKLIREVKVITLKSKLVSDFRKDFQFYKVREINNYHHAHDAYLNAVVGTALIKKYPKLESEFVYGDYKVYDVRKMIAKSEQEIGKATAKYFFYSNIMNFFKTEITLANGEIRKRPLIETNGETGEIVWDKGRDFATVRKVLSMPQVNIVKKTEVQTGGFSKESILPKRNSDKLIARKKDWDPKKYGGFDSPTVAYSVLVVAKVEKGKSKKLKSVKELLGITIMERSSFEKNPIDFLEAKGYKEVKKDLIIKLPKYSLFELENGRKRMLASAGELQKGNELALPSKYVNFLYLASHYEKLKGSPEDNEQKQLFVEQHKHYLDEIIEQISEFSKRVILADANLDKVLSAYNKHRDKPIREQAENIIHLFTLTNLGAPAAFKYFDTTIDRKRYTSTKEVLDATLIHQSITGLYETRIDLSQLGGDGGGGSGGSGGSGGVLNLEEEYRLHEKPVPSSIDPSWLQLFPTVWAERAGMGLANQVPPVVVELRSGASPVAVRQYPMSKEAREGIRPHIQRFLDLGVLVPCQSPWNTPLLPVKKPGTNDYRPVQDLREINKRVQDIHPTVPNPYNLLSSLPPSHTWYSVLDLKDAFFCLKLHPNSQPLFAFEWRDPEKGNTGQLTWTRLPQGFKNSPTLFNEALHRDLAPFRALNPQVVLLQYVDDLLVAAPTYRDCKEGTQKLLQELSKLGYRVSAKKAQLCQKEVTYLGYLLKEGKRWLTPARKATVMKIPPPTTPRQVREFLGTAGFCRLWIPGFASLAAPLYPLTKPSIPFIWTEEHQKAFDRIKEALLSAPALALPDLTKPFTLYVDERAGVARGVLTQTLGPWRRPVAYLSKKLDPVASGWPTCLKAVAAVALLLKDADKLTLGQNVTVIASHSLESIVRQPPDRWMTNARMTHYQSLLLNERVSFAPPAVLNPATLLPVESEATPVHRCSEILAEETGTRRDLKDQPLPGVPAWYTDGSSFIAEGKRRAGAAIVDGKRTVWASSLPEGTSAQKAELVALTQALRLAEGKDINIYTDSRYAFATAHIHGAIYKQRGWLTSAGKDIKNKEEILALLEAIHLPKRVAIIHCPGHQKGNDPVATGNRRADEAAKQAALSTRVLAETTKPAGKRTADGSEFEKRTADGSEFESPKKKAKVE

SEQ ID NO: 851 - protein, 2086 aa, synthetic construct
MPAAKRVKLDGGDKKYSIGLDIGTNSVGWAVITDEYKVPSKKFKVLGNTDRHSIKKNLIGALLFDSGETAEATRLKRTARRRYTRRKNRICYLQEIFSNEMAKVDDSFFHRLEESFLVEEDKKHERHPIFGNIVDEVAYHEKYPTIYHLRKKLVDSTDKADLRLIYLALAHMIKFRGHFLIEGDLNPDNSDVDKLFIQLVQTYNQLFEENPINASGVDAKAILSARLSKSRRLENLIAQLPGEKKNGLFGNLIALSLGLTPNFKSNFDLAEDAKLQLSKDTYDDDLDNLLAQIGDQYADLFLAAKNLSDAILLSDILRVNTEITKAPLSASMIKRYDEHHQDLTLLKALVRQQLPEKYKEIFFDQSKNGYAGYIDGGASQEEFYKFIKPILEKMDGTEELLVKLNREDLLRKQRTFDNGSIPHQIHLGELHAILRRQEDFYPFLKDNREKIEKILTFRIPYYVGPLARGNSRFAWMTRKSEETITPWNFEEVVDKGASAQSFIERMTNFDKNLPNEKVLPKHSLLYEYFTVYNELTKVKYVTEGMRKPAFLSGEQKKAIVDLLFKTNRKVTVKQLKEDYFKKIECFDSVEISGVEDRFNASLGTYHDLLKIIKDKDFLDNEENEDILEDIVLTLTLFEDREMIEERLKTYAHLFDDKVMKQLKRRRYTGWGRLSRKLINGIRDKQSGKTILDFLKSDGFANRNFMQLIHDDSLTFKEDIQKAQVSGQGDSLHEHIANLAGSPAIKKGILQTVKVVDELVKVMGRHKPENIVIEMARENQTTQKGQKNSRERMKRIEEGIKELGSQILKEHPVENTQLQNEKLYLYYLQNGRDMYVDQELDINRLSDYDVDHIVPQSFLKDDSIDNKVLTRSDKARGKSDNVPSEEVVKKMKNYWRQLLNAKLITQRKFDNLTKAERGGLSELDKAGFIKRQLVETRQITKHVAQILDSRMNTKYDENDKLIREVKVITLKSKLVSDFRKDFQFYKVREINNYHHAHDAYLNAVVGTALIKKYPKLESEFVYGDYKVYDVRKMIAKSEQEIGKATAKYFFYSNIMNFFKTEITLANGEIRKRPLIETNGETGEIVWDKGRDFATVRKVLSMPQVNIVKKTEVQTGGFSKESILPKRNSDKLIARKKDWDPKKYGGFDSPTVAYSVLVVAKVEKGKSKKLKSVKELLGITIMERSSFEKNPIDFLEAKGYKEVKKDLIIKLPKYSLFELENGRKRMLASAGELQKGNELALPSKYVNFLYLASHYEKLKGSPEDNEQKQLFVEQHKHYLDEIIEQISEFSKRVILADANLDKVLSAYNKHRDKPIREQAENIIHLFTLTNLGAPAAFKYFDTTIDRKRYTSTKEVLDATLIHQSITGLYETRIDLSQLGGDGGGGSGGVLNLEEEYRLHEKPVPSSIDPSWLQLFPTVWAERAGMGLANQVPPVVVELRSGASPVAVRQYPMSKEAREGIRPHIQRFLDLGVLVPCQSPWNTPLLPVKKPGTNDYRPVQDLREINKRVQDIHPTVPNPYNLLSSLPPSHTWYSVLDLKDAFFCLKLHPNSQPLFAFEWRDPEKGNTGQLTWTRLPQGFKNSPTLFNEALHRDLAPFRALNPQVVLLQYVDDLLVAAPTYRDCKEGTQKLLQELSKLGYRVSAKKAQLCQKEVTYLGYLLKEGKRWLTPARKATVMKIPPPTTPRQVREFLGTAGFCRLWIPGFASLAAPLYPLTKPSIPFIWTEEHQKAFDRIKEALLSAPALALPDLTKPFTLYVDERAGVARGVLTQTLGPWRRPVAYLSKKLDPVASGWPTCLKAVAAVALLLKDADKLTLGQNVTVIASHSLESIVRQPPDRWMTNARMTHYQSLLLNERVSFAPPAVLNPATLLPVESEATPVHRCSEILAEETGTRRDLKDQPLPGVPAWYTDGSSFIAEGKRRAGAAIVDGKRTVWASSLPEGTSAQKAELVALTQALRLAEGKDINIYTDSRYAFATAHIHGAIYKQRGWLTSAGKDIKNKEEILALLEAIHLPKRVAIIHCPGHQKGNDPVATGNRRADEAAKQAALSTRVLAETTKPAGKRTADGSEFEKRTADGSEFESPKKKAKVE

SEQ ID NO: 852 - protein, 2091 aa, synthetic construct
MPAAKRVKLDGGDKKYSIGLDIGTNSVGWAVITDEYKVPSKKFKVLGNTDRHSIKKNLIGALLFDSGETAEATRLKRTARRRYTRRKNRICYLQEIFSNEMAKVDDSFFHRLEESFLVEEDKKHERHPIFGNIVDEVAYHEKYPTIYHLRKKLVDSTDKADLRLIYLALAHMIKFRGHFLIEGDLNPDNSDVDKLFIQLVQTYNQLFEENPINASGVDAKAILSARLSKSRRLENLIAQLPGEKKNGLFGNLIALSLGLTPNFKSNFDLAEDAKLQLSKDTYDDDLDNLLAQIGDQYADLFLAAKNLSDAILLSDILRVNTEITKAPLSASMIKRYDEHHQDLTLLKALVRQQLPEKYKEIFFDQSKNGYAGYIDGGASQEEFYKFIKPILEKMDGTEELLVKLNREDLLRKQRTFDNGSIPHQIHLGELHAILRRQEDFYPFLKDNREKIEKILTFRIPYYVGPLARGNSRFAWMTRKSEETITPWNFEEVVDKGASAQSFIERMTNFDKNLPNEKVLPKHSLLYEYFTVYNELTKVKYVTEGMRKPAFLSGEQKKAIVDLLFKTNRKVTVKQLKEDYFKKIECFDSVEISGVEDRFNASLGTYHDLLKIIKDKDFLDNEENEDILEDIVLTLTLFEDREMIEERLKTYAHLFDDKVMKQLKRRRYTGWGRLSRKLINGIRDKQSGKTILDFLKSDGFANRNFMQLIHDDSLTFKEDIQKAQVSGQGDSLHEHIANLAGSPAIKKGILQTVKVVDELVKVMGRHKPENIVIEMARENQTTQKGQKNSRERMKRIEEGIKELGSQILKEHPVENTQLQNEKLYLYYLQNGRDMYVDQELDINRLSDYDVDHIVPQSFLKDDSIDNKVLTRSDKARGKSDNVPSEEVVKKMKNYWRQLLNAKLITQRKFDNLTKAERGGLSELDKAGFIKRQLVETRQITKHVAQILDSRMNTKYDENDKLIREVKVITLKSKLVSDFRKDFQFYKVREINNYHHAHDAYLNAVVGTALIKKYPKLESEFVYGDYKVYDVRKMIAKSEQEIGKATAKYFFYSNIMNFFKTEITLANGEIRKRPLIETNGETGEIVWDKGRDFATVRKVLSMPQVNIVKKTEVQTGGFSKESILPKRNSDKLIARKKDWDPKKYGGFDSPTVAYSVLVVAKVEKGKSKKLKSVKELLGITIMERSSFEKNPIDFLEAKGYKEVKKDLIIKLPKYSLFELENGRKRMLASAGELQKGNELALPSKYVNFLYLASHYEKLKGSPEDNEQKQLFVEQHKHYLDEIIEQISEFSKRVILADANLDKVLSAYNKHRDKPIREQAENIIHLFTLTNLGAPAAFKYFDTTIDRKRYTSTKEVLDATLIHQSITGLYETRIDLSQLGGDGGGGSEAAAKGGVLNLEEEYRLHEKPVPSSIDPSWLQLFPTVWAERAGMGLANQVPPVVVELRSGASPVAVRQYPMSKEAREGIRPHIQRFLDLGVLVPCQSPWNTPLLPVKKPGTNDYRPVQDLREINKRVQDIHPTVPNPYNLLSSLPPSHTWYSVLDLKDAFFCLKLHPNSQPLFAFEWRDPEKGNTGQLTWTRLPQGFKNSPTLFNEALHRDLAPFRALNPQVVLLQYVDDLLVAAPTYRDCKEGTQKLLQELSKLGYRVSAKKAQLCQKEVTYLGYLLKEGKRWLTPARKATVMKIPPPTTPRQVREFLGTAGFCRLWIPGFASLAAPLYPLTKPSIPFIWTEEHQKAFDRIKEALLSAPALALPDLTKPFTLYVDERAGVARGVLTQTLGPWRRPVAYLSKKLDPVASGWPTCLKAVAAVALLLKDADKLTLGQNVTVIASHSLESIVRQPPDRWMTNARMTHYQSLLLNERVSFAPPAVLNPATLLPVESEATPVHRCSEILAEETGTRRDLKDQPLPGVPAWYTDGSSFIAEGKRRAGAAIVDGKRTVWASSLPEGTSAQKAELVALTQALRLAEGKDINIYTDSRYAFATAHIHGAIYKQRGWLTSAGKDIKNKEEILALLEAIHLPKRVAIIHCPGHQKGNDPVATGNRRADEAAKQAALSTRVLAETTKPAGKRTADGSEFEKRTADGSEFESPKKKAKVE

SEQ ID NO: 853 - protein, 2094 aa, synthetic construct
MPAAKRVKLDGGDKKYSIGLDIGTNSVGWAVITDEYKVPSKKFKVLGNTDRHSIKKNLIGALLFDSGETAEATRLKRTARRRYTRRKNRICYLQEIFSNEMAKVDDSFFHRLEESFLVEEDKKHERHPIFGNIVDEVAYHEKYPTIYHLRKKLVDSTDKADLRLIYLALAHMIKFRGHFLIEGDLNPDNSDVDKLFIQLVQTYNQLFEENPINASGVDAKAILSARLSKSRRLENLIAQLPGEKKNGLFGNLIALSLGLTPNFKSNFDLAEDAKLQLSKDTYDDDLDNLLAQIGDQYADLFLAAKNLSDAILLSDILRVNTEITKAPLSASMIKRYDEHHQDLTLLKALVRQQLPEKYKEIFFDQSKNGYAGYIDGGASQEEFYKFIKPILEKMDGTEELLVKLNREDLLRKQRTFDNGSIPHQIHLGELHAILRRQEDFYPFLKDNREKIEKILTFRIPYYVGPLARGNSRFAWMTRKSEETITPWNFEEVVDKGASAQSFIERMTNFDKNLPNEKVLPKHSLLYEYFTVYNELTKVKYVTEGMRKPAFLSGEQKKAIVDLLFKTNRKVTVKQLKEDYFKKIECFDSVEISGVEDRFNASLGTYHDLLKIIKDKDFLDNEENEDILEDIVLTLTLFEDREMIEERLKTYAHLFDDKVMKQLKRRRYTGWGRLSRKLINGIRDKQSGKTILDFLKSDGFANRNFMQLIHDDSLTFKEDIQKAQVSGQGDSLHEHIANLAGSPAIKKGILQTVKVVDELVKVMGRHKPENIVIEMARENQTTQKGQKNSRERMKRIEEGIKELGSQILKEHPVENTQLQNEKLYLYYLQNGRDMYVDQELDINRLSDYDVDHIVPQSFLKDDSIDNKVLTRSDKARGKSDNVPSEEVVKKMKNYWRQLLNAKLITQRKFDNLTKAERGGLSELDKAGFIKRQLVETRQITKHVAQILDSRMNTKYDENDKLIREVKVITLKSKLVSDFRKDFQFYKVREINNYHHAHDAYLNAVVGTALIKKYPKLESEFVYGDYKVYDVRKMIAKSEQEIGKATAKYFFYSNIMNFFKTEITLANGEIRKRPLIETNGETGEIVWDKGRDFATVRKVLSMPQVNIVKKTEVQTGGFSKESILPKRNSDKLIARKKDWDPKKYGGFDSPTVAYSVLVVAKVEKGKSKKLKSVKELLGITIMERSSFEKNPIDFLEAKGYKEVKKDLIIKLPKYSLFELENGRKRMLASAGELQKGNELALPSKYVNFLYLASHYEKLKGSPEDNEQKQLFVEQHKHYLDEIIEQISEFSKRVILADANLDKVLSAYNKHRDKPIREQAENIIHLFTLTNLGAPAAFKYFDTTIDRKRYTSTKEVLDATLIHQSITGLYETRIDLSQLGGDGGGSSEAAAKGGGGGVLNLEEEYRLHEKPVPSSIDPSWLQLFPTVWAERAGMGLANQVPPVVVELRSGASPVAVRQYPMSKEAREGIRPHIQRFLDLGVLVPCQSPWNTPLLPVKKPGTNDYRPVQDLREINKRVQDIHPTVPNPYNLLSSLPPSHTWYSVLDLKDAFFCLKLHPNSQPLFAFEWRDPEKGNTGQLTWTRLPQGFKNSPTLFNEALHRDLAPFRALNPQVVLLQYVDDLLVAAPTYRDCKEGTQKLLQELSKLGYRVSAKKAQLCQKEVTYLGYLLKEGKRWLTPARKATVMKIPPPTTPRQVREFLGTAGFCRLWIPGFASLAAPLYPLTKPSIPFIWTEEHQKAFDRIKEALLSAPALALPDLTKPFTLYVDERAGVARGVLTQTLGPWRRPVAYLSKKLDPVASGWPTCLKAVAAVALLLKDADKLTLGQNVTVIASHSLESIVRQPPDRWMTNARMTHYQSLLLNERVSFAPPAVLNPATLLPVESEATPVHRCSEILAEETGTRRDLKDQPLPGVPAWYTDGSSFIAEGKRRAGAAIVDGKRTVWASSLPEGTSAQKAELVALTQALRLAEGKDINIYTDSRYAFATAHIHGAIYKQRGWLTSAGKDIKNKEEILALLEAIHLPKRVAIIHCPGHQKGNDPVATGNRRADEAAKQAALSTRVLAETTKPAGKRTADGSEFEKRTADGSEFESPKKKAKVE

SEQ ID NO: 854 - protein, 2094 aa, synthetic construct
MPAAKRVKLDGGDKKYSIGLDIGTNSVGWAVITDEYKVPSKKFKVLGNTDRHSIKKNLIGALLFDSGETAEATRLKRTARRRYTRRKNRICYLQEIFSNEMAKVDDSFFHRLEESFLVEEDKKHERHPIFGNIVDEVAYHEKYPTIYHLRKKLVDSTDKADLRLIYLALAHMIKFRGHFLIEGDLNPDNSDVDKLFIQLVQTYNQLFEENPINASGVDAKAILSARLSKSRRLENLIAQLPGEKKNGLFGNLIALSLGLTPNFKSNFDLAEDAKLQLSKDTYDDDLDNLLAQIGDQYADLFLAAKNLSDAILLSDILRVNTEITKAPLSASMIKRYDEHHQDLTLLKALVRQQLPEKYKEIFFDQSKNGYAGYIDGGASQEEFYKFIKPILEKMDGTEELLVKLNREDLLRKQRTFDNGSIPHQIHLGELHAILRRQEDFYPFLKDNREKIEKILTFRIPYYVGPLARGNSRFAWMTRKSEETITPWNFEEVVDKGASAQSFIERMTNFDKNLPNEKVLPKHSLLYEYFTVYNELTKVKYVTEGMRKPAFLSGEQKKAIVDLLFKTNRKVTVKQLKEDYFKKIECFDSVEISGVEDRFNASLGTYHDLLKIIKDKDFLDNEENEDILEDIVLTLTLFEDREMIEERLKTYAHLFDDKVMKQLKRRRYTGWGRLSRKLINGIRDKQSGKTILDFLKSDGFANRNFMQLIHDDSLTFKEDIQKAQVSGQGDSLHEHIANLAGSPAIKKGILQTVKVVDELVKVMGRHKPENIVIEMARENQTTQKGQKNSRERMKRIEEGIKELGSQILKEHPVENTQLQNEKLYLYYLQNGRDMYVDQELDINRLSDYDVDHIVPQSFLKDDSIDNKVLTRSDKARGKSDNVPSEEVVKKMKNYWRQLLNAKLITQRKFDNLTKAERGGLSELDKAGFIKRQLVETRQITKHVAQILDSRMNTKYDENDKLIREVKVITLKSKLVSDFRKDFQFYKVREINNYHHAHDAYLNAVVGTALIKKYPKLESEFVYGDYKVYDVRKMIAKSEQEIGKATAKYFFYSNIMNFFKTEITLANGEIRKRPLIETNGETGEIVWDKGRDFATVRKVLSMPQVNIVKKTEVQTGGFSKESILPKRNSDKLIARKKDWDPKKYGGFDSPTVAYSVLVVAKVEKGKSKKLKSVKELLGITIMERSSFEKNPIDFLEAKGYKEVKKDLIIKLPKYSLFELENGRKRMLASAGELQKGNELALPSKYVNFLYLASHYEKLKGSPEDNEQKQLFVEQHKHYLDEIIEQISEFSKRVILADANLDKVLSAYNKHRDKPIREQAENIIHLFTLTNLGAPAAFKYFDTTIDRKRYTSTKEVLDATLIHQSITGLYETRIDLSQLGGDGGGGSEAAAKGGGGGVLNLEEEYRLHEKPVPSSIDPSWLQLFPTVWAERAGMGLANQVPPVVVELRSGASPVAVRQYPMSKEAREGIRPHIQRFLDLGVLVPCQSPWNTPLLPVKKPGTNDYRPVQDLREINKRVQDIHPTVPNPYNLLSSLPPSHTWYSVLDLKDAFFCLKLHPNSQPLFAFEWRDPEKGNTGQLTWTRLPQGFKNSPTLFNEALHRDLAPFRALNPQVVLLQYVDDLLVAAPTYRDCKEGTQKLLQELSKLGYRVSAKKAQLCQKEVTYLGYLLKEGKRWLTPARKATVMKIPPPTTPRQVREFLGTAGFCRLWIPGFASLAAPLYPLTKPSIPFIWTEEHQKAFDRIKEALLSAPALALPDLTKPFTLYVDERAGVARGVLTQTLGPWRRPVAYLSKKLDPVASGWPTCLKAVAAVALLLKDADKLTLGQNVTVIASHSLESIVRQPPDRWMTNARMTHYQSLLLNERVSFAPPAVLNPATLLPVESEATPVHRCSEILAEETGTRRDLKDQPLPGVPAWYTDGSSFIAEGKRRAGAAIVDGKRTVWASSLPEGTSAQKAELVALTQALRLAEGKDINIYTDSRYAFATAHIHGAIYKQRGWLTSAGKDIKNKEEILALLEAIHLPKRVAIIHCPGHQKGNDPVATGNRRADEAAKQAALSTRVLAETTKPAGKRTADGSEFEKRTADGSEFESPKKKAKVE

SEQ ID NO: 855 - protein, 2089 aa, synthetic construct
MPAAKRVKLDGGDKKYSIGLDIGTNSVGWAVITDEYKVPSKKFKVLGNTDRHSIKKNLIGALLFDSGETAEATRLKRTARRRYTRRKNRICYLQEIFSNEMAKVDDSFFHRLEESFLVEEDKKHERHPIFGNIVDEVAYHEKYPTIYHLRKKLVDSTDKADLRLIYLALAHMIKFRGHFLIEGDLNPDNSDVDKLFIQLVQTYNQLFEENPINASGVDAKAILSARLSKSRRLENLIAQLPGEKKNGLFGNLIALSLGLTPNFKSNFDLAEDAKLQLSKDTYDDDLDNLLAQIGDQYADLFLAAKNLSDAILLSDILRVNTEITKAPLSASMIKRYDEHHQDLTLLKALVRQQLPEKYKEIFFDQSKNGYAGYIDGGASQEEFYKFIKPILEKMDGTEELLVKLNREDLLRKQRTFDNGSIPHQIHLGELHAILRRQEDFYPFLKDNREKIEKILTFRIPYYVGPLARGNSRFAWMTRKSEETITPWNFEEVVDKGASAQSFIERMTNFDKNLPNEKVLPKHSLLYEYFTVYNELTKVKYVTEGMRKPAFLSGEQKKAIVDLLFKTNRKVTVKQLKEDYFKKIECFDSVEISGVEDRFNASLGTYHDLLKIIKDKDFLDNEENEDILEDIVLTLTLFEDREMIEERLKTYAHLFDDKVMKQLKRRRYTGWGRLSRKLINGIRDKQSGKTILDFLKSDGFANRNFMQLIHDDSLTFKEDIQKAQVSGQGDSLHEHIANLAGSPAIKKGILQTVKVVDELVKVMGRHKPENIVIEMARENQTTQKGQKNSRERMKRIEEGIKELGSQILKEHPVENTQLQNEKLYLYYLQNGRDMYVDQELDINRLSDYDVDHIVPQSFLKDDSIDNKVLTRSDKARGKSDNVPSEEVVKKMKNYWRQLLNAKLITQRKFDNLTKAERGGLSELDKAGFIKRQLVETRQITKHVAQILDSRMNTKYDENDKLIREVKVITLKSKLVSDFRKDFQFYKVREINNYHHAHDAYLNAVVGTALIKKYPKLESEFVYGDYKVYDVRKMIAKSEQEIGKATAKYFFYSNIMNFFKTEITLANGEIRKRPLIETNGETGEIVWDKGRDFATVRKVLSMPQVNIVKKTEVQTGGFSKESILPKRNSDKLIARKKDWDPKKYGGFDSPTVAYSVLVVAKVEKGKSKKLKSVKELLGITIMERSSFEKNPIDFLEAKGYKEVKKDLIIKLPKYSLFELENGRKRMLASAGELQKGNELALPSKYVNFLYLASHYEKLKGSPEDNEQKQLFVEQHKHYLDEIIEQISEFSKRVILADANLDKVLSAYNKHRDKPIREQAENIIHLFTLTNLGAPAAFKYFDTTIDRKRYTSTKEVLDATLIHQSITGLYETRIDLSQLGGDGGGGSGGGGGVLNLEEEYRLHEKPVPSSIDPSWLQLFPTVWAERAGMGLANQVPPVVVELRSGASPVAVRQYPMSKEAREGIRPHIQRFLDLGVLVPCQSPWNTPLLPVKKPGTNDYRPVQDLREINKRVQDIHPTVPNPYNLLSSLPPSHTWYSVLDLKDAFFCLKLHPNSQPLFAFEWRDPEKGNTGQLTWTRLPQGFKNSPTLFNEALHRDLAPFRALNPQVVLLQYVDDLLVAAPTYRDCKEGTQKLLQELSKLGYRVSAKKAQLCQKEVTYLGYLLKEGKRWLTPARKATVMKIPPPTTPRQVREFLGTAGFCRLWIPGFASLAAPLYPLTKPSIPFIWTEEHQKAFDRIKEALLSAPALALPDLTKPFTLYVDERAGVARGVLTQTLGPWRRPVAYLSKKLDPVASGWPTCLKAVAAVALLLKDADKLTLGQNVTVIASHSLESIVRQPPDRWMTNARMTHYQSLLLNERVSFAPPAVLNPATLLPVESEATPVHRCSEILAEETGTRRDLKDQPLPGVPAWYTDGSSFIAEGKRRAGAAIVDGKRTVWASSLPEGTSAQKAELVALTQALRLAEGKDINIYTDSRYAFATAHIHGAIYKQRGWLTSAGKDIKNKEEILALLEAIHLPKRVAIIHCPGHQKGNDPVATGNRRADEAAKQAALSTRVLAETTKPAGKRTADGSEFEKRTADGSEFESPKKKAKVE

SEQ ID NO: 856 - protein, 2094 aa, synthetic construct
MPAAKRVKLDGGDKKYSIGLDIGTNSVGWAVITDEYKVPSKKFKVLGNTDRHSIKKNLIGALLFDSGETAEATRLKRTARRRYTRRKNRICYLQEIFSNEMAKVDDSFFHRLEESFLVEEDKKHERHPIFGNIVDEVAYHEKYPTIYHLRKKLVDSTDKADLRLIYLALAHMIKFRGHFLIEGDLNPDNSDVDKLFIQLVQTYNQLFEENPINASGVDAKAILSARLSKSRRLENLIAQLPGEKKNGLFGNLIALSLGLTPNFKSNFDLAEDAKLQLSKDTYDDDLDNLLAQIGDQYADLFLAAKNLSDAILLSDILRVNTEITKAPLSASMIKRYDEHHQDLTLLKALVRQQLPEKYKEIFFDQSKNGYAGYIDGGASQEEFYKFIKPILEKMDGTEELLVKLNREDLLRKQRTFDNGSIPHQIHLGELHAILRRQEDFYPFLKDNREKIEKILTFRIPYYVGPLARGNSRFAWMTRKSEETITPWNFEEVVDKGASAQSFIERMTNFDKNLPNEKVLPKHSLLYEYFTVYNELTKVKYVTEGMRKPAFLSGEQKKAIVDLLFKTNRKVTVKQLKEDYFKKIECFDSVEISGVEDRFNASLGTYHDLLKIIKDKDFLDNEENEDILEDIVLTLTLFEDREMIEERLKTYAHLFDDKVMKQLKRRRYTGWGRLSRKLINGIRDKQSGKTILDFLKSDGFANRNFMQLIHDDSLTFKEDIQKAQVSGQGDSLHEHIANLAGSPAIKKGILQTVKVVDELVKVMGRHKPENIVIEMARENQTTQKGQKNSRERMKRIEEGIKELGSQILKEHPVENTQLQNEKLYLYYLQNGRDMYVDQELDINRLSDYDVDHIVPQSFLKDDSIDNKVLTRSDKARGKSDNVPSEEVVKKMKNYWRQLLNAKLITQRKFDNLTKAERGGLSELDKAGFIKRQLVETRQITKHVAQILDSRMNTKYDENDKLIREVKVITLKSKLVSDFRKDFQFYKVREINNYHHAHDAYLNAVVGTALIKKYPKLESEFVYGDYKVYDVRKMIAKSEQEIGKATAKYFFYSNIMNFFKTEITLANGEIRKRPLIETNGETGEIVWDKGRDFATVRKVLSMPQVNIVKKTEVQTGGFSKESILPKRNSDKLIARKKDWDPKKYGGFDSPTVAYSVLVVAKVEKGKSKKLKSVKELLGITIMERSSFEKNPIDFLEAKGYKEVKKDLIIKLPKYSLFELENGRKRMLASAGELQKGNELALPSKYVNFLYLASHYEKLKGSPEDNEQKQLFVEQHKHYLDEIIEQISEFSKRVILADANLDKVLSAYNKHRDKPIREQAENIIHLFTLTNLGAPAAFKYFDTTIDRKRYTSTKEVLDATLIHQSITGLYETRIDLSQLGGDGGEAAAKPAPGGGGGVLNLEEEYRLHEKPVPSSIDPSWLQLFPTVWAERAGMGLANQVPPVVVELRSGASPVAVRQYPMSKEAREGIRPHIQRFLDLGVLVPCQSPWNTPLLPVKKPGTNDYRPVQDLREINKRVQDIHPTVPNPYNLLSSLPPSHTWYSVLDLKDAFFCLKLHPNSQPLFAFEWRDPEKGNTGQLTWTRLPQGFKNSPTLFNEALHRDLAPFRALNPQVVLLQYVDDLLVAAPTYRDCKEGTQKLLQELSKLGYRVSAKKAQLCQKEVTYLGYLLKEGKRWLTPARKATVMKIPPPTTPRQVREFLGTAGFCRLWIPGFASLAAPLYPLTKPSIPFIWTEEHQKAFDRIKEALLSAPALALPDLTKPFTLYVDERAGVARGVLTQTLGPWRRPVAYLSKKLDPVASGWPTCLKAVAAVALLLKDADKLTLGQNVTVIASHSLESIVRQPPDRWMTNARMTHYQSLLLNERVSFAPPAVLNPATLLPVESEATPVHRCSEILAEETGTRRDLKDQPLPGVPAWYTDGSSFIAEGKRRAGAAIVDGKRTVWASSLPEGTSAQKAELVALTQALRLAEGKDINIYTDSRYAFATAHIHGAIYKQRGWLTSAGKDIKNKEEILALLEAIHLPKRVAIIHCPGHQKGNDPVATGNRRADEAAKQAALSTRVLAETTKPAGKRTADGSEFEKRTADGSEFESPKKKAKVE

SEQ ID NO: 857 - protein, 2094 aa, synthetic construct
MPAAKRVKLDGGDKKYSIGLDIGTNSVGWAVITDEYKVPSKKFKVLGNTDRHSIKKNLIGALLFDSGETAEATRLKRTARRRYTRRKNRICYLQEIFSNEMAKVDDSFFHRLEESFLVEEDKKHERHPIFGNIVDEVAYHEKYPTIYHLRKKLVDSTDKADLRLIYLALAHMIKFRGHFLIEGDLNPDNSDVDKLFIQLVQTYNQLFEENPINASGVDAKAILSARLSKSRRLENLIAQLPGEKKNGLFGNLIALSLGLTPNFKSNFDLAEDAKLQLSKDTYDDDLDNLLAQIGDQYADLFLAAKNLSDAILLSDILRVNTEITKAPLSASMIKRYDEHHQDLTLLKALVRQQLPEKYKEIFFDQSKNGYAGYIDGGASQEEFYKFIKPILEKMDGTEELLVKLNREDLLRKQRTFDNGSIPHQIHLGELHAILRRQEDFYPFLKDNREKIEKILTFRIPYYVGPLARGNSRFAWMTRKSEETITPWNFEEVVDKGASAQSFIERMTNFDKNLPNEKVLPKHSLLYEYFTVYNELTKVKYVTEGMRKPAFLSGEQKKAIVDLLFKTNRKVTVKQLKEDYFKKIECFDSVEISGVEDRFNASLGTYHDLLKIIKDKDFLDNEENEDILEDIVLTLTLFEDREMIEERLKTYAHLFDDKVMKQLKRRRYTGWGRLSRKLINGIRDKQSGKTILDFLKSDGFANRNFMQLIHDDSLTFKEDIQKAQVSGQGDSLHEHIANLAGSPAIKKGILQTVKVVDELVKVMGRHKPENIVIEMARENQTTQKGQKNSRERMKRIEEGIKELGSQILKEHPVENTQLQNEKLYLYYLQNGRDMYVDQELDINRLSDYDVDHIVPQSFLKDDSIDNKVLTRSDKARGKSDNVPSEEVVKKMKNYWRQLLNAKLITQRKFDNLTKAERGGLSELDKAGFIKRQLVETRQITKHVAQILDSRMNTKYDENDKLIREVKVITLKSKLVSDFRKDFQFYKVREINNYHHAHDAYLNAVVGTALIKKYPKLESEFVYGDYKVYDVRKMIAKSEQEIGKATAKYFFYSNIMNFFKTEITLANGEIRKRPLIETNGETGEIVWDKGRDFATVRKVLSMPQVNIVKKTEVQTGGFSKESILPKRNSDKLIARKKDWDPKKYGGFDSPTVAYSVLVVAKVEKGKSKKLKSVKELLGITIMERSSFEKNPIDFLEAKGYKEVKKDLIIKLPKYSLFELENGRKRMLASAGELQKGNELALPSKYVNFLYLASHYEKLKGSPEDNEQKQLFVEQHKHYLDEIIEQISEFSKRVILADANLDKVLSAYNKHRDKPIREQAENIIHLFTLTNLGAPAAFKYFDTTIDRKRYTSTKEVLDATLIHQSITGLYETRIDLSQLGGDGGGSSEAAAKGGSGGVLNLEEEYRLHEKPVPSSIDPSWLQLFPTVWAERAGMGLANQVPPVVVELRSGASPVAVRQYPMSKEAREGIRPHIQRFLDLGVLVPCQSPWNTPLLPVKKPGTNDYRPVQDLREINKRVQDIHPTVPNPYNLLSSLPPSHTWYSVLDLKDAFFCLKLHPNSQPLFAFEWRDPEKGNTGQLTWTRLPQGFKNSPTLFNEALHRDLAPFRALNPQVVLLQYVDDLLVAAPTYRDCKEGTQKLLQELSKLGYRVSAKKAQLCQKEVTYLGYLLKEGKRWLTPARKATVMKIPPPTTPRQVREFLGTAGFCRLWIPGFASLAAPLYPLTKPSIPFIWTEEHQKAFDRIKEALLSAPALALPDLTKPFTLYVDERAGVARGVLTQTLGPWRRPVAYLSKKLDPVASGWPTCLKAVAAVALLLKDADKLTLGQNVTVIASHSLESIVRQPPDRWMTNARMTHYQSLLLNERVSFAPPAVLNPATLLPVESEATPVHRCSEILAEETGTRRDLKDQPLPGVPAWYTDGSSFIAEGKRRAGAAIVDGKRTVWASSLPEGTSAQKAELVALTQALRLAEGKDINIYTDSRYAFATAHIHGAIYKQRGWLTSAGKDIKNKEEILALLEAIHLPKRVAIIHCPGHQKGNDPVATGNRRADEAAKQAALSTRVLAETTKPAGKRTADGSEFEKRTADGSEFESPKKKAKVE

SEQ ID NO: 858 - protein, 2092 aa, synthetic construct
MPAAKRVKLDGGDKKYSIGLDIGTNSVGWAVITDEYKVPSKKFKVLGNTDRHSIKKNLIGALLFDSGETAEATRLKRTARRRYTRRKNRICYLQEIFSNEMAKVDDSFFHRLEESFLVEEDKKHERHPIFGNIVDEVAYHEKYPTIYHLRKKLVDSTDKADLRLIYLALAHMIKFRGHFLIEGDLNPDNSDVDKLFIQLVQTYNQLFEENPINASGVDAKAILSARLSKSRRLENLIAQLPGEKKNGLFGNLIALSLGLTPNFKSNFDLAEDAKLQLSKDTYDDDLDNLLAQIGDQYADLFLAAKNLSDAILLSDILRVNTEITKAPLSASMIKRYDEHHQDLTLLKALVRQQLPEKYKEIFFDQSKNGYAGYIDGGASQEEFYKFIKPILEKMDGTEELLVKLNREDLLRKQRTFDNGSIPHQIHLGELHAILRRQEDFYPFLKDNREKIEKILTFRIPYYVGPLARGNSRFAWMTRKSEETITPWNFEEVVDKGASAQSFIERMTNFDKNLPNEKVLPKHSLLYEYFTVYNELTKVKYVTEGMRKPAFLSGEQKKAIVDLLFKTNRKVTVKQLKEDYFKKIECFDSVEISGVEDRFNASLGTYHDLLKIIKDKDFLDNEENEDILEDIVLTLTLFEDREMIEERLKTYAHLFDDKVMKQLKRRRYTGWGRLSRKLINGIRDKQSGKTILDFLKSDGFANRNFMQLIHDDSLTFKEDIQKAQVSGQGDSLHEHIANLAGSPAIKKGILQTVKVVDELVKVMGRHKPENIVIEMARENQTTQKGQKNSRERMKRIEEGIKELGSQILKEHPVENTQLQNEKLYLYYLQNGRDMYVDQELDINRLSDYDVDHIVPQSFLKDDSIDNKVLTRSDKARGKSDNVPSEEVVKKMKNYWRQLLNAKLITQRKFDNLTKAERGGLSELDKAGFIKRQLVETRQITKHVAQILDSRMNTKYDENDKLIREVKVITLKSKLVSDFRKDFQFYKVREINNYHHAHDAYLNAVVGTALIKKYPKLESEFVYGDYKVYDVRKMIAKSEQEIGKATAKYFFYSNIMNFFKTEITLANGEIRKRPLIETNGETGEIVWDKGRDFATVRKVLSMPQVNIVKKTEVQTGGFSKESILPKRNSDKLIARKKDWDPKKYGGFDSPTVAYSVLVVAKVEKGKSKKLKSVKELLGITIMERSSFEKNPIDFLEAKGYKEVKKDLIIKLPKYSLFELENGRKRMLASAGELQKGNELALPSKYVNFLYLASHYEKLKGSPEDNEQKQLFVEQHKHYLDEIIEQISEFSKRVILADANLDKVLSAYNKHRDKPIREQAENIIHLFTLTNLGAPAAFKYFDTTIDRKRYTSTKEVLDATLIHQSITGLYETRIDLSQLGGDGGPAPGGSGGGGGVLNLEEEYRLHEKPVPSSIDPSWLQLFPTVWAERAGMGLANQVPPVVVELRSGASPVAVRQYPMSKEAREGIRPHIQRFLDLGVLVPCQSPWNTPLLPVKKPGTNDYRPVQDLREINKRVQDIHPTVPNPYNLLSSLPPSHTWYSVLDLKDAFFCLKLHPNSQPLFAFEWRDPEKGNTGQLTWTRLPQGFKNSPTLFNEALHRDLAPFRALNPQVVLLQYVDDLLVAAPTYRDCKEGTQKLLQELSKLGYRVSAKKAQLCQKEVTYLGYLLKEGKRWLTPARKATVMKIPPPTTPRQVREFLGTAGFCRLWIPGFASLAAPLYPLTKPSIPFIWTEEHQKAFDRIKEALLSAPALALPDLTKPFTLYVDERAGVARGVLTQTLGPWRRPVAYLSKKLDPVASGWPTCLKAVAAVALLLKDADKLTLGQNVTVIASHSLESIVRQPPDRWMTNARMTHYQSLLLNERVSFAPPAVLNPATLLPVESEATPVHRCSEILAEETGTRRDLKDQPLPGVPAWYTDGSSFIAEGKRRAGAAIVDGKRTVWASSLPEGTSAQKAELVALTQALRLAEGKDINIYTDSRYAFATAHIHGAIYKQRGWLTSAGKDIKNKEEILALLEAIHLPKRVAIIHCPGHQKGNDPVATGNRRADEAAKQAALSTRVLAETTKPAGKRTADGSEFEKRTADGSEFESPKKKAKVE

SEQ ID NO: 859 - protein, 2089 aa, synthetic construct
MPAAKRVKLDGGDKKYSIGLDIGTNSVGWAVITDEYKVPSKKFKVLGNTDRHSIKKNLIGALLFDSGETAEATRLKRTARRRYTRRKNRICYLQEIFSNEMAKVDDSFFHRLEESFLVEEDKKHERHPIFGNIVDEVAYHEKYPTIYHLRKKLVDSTDKADLRLIYLALAHMIKFRGHFLIEGDLNPDNSDVDKLFIQLVQTYNQLFEENPINASGVDAKAILSARLSKSRRLENLIAQLPGEKKNGLFGNLIALSLGLTPNFKSNFDLAEDAKLQLSKDTYDDDLDNLLAQIGDQYADLFLAAKNLSDAILLSDILRVNTEITKAPLSASMIKRYDEHHQDLTLLKALVRQQLPEKYKEIFFDQSKNGYAGYIDGGASQEEFYKFIKPILEKMDGTEELLVKLNREDLLRKQRTFDNGSIPHQIHLGELHAILRRQEDFYPFLKDNREKIEKILTFRIPYYVGPLARGNSRFAWMTRKSEETITPWNFEEVVDKGASAQSFIERMTNFDKNLPNEKVLPKHSLLYEYFTVYNELTKVKYVTEGMRKPAFLSGEQKKAIVDLLFKTNRKVTVKQLKEDYFKKIECFDSVEISGVEDRFNASLGTYHDLLKIIKDKDFLDNEENEDILEDIVLTLTLFEDREMIEERLKTYAHLFDDKVMKQLKRRRYTGWGRLSRKLINGIRDKQSGKTILDFLKSDGFANRNFMQLIHDDSLTFKEDIQKAQVSGQGDSLHEHIANLAGSPAIKKGILQTVKVVDELVKVMGRHKPENIVIEMARENQTTQKGQKNSRERMKRIEEGIKELGSQILKEHPVENTQLQNEKLYLYYLQNGRDMYVDQELDINRLSDYDVDHIVPQSFLKDDSIDNKVLTRSDKARGKSDNVPSEEVVKKMKNYWRQLLNAKLITQRKFDNLTKAERGGLSELDKAGFIKRQLVETRQITKHVAQILDSRMNTKYDENDKLIREVKVITLKSKLVSDFRKDFQFYKVREINNYHHAHDAYLNAVVGTALIKKYPKLESEFVYGDYKVYDVRKMIAKSEQEIGKATAKYFFYSNIMNFFKTEITLANGEIRKRPLIETNGETGEIVWDKGRDFATVRKVLSMPQVNIVKKTEVQTGGFSKESILPKRNSDKLIARKKDWDPKKYGGFDSPTVAYSVLVVAKVEKGKSKKLKSVKELLGITIMERSSFEKNPIDFLEAKGYKEVKKDLIIKLPKYSLFELENGRKRMLASAGELQKGNELALPSKYVNFLYLASHYEKLKGSPEDNEQKQLFVEQHKHYLDEIIEQISEFSKRVILADANLDKVLSAYNKHRDKPIREQAENIIHLFTLTNLGAPAAFKYFDTTIDRKRYTSTKEVLDATLIHQSITGLYETRIDLSQLGGDGGPAPGSSGGVLNLEEEYRLHEKPVPSSIDPSWLQLFPTVWAERAGMGLANQVPPVVVELRSGASPVAVRQYPMSKEAREGIRPHIQRFLDLGVLVPCQSPWNTPLLPVKKPGTNDYRPVQDLREINKRVQDIHPTVPNPYNLLSSLPPSHTWYSVLDLKDAFFCLKLHPNSQPLFAFEWRDPEKGNTGQLTWTRLPQGFKNSPTLFNEALHRDLAPFRALNPQVVLLQYVDDLLVAAPTYRDCKEGTQKLLQELSKLGYRVSAKKAQLCQKEVTYLGYLLKEGKRWLTPARKATVMKIPPPTTPRQVREFLGTAGFCRLWIPGFASLAAPLYPLTKPSIPFIWTEEHQKAFDRIKEALLSAPALALPDLTKPFTLYVDERAGVARGVLTQTLGPWRRPVAYLSKKLDPVASGWPTCLKAVAAVALLLKDADKLTLGQNVTVIASHSLESIVRQPPDRWMTNARMTHYQSLLLNERVSFAPPAVLNPATLLPVESEATPVHRCSEILAEETGTRRDLKDQPLPGVPAWYTDGSSFIAEGKRRAGAAIVDGKRTVWASSLPEGTSAQKAELVALTQALRLAEGKDINIYTDSRYAFATAHIHGAIYKQRGWLTSAGKDIKNKEEILALLEAIHLPKRVAIIHCPGHQKGNDPVATGNRRADEAAKQAALSTRVLAETTKPAGKRTADGSEFEKRTADGSEFESPKKKAKVE

SEQ ID NO: 860 - protein, 2090 aa, synthetic construct
MPAAKRVKLDGGDKKYSIGLDIGTNSVGWAVITDEYKVPSKKFKVLGNTDRHSIKKNLIGALLFDSGETAEATRLKRTARRRYTRRKNRICYLQEIFSNEMAKVDDSFFHRLEESFLVEEDKKHERHPIFGNIVDEVAYHEKYPTIYHLRKKLVDSTDKADLRLIYLALAHMIKFRGHFLIEGDLNPDNSDVDKLFIQLVQTYNQLFEENPINASGVDAKAILSARLSKSRRLENLIAQLPGEKKNGLFGNLIALSLGLTPNFKSNFDLAEDAKLQLSKDTYDDDLDNLLAQIGDQYADLFLAAKNLSDAILLSDILRVNTEITKAPLSASMIKRYDEHHQDLTLLKALVRQQLPEKYKEIFFDQSKNGYAGYIDGGASQEEFYKFIKPILEKMDGTEELLVKLNREDLLRKQRTFDNGSIPHQIHLGELHAILRRQEDFYPFLKDNREKIEKILTFRIPYYVGPLARGNSRFAWMTRKSEETITPWNFEEVVDKGASAQSFIERMTNFDKNLPNEKVLPKHSLLYEYFTVYNELTKVKYVTEGMRKPAFLSGEQKKAIVDLLFKTNRKVTVKQLKEDYFKKIECFDSVEISGVEDRFNASLGTYHDLLKIIKDKDFLDNEENEDILEDIVLTLTLFEDREMIEERLKTYAHLFDDKVMKQLKRRRYTGWGRLSRKLINGIRDKQSGKTILDFLKSDGFANRNFMQLIHDDSLTFKEDIQKAQVSGQGDSLHEHIANLAGSPAIKKGILQTVKVVDELVKVMGRHKPENIVIEMARENQTTQKGQKNSRERMKRIEEGIKELGSQILKEHPVENTQLQNEKLYLYYLQNGRDMYVDQELDINRLSDYDVDHIVPQSFLKDDSIDNKVLTRSDKARGKSDNVPSEEVVKKMKNYWRQLLNAKLITQRKFDNLTKAERGGLSELDKAGFIKRQLVETRQITKHVAQILDSRMNTKYDENDKLIREVKVITLKSKLVSDFRKDFQFYKVREINNYHHAHDAYLNAVVGTALIKKYPKLESEFVYGDYKVYDVRKMIAKSEQEIGKATAKYFFYSNIMNFFKTEITLANGEIRKRPLIETNGETGEIVWDKGRDFATVRKVLSMPQVNIVKKTEVQTGGFSKESILPKRNSDKLIARKKDWDPKKYGGFDSPTVAYSVLVVAKVEKGKSKKLKSVKELLGITIMERSSFEKNPIDFLEAKGYKEVKKDLIIKLPKYSLFELENGRKRMLASAGELQKGNELALPSKYVNFLYLASHYEKLKGSPEDNEQKQLFVEQHKHYLDEIIEQISEFSKRVILADANLDKVLSAYNKHRDKPIREQAENIIHLFTLTNLGAPAAFKYFDTTIDRKRYTSTKEVLDATLIHQSITGLYETRIDLSQLGGDGGPAPAPAPGGVLNLEEEYRLHEKPVPSSIDPSWLQLFPTVWAERAGMGLANQVPPVVVELRSGASPVAVRQYPMSKEAREGIRPHIQRFLDLGVLVPCQSPWNTPLLPVKKPGTNDYRPVQDLREINKRVQDIHPTVPNPYNLLSSLPPSHTWYSVLDLKDAFFCLKLHPNSQPLFAFEWRDPEKGNTGQLTWTRLPQGFKNSPTLFNEALHRDLAPFRALNPQVVLLQYVDDLLVAAPTYRDCKEGTQKLLQELSKLGYRVSAKKAQLCQKEVTYLGYLLKEGKRWLTPARKATVMKIPPPTTPRQVREFLGTAGFCRLWIPGFASLAAPLYPLTKPSIPFIWTEEHQKAFDRIKEALLSAPALALPDLTKPFTLYVDERAGVARGVLTQTLGPWRRPVAYLSKKLDPVASGWPTCLKAVAAVALLLKDADKLTLGQNVTVIASHSLESIVRQPPDRWMTNARMTHYQSLLLNERVSFAPPAVLNPATLLPVESEATPVHRCSEILAEETGTRRDLKDQPLPGVPAWYTDGSSFIAEGKRRAGAAIVDGKRTVWASSLPEGTSAQKAELVALTQALRLAEGKDINIYTDSRYAFATAHIHGAIYKQRGWLTSAGKDIKNKEEILALLEAIHLPKRVAIIHCPGHQKGNDPVATGNRRADEAAKQAALSTRVLAETTKPAGKRTADGSEFEKRTADGSEFESPKKKAKVE

SEQ ID NO: 861 - protein, 2094 aa, synthetic construct
MPAAKRVKLDGGDKKYSIGLDIGTNSVGWAVITDEYKVPSKKFKVLGNTDRHSIKKNLIGALLFDSGETAEATRLKRTARRRYTRRKNRICYLQEIFSNEMAKVDDSFFHRLEESFLVEEDKKHERHPIFGNIVDEVAYHEKYPTIYHLRKKLVDSTDKADLRLIYLALAHMIKFRGHFLIEGDLNPDNSDVDKLFIQLVQTYNQLFEENPINASGVDAKAILSARLSKSRRLENLIAQLPGEKKNGLFGNLIALSLGLTPNFKSNFDLAEDAKLQLSKDTYDDDLDNLLAQIGDQYADLFLAAKNLSDAILLSDILRVNTEITKAPLSASMIKRYDEHHQDLTLLKALVRQQLPEKYKEIFFDQSKNGYAGYIDGGASQEEFYKFIKPILEKMDGTEELLVKLNREDLLRKQRTFDNGSIPHQIHLGELHAILRRQEDFYPFLKDNREKIEKILTFRIPYYVGPLARGNSRFAWMTRKSEETITPWNFEEVVDKGASAQSFIERMTNFDKNLPNEKVLPKHSLLYEYFTVYNELTKVKYVTEGMRKPAFLSGEQKKAIVDLLFKTNRKVTVKQLKEDYFKKIECFDSVEISGVEDRFNASLGTYHDLLKIIKDKDFLDNEENEDILEDIVLTLTLFEDREMIEERLKTYAHLFDDKVMKQLKRRRYTGWGRLSRKLINGIRDKQSGKTILDFLKSDGFANRNFMQLIHDDSLTFKEDIQKAQVSGQGDSLHEHIANLAGSPAIKKGILQTVKVVDELVKVMGRHKPENIVIEMARENQTTQKGQKNSRERMKRIEEGIKELGSQILKEHPVENTQLQNEKLYLYYLQNGRDMYVDQELDINRLSDYDVDHIVPQSFLKDDSIDNKVLTRSDKARGKSDNVPSEEVVKKMKNYWRQLLNAKLITQRKFDNLTKAERGGLSELDKAGFIKRQLVETRQITKHVAQILDSRMNTKYDENDKLIREVKVITLKSKLVSDFRKDFQFYKVREINNYHHAHDAYLNAVVGTALIKKYPKLESEFVYGDYKVYDVRKMIAKSEQEIGKATAKYFFYSNIMNFFKTEITLANGEIRKRPLIETNGETGEIVWDKGRDFATVRKVLSMPQVNIVKKTEVQTGGFSKESILPKRNSDKLIARKKDWDPKKYGGFDSPTVAYSVLVVAKVEKGKSKKLKSVKELLGITIMERSSFEKNPIDFLEAKGYKEVKKDLIIKLPKYSLFELENGRKRMLASAGELQKGNELALPSKYVNFLYLASHYEKLKGSPEDNEQKQLFVEQHKHYLDEIIEQISEFSKRVILADANLDKVLSAYNKHRDKPIREQAENIIHLFTLTNLGAPAAFKYFDTTIDRKRYTSTKEVLDATLIHQSITGLYETRIDLSQLGGDGGGGSGGGEAAAKGGVLNLEEEYRLHEKPVPSSIDPSWLQLFPTVWAERAGMGLANQVPPVVVELRSGASPVAVRQYPMSKEAREGIRPHIQRFLDLGVLVPCQSPWNTPLLPVKKPGTNDYRPVQDLREINKRVQDIHPTVPNPYNLLSSLPPSHTWYSVLDLKDAFFCLKLHPNSQPLFAFEWRDPEKGNTGQLTWTRLPQGFKNSPTLFNEALHRDLAPFRALNPQVVLLQYVDDLLVAAPTYRDCKEGTQKLLQELSKLGYRVSAKKAQLCQKEVTYLGYLLKEGKRWLTPARKATVMKIPPPTTPRQVREFLGTAGFCRLWIPGFASLAAPLYPLTKPSIPFIWTEEHQKAFDRIKEALLSAPALALPDLTKPFTLYVDERAGVARGVLTQTLGPWRRPVAYLSKKLDPVASGWPTCLKAVAAVALLLKDADKLTLGQNVTVIASHSLESIVRQPPDRWMTNARMTHYQSLLLNERVSFAPPAVLNPATLLPVESEATPVHRCSEILAEETGTRRDLKDQPLPGVPAWYTDGSSFIAEGKRRAGAAIVDGKRTVWASSLPEGTSAQKAELVALTQALRLAEGKDINIYTDSRYAFATAHIHGAIYKQRGWLTSAGKDIKNKEEILALLEAIHLPKRVAIIHCPGHQKGNDPVATGNRRADEAAKQAALSTRVLAETTKPAGKRTADGSEFEKRTADGSEFESPKKKAKVE

SEQ ID NO: 862 - protein, 2095 aa, synthetic construct
MPAAKRVKLDGGDKKYSIGLDIGTNSVGWAVITDEYKVPSKKFKVLGNTDRHSIKKNLIGALLFDSGETAEATRLKRTARRRYTRRKNRICYLQEIFSNEMAKVDDSFFHRLEESFLVEEDKKHERHPIFGNIVDEVAYHEKYPTIYHLRKKLVDSTDKADLRLIYLALAHMIKFRGHFLIEGDLNPDNSDVDKLFIQLVQTYNQLFEENPINASGVDAKAILSARLSKSRRLENLIAQLPGEKKNGLFGNLIALSLGLTPNFKSNFDLAEDAKLQLSKDTYDDDLDNLLAQIGDQYADLFLAAKNLSDAILLSDILRVNTEITKAPLSASMIKRYDEHHQDLTLLKALVRQQLPEKYKEIFFDQSKNGYAGYIDGGASQEEFYKFIKPILEKMDGTEELLVKLNREDLLRKQRTFDNGSIPHQIHLGELHAILRRQEDFYPFLKDNREKIEKILTFRIPYYVGPLARGNSRFAWMTRKSEETITPWNFEEVVDKGASAQSFIERMTNFDKNLPNEKVLPKHSLLYEYFTVYNELTKVKYVTEGMRKPAFLSGEQKKAIVDLLFKTNRKVTVKQLKEDYFKKIECFDSVEISGVEDRFNASLGTYHDLLKIIKDKDFLDNEENEDILEDIVLTLTLFEDREMIEERLKTYAHLFDDKVMKQLKRRRYTGWGRLSRKLINGIRDKQSGKTILDFLKSDGFANRNFMQLIHDDSLTFKEDIQKAQVSGQGDSLHEHIANLAGSPAIKKGILQTVKVVDELVKVMGRHKPENIVIEMARENQTTQKGQKNSRERMKRIEEGIKELGSQILKEHPVENTQLQNEKLYLYYLQNGRDMYVDQELDINRLSDYDVDHIVPQSFLKDDSIDNKVLTRSDKARGKSDNVPSEEVVKKMKNYWRQLLNAKLITQRKFDNLTKAERGGLSELDKAGFIKRQLVETRQITKHVAQILDSRMNTKYDENDKLIREVKVITLKSKLVSDFRKDFQFYKVREINNYHHAHDAYLNAVVGTALIKKYPKLESEFVYGDYKVYDVRKMIAKSEQEIGKATAKYFFYSNIMNFFKTEITLANGEIRKRPLIETNGETGEIVWDKGRDFATVRKVLSMPQVNIVKKTEVQTGGFSKESILPKRNSDKLIARKKDWDPKKYGGFDSPTVAYSVLVVAKVEKGKSKKLKSVKELLGITIMERSSFEKNPIDFLEAKGYKEVKKDLIIKLPKYSLFELENGRKRMLASAGELQKGNELALPSKYVNFLYLASHYEKLKGSPEDNEQKQLFVEQHKHYLDEIIEQISEFSKRVILADANLDKVLSAYNKHRDKPIREQAENIIHLFTLTNLGAPAAFKYFDTTIDRKRYTSTKEVLDATLIHQSITGLYETRIDLSQLGGDGGGSAGSAAGSGEFGGVLNLEEEYRLHEKPVPSSIDPSWLQLFPTVWAERAGMGLANQVPPVVVELRSGASPVAVRQYPMSKEAREGIRPHIQRFLDLGVLVPCQSPWNTPLLPVKKPGTNDYRPVQDLREINKRVQDIHPTVPNPYNLLSSLPPSHTWYSVLDLKDAFFCLKLHPNSQPLFAFEWRDPEKGNTGQLTWTRLPQGFKNSPTLFNEALHRDLAPFRALNPQVVLLQYVDDLLVAAPTYRDCKEGTQKLLQELSKLGYRVSAKKAQLCQKEVTYLGYLLKEGKRWLTPARKATVMKIPPPTTPRQVREFLGTAGFCRLWIPGFASLAAPLYPLTKPSIPFIWTEEHQKAFDRIKEALLSAPALALPDLTKPFTLYVDERAGVARGVLTQTLGPWRRPVAYLSKKLDPVASGWPTCLKAVAAVALLLKDADKLTLGQNVTVIASHSLESIVRQPPDRWMTNARMTHYQSLLLNERVSFAPPAVLNPATLLPVESEATPVHRCSEILAEETGTRRDLKDQPLPGVPAWYTDGSSFIAEGKRRAGAAIVDGKRTVWASSLPEGTSAQKAELVALTQALRLAEGKDINIYTDSRYAFATAHIHGAIYKQRGWLTSAGKDIKNKEEILALLEAIHLPKRVAIIHCPGHQKGNDPVATGNRRADEAAKQAALSTRVLAETTKPAGKRTADGSEFEKRTADGSEFESPKKKAKVE

SEQ ID NO: 863 - protein, 2094 aa, synthetic construct
MPAAKRVKLDGGDKKYSIGLDIGTNSVGWAVITDEYKVPSKKFKVLGNTDRHSIKKNLIGALLFDSGETAEATRLKRTARRRYTRRKNRICYLQEIFSNEMAKVDDSFFHRLEESFLVEEDKKHERHPIFGNIVDEVAYHEKYPTIYHLRKKLVDSTDKADLRLIYLALAHMIKFRGHFLIEGDLNPDNSDVDKLFIQLVQTYNQLFEENPINASGVDAKAILSARLSKSRRLENLIAQLPGEKKNGLFGNLIALSLGLTPNFKSNFDLAEDAKLQLSKDTYDDDLDNLLAQIGDQYADLFLAAKNLSDAILLSDILRVNTEITKAPLSASMIKRYDEHHQDLTLLKALVRQQLPEKYKEIFFDQSKNGYAGYIDGGASQEEFYKFIKPILEKMDGTEELLVKLNREDLLRKQRTFDNGSIPHQIHLGELHAILRRQEDFYPFLKDNREKIEKILTFRIPYYVGPLARGNSRFAWMTRKSEETITPWNFEEVVDKGASAQSFIERMTNFDKNLPNEKVLPKHSLLYEYFTVYNELTKVKYVTEGMRKPAFLSGEQKKAIVDLLFKTNRKVTVKQLKEDYFKKIECFDSVEISGVEDRFNASLGTYHDLLKIIKDKDFLDNEENEDILEDIVLTLTLFEDREMIEERLKTYAHLFDDKVMKQLKRRRYTGWGRLSRKLINGIRDKQSGKTILDFLKSDGFANRNFMQLIHDDSLTFKEDIQKAQVSGQGDSLHEHIANLAGSPAIKKGILQTVKVVDELVKVMGRHKPENIVIEMARENQTTQKGQKNSRERMKRIEEGIKELGSQILKEHPVENTQLQNEKLYLYYLQNGRDMYVDQELDINRLSDYDVDHIVPQSFLKDDSIDNKVLTRSDKARGKSDNVPSEEVVKKMKNYWRQLLNAKLITQRKFDNLTKAERGGLSELDKAGFIKRQLVETRQITKHVAQILDSRMNTKYDENDKLIREVKVITLKSKLVSDFRKDFQFYKVREINNYHHAHDAYLNAVVGTALIKKYPKLESEFVYGDYKVYDVRKMIAKSEQEIGKATAKYFFYSNIMNFFKTEITLANGEIRKRPLIETNGETGEIVWDKGRDFATVRKVLSMPQVNIVKKTEVQTGGFSKESILPKRNSDKLIARKKDWDPKKYGGFDSPTVAYSVLVVAKVEKGKSKKLKSVKELLGITIMERSSFEKNPIDFLEAKGYKEVKKDLIIKLPKYSLFELENGRKRMLASAGELQKGNELALPSKYVNFLYLASHYEKLKGSPEDNEQKQLFVEQHKHYLDEIIEQISEFSKRVILADANLDKVLSAYNKHRDKPIREQAENIIHLFTLTNLGAPAAFKYFDTTIDRKRYTSTKEVLDATLIHQSITGLYETRIDLSQLGGDGGPAPEAAAKGGSGGVLNLEEEYRLHEKPVPSSIDPSWLQLFPTVWAERAGMGLANQVPPVVVELRSGASPVAVRQYPMSKEAREGIRPHIQRFLDLGVLVPCQSPWNTPLLPVKKPGTNDYRPVQDLREINKRVQDIHPTVPNPYNLLSSLPPSHTWYSVLDLKDAFFCLKLHPNSQPLFAFEWRDPEKGNTGQLTWTRLPQGFKNSPTLFNEALHRDLAPFRALNPQVVLLQYVDDLLVAAPTYRDCKEGTQKLLQELSKLGYRVSAKKAQLCQKEVTYLGYLLKEGKRWLTPARKATVMKIPPPTTPRQVREFLGTAGFCRLWIPGFASLAAPLYPLTKPSIPFIWTEEHQKAFDRIKEALLSAPALALPDLTKPFTLYVDERAGVARGVLTQTLGPWRRPVAYLSKKLDPVASGWPTCLKAVAAVALLLKDADKLTLGQNVTVIASHSLESIVRQPPDRWMTNARMTHYQSLLLNERVSFAPPAVLNPATLLPVESEATPVHRCSEILAEETGTRRDLKDQPLPGVPAWYTDGSSFIAEGKRRAGAAIVDGKRTVWASSLPEGTSAQKAELVALTQALRLAEGKDINIYTDSRYAFATAHIHGAIYKQRGWLTSAGKDIKNKEEILALLEAIHLPKRVAIIHCPGHQKGNDPVATGNRRADEAAKQAALSTRVLAETTKPAGKRTADGSEFEKRTADGSEFESPKKKAKVE

SEQ ID NO: 864 - protein, 2092 aa, synthetic construct
MPAAKRVKLDGGDKKYSIGLDIGTNSVGWAVITDEYKVPSKKFKVLGNTDRHSIKKNLIGALLFDSGETAEATRLKRTARRRYTRRKNRICYLQEIFSNEMAKVDDSFFHRLEESFLVEEDKKHERHPIFGNIVDEVAYHEKYPTIYHLRKKLVDSTDKADLRLIYLALAHMIKFRGHFLIEGDLNPDNSDVDKLFIQLVQTYNQLFEENPINASGVDAKAILSARLSKSRRLENLIAQLPGEKKNGLFGNLIALSLGLTPNFKSNFDLAEDAKLQLSKDTYDDDLDNLLAQIGDQYADLFLAAKNLSDAILLSDILRVNTEITKAPLSASMIKRYDEHHQDLTLLKALVRQQLPEKYKEIFFDQSKNGYAGYIDGGASQEEFYKFIKPILEKMDGTEELLVKLNREDLLRKQRTFDNGSIPHQIHLGELHAILRRQEDFYPFLKDNREKIEKILTFRIPYYVGPLARGNSRFAWMTRKSEETITPWNFEEVVDKGASAQSFIERMTNFDKNLPNEKVLPKHSLLYEYFTVYNELTKVKYVTEGMRKPAFLSGEQKKAIVDLLFKTNRKVTVKQLKEDYFKKIECFDSVEISGVEDRFNASLGTYHDLLKIIKDKDFLDNEENEDILEDIVLTLTLFEDREMIEERLKTYAHLFDDKVMKQLKRRRYTGWGRLSRKLINGIRDKQSGKTILDFLKSDGFANRNFMQLIHDDSLTFKEDIQKAQVSGQGDSLHEHIANLAGSPAIKKGILQTVKVVDELVKVMGRHKPENIVIEMARENQTTQKGQKNSRERMKRIEEGIKELGSQILKEHPVENTQLQNEKLYLYYLQNGRDMYVDQELDINRLSDYDVDHIVPQSFLKDDSIDNKVLTRSDKARGKSDNVPSEEVVKKMKNYWRQLLNAKLITQRKFDNLTKAERGGLSELDKAGFIKRQLVETRQITKHVAQILDSRMNTKYDENDKLIREVKVITLKSKLVSDFRKDFQFYKVREINNYHHAHDAYLNAVVGTALIKKYPKLESEFVYGDYKVYDVRKMIAKSEQEIGKATAKYFFYSNIMNFFKTEITLANGEIRKRPLIETNGETGEIVWDKGRDFATVRKVLSMPQVNIVKKTEVQTGGFSKESILPKRNSDKLIARKKDWDPKKYGGFDSPTVAYSVLVVAKVEKGKSKKLKSVKELLGITIMERSSFEKNPIDFLEAKGYKEVKKDLIIKLPKYSLFELENGRKRMLASAGELQKGNELALPSKYVNFLYLASHYEKLKGSPEDNEQKQLFVEQHKHYLDEIIEQISEFSKRVILADANLDKVLSAYNKHRDKPIREQAENIIHLFTLTNLGAPAAFKYFDTTIDRKRYTSTKEVLDATLIHQSITGLYETRIDLSQLGGDGGPAPGSSGGGGGVLNLEEEYRLHEKPVPSSIDPSWLQLFPTVWAERAGMGLANQVPPVVVELRSGASPVAVRQYPMSKEAREGIRPHIQRFLDLGVLVPCQSPWNTPLLPVKKPGTNDYRPVQDLREINKRVQDIHPTVPNPYNLLSSLPPSHTWYSVLDLKDAFFCLKLHPNSQPLFAFEWRDPEKGNTGQLTWTRLPQGFKNSPTLFNEALHRDLAPFRALNPQVVLLQYVDDLLVAAPTYRDCKEGTQKLLQELSKLGYRVSAKKAQLCQKEVTYLGYLLKEGKRWLTPARKATVMKIPPPTTPRQVREFLGTAGFCRLWIPGFASLAAPLYPLTKPSIPFIWTEEHQKAFDRIKEALLSAPALALPDLTKPFTLYVDERAGVARGVLTQTLGPWRRPVAYLSKKLDPVASGWPTCLKAVAAVALLLKDADKLTLGQNVTVIASHSLESIVRQPPDRWMTNARMTHYQSLLLNERVSFAPPAVLNPATLLPVESEATPVHRCSEILAEETGTRRDLKDQPLPGVPAWYTDGSSFIAEGKRRAGAAIVDGKRTVWASSLPEGTSAQKAELVALTQALRLAEGKDINIYTDSRYAFATAHIHGAIYKQRGWLTSAGKDIKNKEEILALLEAIHLPKRVAIIHCPGHQKGNDPVATGNRRADEAAKQAALSTRVLAETTKPAGKRTADGSEFEKRTADGSEFESPKKKAKVE

SEQ ID NO: 865 - protein, 2092 aa, synthetic construct
MPAAKRVKLDGGDKKYSIGLDIGTNSVGWAVITDEYKVPSKKFKVLGNTDRHSIKKNLIGALLFDSGETAEATRLKRTARRRYTRRKNRICYLQEIFSNEMAKVDDSFFHRLEESFLVEEDKKHERHPIFGNIVDEVAYHEKYPTIYHLRKKLVDSTDKADLRLIYLALAHMIKFRGHFLIEGDLNPDNSDVDKLFIQLVQTYNQLFEENPINASGVDAKAILSARLSKSRRLENLIAQLPGEKKNGLFGNLIALSLGLTPNFKSNFDLAEDAKLQLSKDTYDDDLDNLLAQIGDQYADLFLAAKNLSDAILLSDILRVNTEITKAPLSASMIKRYDEHHQDLTLLKALVRQQLPEKYKEIFFDQSKNGYAGYIDGGASQEEFYKFIKPILEKMDGTEELLVKLNREDLLRKQRTFDNGSIPHQIHLGELHAILRRQEDFYPFLKDNREKIEKILTFRIPYYVGPLARGNSRFAWMTRKSEETITPWNFEEVVDKGASAQSFIERMTNFDKNLPNEKVLPKHSLLYEYFTVYNELTKVKYVTEGMRKPAFLSGEQKKAIVDLLFKTNRKVTVKQLKEDYFKKIECFDSVEISGVEDRFNASLGTYHDLLKIIKDKDFLDNEENEDILEDIVLTLTLFEDREMIEERLKTYAHLFDDKVMKQLKRRRYTGWGRLSRKLINGIRDKQSGKTILDFLKSDGFANRNFMQLIHDDSLTFKEDIQKAQVSGQGDSLHEHIANLAGSPAIKKGILQTVKVVDELVKVMGRHKPENIVIEMARENQTTQKGQKNSRERMKRIEEGIKELGSQILKEHPVENTQLQNEKLYLYYLQNGRDMYVDQELDINRLSDYDVDHIVPQSFLKDDSIDNKVLTRSDKARGKSDNVPSEEVVKKMKNYWRQLLNAKLITQRKFDNLTKAERGGLSELDKAGFIKRQLVETRQITKHVAQILDSRMNTKYDENDKLIREVKVITLKSKLVSDFRKDFQFYKVREINNYHHAHDAYLNAVVGTALIKKYPKLESEFVYGDYKVYDVRKMIAKSEQEIGKATAKYFFYSNIMNFFKTEITLANGEIRKRPLIETNGETGEIVWDKGRDFATVRKVLSMPQVNIVKKTEVQTGGFSKESILPKRNSDKLIARKKDWDPKKYGGFDSPTVAYSVLVVAKVEKGKSKKLKSVKELLGITIMERSSFEKNPIDFLEAKGYKEVKKDLIIKLPKYSLFELENGRKRMLASAGELQKGNELALPSKYVNFLYLASHYEKLKGSPEDNEQKQLFVEQHKHYLDEIIEQISEFSKRVILADANLDKVLSAYNKHRDKPIREQAENIIHLFTLTNLGAPAAFKYFDTTIDRKRYTSTKEVLDATLIHQSITGLYETRIDLSQLGGDGGGGSGSSGGGGGVLNLEEEYRLHEKPVPSSIDPSWLQLFPTVWAERAGMGLANQVPPVVVELRSGASPVAVRQYPMSKEAREGIRPHIQRFLDLGVLVPCQSPWNTPLLPVKKPGTNDYRPVQDLREINKRVQDIHPTVPNPYNLLSSLPPSHTWYSVLDLKDAFFCLKLHPNSQPLFAFEWRDPEKGNTGQLTWTRLPQGFKNSPTLFNEALHRDLAPFRALNPQVVLLQYVDDLLVAAPTYRDCKEGTQKLLQELSKLGYRVSAKKAQLCQKEVTYLGYLLKEGKRWLTPARKATVMKIPPPTTPRQVREFLGTAGFCRLWIPGFASLAAPLYPLTKPSIPFIWTEEHQKAFDRIKEALLSAPALALPDLTKPFTLYVDERAGVARGVLTQTLGPWRRPVAYLSKKLDPVASGWPTCLKAVAAVALLLKDADKLTLGQNVTVIASHSLESIVRQPPDRWMTNARMTHYQSLLLNERVSFAPPAVLNPATLLPVESEATPVHRCSEILAEETGTRRDLKDQPLPGVPAWYTDGSSFIAEGKRRAGAAIVDGKRTVWASSLPEGTSAQKAELVALTQALRLAEGKDINIYTDSRYAFATAHIHGAIYKQRGWLTSAGKDIKNKEEILALLEAIHLPKRVAIIHCPGHQKGNDPVATGNRRADEAAKQAALSTRVLAETTKPAGKRTADGSEFEKRTADGSEFESPKKKAKVE

SEQ ID NO: 866 - protein, 2094 aa, synthetic construct
MPAAKRVKLDGGDKKYSIGLDIGTNSVGWAVITDEYKVPSKKFKVLGNTDRHSIKKNLIGALLFDSGETAEATRLKRTARRRYTRRKNRICYLQEIFSNEMAKVDDSFFHRLEESFLVEEDKKHERHPIFGNIVDEVAYHEKYPTIYHLRKKLVDSTDKADLRLIYLALAHMIKFRGHFLIEGDLNPDNSDVDKLFIQLVQTYNQLFEENPINASGVDAKAILSARLSKSRRLENLIAQLPGEKKNGLFGNLIALSLGLTPNFKSNFDLAEDAKLQLSKDTYDDDLDNLLAQIGDQYADLFLAAKNLSDAILLSDILRVNTEITKAPLSASMIKRYDEHHQDLTLLKALVRQQLPEKYKEIFFDQSKNGYAGYIDGGASQEEFYKFIKPILEKMDGTEELLVKLNREDLLRKQRTFDNGSIPHQIHLGELHAILRRQEDFYPFLKDNREKIEKILTFRIPYYVGPLARGNSRFAWMTRKSEETITPWNFEEVVDKGASAQSFIERMTNFDKNLPNEKVLPKHSLLYEYFTVYNELTKVKYVTEGMRKPAFLSGEQKKAIVDLLFKTNRKVTVKQLKEDYFKKIECFDSVEISGVEDRFNASLGTYHDLLKIIKDKDFLDNEENEDILEDIVLTLTLFEDREMIEERLKTYAHLFDDKVMKQLKRRRYTGWGRLSRKLINGIRDKQSGKTILDFLKSDGFANRNFMQLIHDDSLTFKEDIQKAQVSGQGDSLHEHIANLAGSPAIKKGILQTVKVVDELVKVMGRHKPENIVIEMARENQTTQKGQKNSRERMKRIEEGIKELGSQILKEHPVENTQLQNEKLYLYYLQNGRDMYVDQELDINRLSDYDVDHIVPQSFLKDDSIDNKVLTRSDKARGKSDNVPSEEVVKKMKNYWRQLLNAKLITQRKFDNLTKAERGGLSELDKAGFIKRQLVETRQITKHVAQILDSRMNTKYDENDKLIREVKVITLKSKLVSDFRKDFQFYKVREINNYHHAHDAYLNAVVGTALIKKYPKLESEFVYGDYKVYDVRKMIAKSEQEIGKATAKYFFYSNIMNFFKTEITLANGEIRKRPLIETNGETGEIVWDKGRDFATVRKVLSMPQVNIVKKTEVQTGGFSKESILPKRNSDKLIARKKDWDPKKYGGFDSPTVAYSVLVVAKVEKGKSKKLKSVKELLGITIMERSSFEKNPIDFLEAKGYKEVKKDLIIKLPKYSLFELENGRKRMLASAGELQKGNELALPSKYVNFLYLASHYEKLKGSPEDNEQKQLFVEQHKHYLDEIIEQISEFSKRVILADANLDKVLSAYNKHRDKPIREQAENIIHLFTLTNLGAPAAFKYFDTTIDRKRYTSTKEVLDATLIHQSITGLYETRIDLSQLGGDGGPAPEAAAKGGGGGVLNLEEEYRLHEKPVPSSIDPSWLQLFPTVWAERAGMGLANQVPPVVVELRSGASPVAVRQYPMSKEAREGIRPHIQRFLDLGVLVPCQSPWNTPLLPVKKPGTNDYRPVQDLREINKRVQDIHPTVPNPYNLLSSLPPSHTWYSVLDLKDAFFCLKLHPNSQPLFAFEWRDPEKGNTGQLTWTRLPQGFKNSPTLFNEALHRDLAPFRALNPQVVLLQYVDDLLVAAPTYRDCKEGTQKLLQELSKLGYRVSAKKAQLCQKEVTYLGYLLKEGKRWLTPARKATVMKIPPPTTPRQVREFLGTAGFCRLWIPGFASLAAPLYPLTKPSIPFIWTEEHQKAFDRIKEALLSAPALALPDLTKPFTLYVDERAGVARGVLTQTLGPWRRPVAYLSKKLDPVASGWPTCLKAVAAVALLLKDADKLTLGQNVTVIASHSLESIVRQPPDRWMTNARMTHYQSLLLNERVSFAPPAVLNPATLLPVESEATPVHRCSEILAEETGTRRDLKDQPLPGVPAWYTDGSSFIAEGKRRAGAAIVDGKRTVWASSLPEGTSAQKAELVALTQALRLAEGKDINIYTDSRYAFATAHIHGAIYKQRGWLTSAGKDIKNKEEILALLEAIHLPKRVAIIHCPGHQKGNDPVATGNRRADEAAKQAALSTRVLAETTKPAGKRTADGSEFEKRTADGSEFESPKKKAKVE

SEQ ID NO: 867 - protein, 2089 aa, synthetic construct
MPAAKRVKLDGGDKKYSIGLDIGTNSVGWAVITDEYKVPSKKFKVLGNTDRHSIKKNLIGALLFDSGETAEATRLKRTARRRYTRRKNRICYLQEIFSNEMAKVDDSFFHRLEESFLVEEDKKHERHPIFGNIVDEVAYHEKYPTIYHLRKKLVDSTDKADLRLIYLALAHMIKFRGHFLIEGDLNPDNSDVDKLFIQLVQTYNQLFEENPINASGVDAKAILSARLSKSRRLENLIAQLPGEKKNGLFGNLIALSLGLTPNFKSNFDLAEDAKLQLSKDTYDDDLDNLLAQIGDQYADLFLAAKNLSDAILLSDILRVNTEITKAPLSASMIKRYDEHHQDLTLLKALVRQQLPEKYKEIFFDQSKNGYAGYIDGGASQEEFYKFIKPILEKMDGTEELLVKLNREDLLRKQRTFDNGSIPHQIHLGELHAILRRQEDFYPFLKDNREKIEKILTFRIPYYVGPLARGNSRFAWMTRKSEETITPWNFEEVVDKGASAQSFIERMTNFDKNLPNEKVLPKHSLLYEYFTVYNELTKVKYVTEGMRKPAFLSGEQKKAIVDLLFKTNRKVTVKQLKEDYFKKIECFDSVEISGVEDRFNASLGTYHDLLKIIKDKDFLDNEENEDILEDIVLTLTLFEDREMIEERLKTYAHLFDDKVMKQLKRRRYTGWGRLSRKLINGIRDKQSGKTILDFLKSDGFANRNFMQLIHDDSLTFKEDIQKAQVSGQGDSLHEHIANLAGSPAIKKGILQTVKVVDELVKVMGRHKPENIVIEMARENQTTQKGQKNSRERMKRIEEGIKELGSQILKEHPVENTQLQNEKLYLYYLQNGRDMYVDQELDINRLSDYDVDHIVPQSFLKDDSIDNKVLTRSDKARGKSDNVPSEEVVKKMKNYWRQLLNAKLITQRKFDNLTKAERGGLSELDKAGFIKRQLVETRQITKHVAQILDSRMNTKYDENDKLIREVKVITLKSKLVSDFRKDFQFYKVREINNYHHAHDAYLNAVVGTALIKKYPKLESEFVYGDYKVYDVRKMIAKSEQEIGKATAKYFFYSNIMNFFKTEITLANGEIRKRPLIETNGETGEIVWDKGRDFATVRKVLSMPQVNIVKKTEVQTGGFSKESILPKRNSDKLIARKKDWDPKKYGGFDSPTVAYSVLVVAKVEKGKSKKLKSVKELLGITIMERSSFEKNPIDFLEAKGYKEVKKDLIIKLPKYSLFELENGRKRMLASAGELQKGNELALPSKYVNFLYLASHYEKLKGSPEDNEQKQLFVEQHKHYLDEIIEQISEFSKRVILADANLDKVLSAYNKHRDKPIREQAENIIHLFTLTNLGAPAAFKYFDTTIDRKRYTSTKEVLDATLIHQSITGLYETRIDLSQLGGDGGGSSPAPGGVLNLEEEYRLHEKPVPSSIDPSWLQLFPTVWAERAGMGLANQVPPVVVELRSGASPVAVRQYPMSKEAREGIRPHIQRFLDLGVLVPCQSPWNTPLLPVKKPGTNDYRPVQDLREINKRVQDIHPTVPNPYNLLSSLPPSHTWYSVLDLKDAFFCLKLHPNSQPLFAFEWRDPEKGNTGQLTWTRLPQGFKNSPTLFNEALHRDLAPFRALNPQVVLLQYVDDLLVAAPTYRDCKEGTQKLLQELSKLGYRVSAKKAQLCQKEVTYLGYLLKEGKRWLTPARKATVMKIPPPTTPRQVREFLGTAGFCRLWIPGFASLAAPLYPLTKPSIPFIWTEEHQKAFDRIKEALLSAPALALPDLTKPFTLYVDERAGVARGVLTQTLGPWRRPVAYLSKKLDPVASGWPTCLKAVAAVALLLKDADKLTLGQNVTVIASHSLESIVRQPPDRWMTNARMTHYQSLLLNERVSFAPPAVLNPATLLPVESEATPVHRCSEILAEETGTRRDLKDQPLPGVPAWYTDGSSFIAEGKRRAGAAIVDGKRTVWASSLPEGTSAQKAELVALTQALRLAEGKDINIYTDSRYAFATAHIHGAIYKQRGWLTSAGKDIKNKEEILALLEAIHLPKRVAIIHCPGHQKGNDPVATGNRRADEAAKQAALSTRVLAETTKPAGKRTADGSEFEKRTADGSEFESPKKKAKVE

SEQ ID NO: 868 - protein, 2092 aa, synthetic construct
MPAAKRVKLDGGDKKYSIGLDIGTNSVGWAVITDEYKVPSKKFKVLGNTDRHSIKKNLIGALLFDSGETAEATRLKRTARRRYTRRKNRICYLQEIFSNEMAKVDDSFFHRLEESFLVEEDKKHERHPIFGNIVDEVAYHEKYPTIYHLRKKLVDSTDKADLRLIYLALAHMIKFRGHFLIEGDLNPDNSDVDKLFIQLVQTYNQLFEENPINASGVDAKAILSARLSKSRRLENLIAQLPGEKKNGLFGNLIALSLGLTPNFKSNFDLAEDAKLQLSKDTYDDDLDNLLAQIGDQYADLFLAAKNLSDAILLSDILRVNTEITKAPLSASMIKRYDEHHQDLTLLKALVRQQLPEKYKEIFFDQSKNGYAGYIDGGASQEEFYKFIKPILEKMDGTEELLVKLNREDLLRKQRTFDNGSIPHQIHLGELHAILRRQEDFYPFLKDNREKIEKILTFRIPYYVGPLARGNSRFAWMTRKSEETITPWNFEEVVDKGASAQSFIERMTNFDKNLPNEKVLPKHSLLYEYFTVYNELTKVKYVTEGMRKPAFLSGEQKKAIVDLLFKTNRKVTVKQLKEDYFKKIECFDSVEISGVEDRFNASLGTYHDLLKIIKDKDFLDNEENEDILEDIVLTLTLFEDREMIEERLKTYAHLFDDKVMKQLKRRRYTGWGRLSRKLINGIRDKQSGKTILDFLKSDGFANRNFMQLIHDDSLTFKEDIQKAQVSGQGDSLHEHIANLAGSPAIKKGILQTVKVVDELVKVMGRHKPENIVIEMARENQTTQKGQKNSRERMKRIEEGIKELGSQILKEHPVENTQLQNEKLYLYYLQNGRDMYVDQELDINRLSDYDVDHIVPQSFLKDDSIDNKVLTRSDKARGKSDNVPSEEVVKKMKNYWRQLLNAKLITQRKFDNLTKAERGGLSELDKAGFIKRQLVETRQITKHVAQILDSRMNTKYDENDKLIREVKVITLKSKLVSDFRKDFQFYKVREINNYHHAHDAYLNAVVGTALIKKYPKLESEFVYGDYKVYDVRKMIAKSEQEIGKATAKYFFYSNIMNFFKTEITLANGEIRKRPLIETNGETGEIVWDKGRDFATVRKVLSMPQVNIVKKTEVQTGGFSKESILPKRNSDKLIARKKDWDPKKYGGFDSPTVAYSVLVVAKVEKGKSKKLKSVKELLGITIMERSSFEKNPIDFLEAKGYKEVKKDLIIKLPKYSLFELENGRKRMLASAGELQKGNELALPSKYVNFLYLASHYEKLKGSPEDNEQKQLFVEQHKHYLDEIIEQISEFSKRVILADANLDKVLSAYNKHRDKPIREQAENIIHLFTLTNLGAPAAFKYFDTTIDRKRYTSTKEVLDATLIHQSITGLYETRIDLSQLGGDGGGSSGGGPAPGGVLNLEEEYRLHEKPVPSSIDPSWLQLFPTVWAERAGMGLANQVPPVVVELRSGASPVAVRQYPMSKEAREGIRPHIQRFLDLGVLVPCQSPWNTPLLPVKKPGTNDYRPVQDLREINKRVQDIHPTVPNPYNLLSSLPPSHTWYSVLDLKDAFFCLKLHPNSQPLFAFEWRDPEKGNTGQLTWTRLPQGFKNSPTLFNEALHRDLAPFRALNPQVVLLQYVDDLLVAAPTYRDCKEGTQKLLQELSKLGYRVSAKKAQLCQKEVTYLGYLLKEGKRWLTPARKATVMKIPPPTTPRQVREFLGTAGFCRLWIPGFASLAAPLYPLTKPSIPFIWTEEHQKAFDRIKEALLSAPALALPDLTKPFTLYVDERAGVARGVLTQTLGPWRRPVAYLSKKLDPVASGWPTCLKAVAAVALLLKDADKLTLGQNVTVIASHSLESIVRQPPDRWMTNARMTHYQSLLLNERVSFAPPAVLNPATLLPVESEATPVHRCSEILAEETGTRRDLKDQPLPGVPAWYTDGSSFIAEGKRRAGAAIVDGKRTVWASSLPEGTSAQKAELVALTQALRLAEGKDINIYTDSRYAFATAHIHGAIYKQRGWLTSAGKDIKNKEEILALLEAIHLPKRVAIIHCPGHQKGNDPVATGNRRADEAAKQAALSTRVLAETTKPAGKRTADGSEFEKRTADGSEFESPKKKAKVE

SEQ ID NO: 869 - protein, 2089 aa, synthetic construct
MPAAKRVKLDGGDKKYSIGLDIGTNSVGWAVITDEYKVPSKKFKVLGNTDRHSIKKNLIGALLFDSGETAEATRLKRTARRRYTRRKNRICYLQEIFSNEMAKVDDSFFHRLEESFLVEEDKKHERHPIFGNIVDEVAYHEKYPTIYHLRKKLVDSTDKADLRLIYLALAHMIKFRGHFLIEGDLNPDNSDVDKLFIQLVQTYNQLFEENPINASGVDAKAILSARLSKSRRLENLIAQLPGEKKNGLFGNLIALSLGLTPNFKSNFDLAEDAKLQLSKDTYDDDLDNLLAQIGDQYADLFLAAKNLSDAILLSDILRVNTEITKAPLSASMIKRYDEHHQDLTLLKALVRQQLPEKYKEIFFDQSKNGYAGYIDGGASQEEFYKFIKPILEKMDGTEELLVKLNREDLLRKQRTFDNGSIPHQIHLGELHAILRRQEDFYPFLKDNREKIEKILTFRIPYYVGPLARGNSRFAWMTRKSEETITPWNFEEVVDKGASAQSFIERMTNFDKNLPNEKVLPKHSLLYEYFTVYNELTKVKYVTEGMRKPAFLSGEQKKAIVDLLFKTNRKVTVKQLKEDYFKKIECFDSVEISGVEDRFNASLGTYHDLLKIIKDKDFLDNEENEDILEDIVLTLTLFEDREMIEERLKTYAHLFDDKVMKQLKRRRYTGWGRLSRKLINGIRDKQSGKTILDFLKSDGFANRNFMQLIHDDSLTFKEDIQKAQVSGQGDSLHEHIANLAGSPAIKKGILQTVKVVDELVKVMGRHKPENIVIEMARENQTTQKGQKNSRERMKRIEEGIKELGSQILKEHPVENTQLQNEKLYLYYLQNGRDMYVDQELDINRLSDYDVDHIVPQSFLKDDSIDNKVLTRSDKARGKSDNVPSEEVVKKMKNYWRQLLNAKLITQRKFDNLTKAERGGLSELDKAGFIKRQLVETRQITKHVAQILDSRMNTKYDENDKLIREVKVITLKSKLVSDFRKDFQFYKVREINNYHHAHDAYLNAVVGTALIKKYPKLESEFVYGDYKVYDVRKMIAKSEQEIGKATAKYFFYSNIMNFFKTEITLANGEIRKRPLIETNGETGEIVWDKGRDFATVRKVLSMPQVNIVKKTEVQTGGFSKESILPKRNSDKLIARKKDWDPKKYGGFDSPTVAYSVLVVAKVEKGKSKKLKSVKELLGITIMERSSFEKNPIDFLEAKGYKEVKKDLIIKLPKYSLFELENGRKRMLASAGELQKGNELALPSKYVNFLYLASHYEKLKGSPEDNEQKQLFVEQHKHYLDEIIEQISEFSKRVILADANLDKVLSAYNKHRDKPIREQAENIIHLFTLTNLGAPAAFKYFDTTIDRKRYTSTKEVLDATLIHQSITGLYETRIDLSQLGGDGGGGSGGSGGVLNLEEEYRLHEKPVPSSIDPSWLQLFPTVWAERAGMGLANQVPPVVVELRSGASPVAVRQYPMSKEAREGIRPHIQRFLDLGVLVPCQSPWNTPLLPVKKPGTNDYRPVQDLREINKRVQDIHPTVPNPYNLLSSLPPSHTWYSVLDLKDAFFCLKLHPNSQPLFAFEWRDPEKGNTGQLTWTRLPQGFKNSPTLFNEALHRDLAPFRALNPQVVLLQYVDDLLVAAPTYRDCKEGTQKLLQELSKLGYRVSAKKAQLCQKEVTYLGYLLKEGKRWLTPARKATVMKIPPPTTPRQVREFLGTAGFCRLWIPGFASLAAPLYPLTKPSIPFIWTEEHQKAFDRIKEALLSAPALALPDLTKPFTLYVDERAGVARGVLTQTLGPWRRPVAYLSKKLDPVASGWPTCLKAVAAVALLLKDADKLTLGQNVTVIASHSLESIVRQPPDRWMTNARMTHYQSLLLNERVSFAPPAVLNPATLLPVESEATPVHRCSEILAEETGTRRDLKDQPLPGVPAWYTDGSSFIAEGKRRAGAAIVDGKRTVWASSLPEGTSAQKAELVALTQALRLAEGKDINIYTDSRYAFATAHIHGAIYKQRGWLTSAGKDIKNKEEILALLEAIHLPKRVAIIHCPGHQKGNDPVATGNRRADEAAKQAALSTRVLAETTKPAGKRTADGSEFEKRTADGSEFESPKKKAKVE

SEQ ID NO: 870 - protein, 2094 aa, synthetic construct
MPAAKRVKLDGGDKKYSIGLDIGTNSVGWAVITDEYKVPSKKFKVLGNTDRHSIKKNLIGALLFDSGETAEATRLKRTARRRYTRRKNRICYLQEIFSNEMAKVDDSFFHRLEESFLVEEDKKHERHPIFGNIVDEVAYHEKYPTIYHLRKKLVDSTDKADLRLIYLALAHMIKFRGHFLIEGDLNPDNSDVDKLFIQLVQTYNQLFEENPINASGVDAKAILSARLSKSRRLENLIAQLPGEKKNGLFGNLIALSLGLTPNFKSNFDLAEDAKLQLSKDTYDDDLDNLLAQIGDQYADLFLAAKNLSDAILLSDILRVNTEITKAPLSASMIKRYDEHHQDLTLLKALVRQQLPEKYKEIFFDQSKNGYAGYIDGGASQEEFYKFIKPILEKMDGTEELLVKLNREDLLRKQRTFDNGSIPHQIHLGELHAILRRQEDFYPFLKDNREKIEKILTFRIPYYVGPLARGNSRFAWMTRKSEETITPWNFEEVVDKGASAQSFIERMTNFDKNLPNEKVLPKHSLLYEYFTVYNELTKVKYVTEGMRKPAFLSGEQKKAIVDLLFKTNRKVTVKQLKEDYFKKIECFDSVEISGVEDRFNASLGTYHDLLKIIKDKDFLDNEENEDILEDIVLTLTLFEDREMIEERLKTYAHLFDDKVMKQLKRRRYTGWGRLSRKLINGIRDKQSGKTILDFLKSDGFANRNFMQLIHDDSLTFKEDIQKAQVSGQGDSLHEHIANLAGSPAIKKGILQTVKVVDELVKVMGRHKPENIVIEMARENQTTQKGQKNSRERMKRIEEGIKELGSQILKEHPVENTQLQNEKLYLYYLQNGRDMYVDQELDINRLSDYDVDHIVPQSFLKDDSIDNKVLTRSDKARGKSDNVPSEEVVKKMKNYWRQLLNAKLITQRKFDNLTKAERGGLSELDKAGFIKRQLVETRQITKHVAQILDSRMNTKYDENDKLIREVKVITLKSKLVSDFRKDFQFYKVREINNYHHAHDAYLNAVVGTALIKKYPKLESEFVYGDYKVYDVRKMIAKSEQEIGKATAKYFFYSNIMNFFKTEITLANGEIRKRPLIETNGETGEIVWDKGRDFATVRKVLSMPQVNIVKKTEVQTGGFSKESILPKRNSDKLIARKKDWDPKKYGGFDSPTVAYSVLVVAKVEKGKSKKLKSVKELLGITIMERSSFEKNPIDFLEAKGYKEVKKDLIIKLPKYSLFELENGRKRMLASAGELQKGNELALPSKYVNFLYLASHYEKLKGSPEDNEQKQLFVEQHKHYLDEIIEQISEFSKRVILADANLDKVLSAYNKHRDKPIREQAENIIHLFTLTNLGAPAAFKYFDTTIDRKRYTSTKEVLDATLIHQSITGLYETRIDLSQLGGDGGGGGPAPEAAAKGGVLNLEEEYRLHEKPVPSSIDPSWLQLFPTVWAERAGMGLANQVPPVVVELRSGASPVAVRQYPMSKEAREGIRPHIQRFLDLGVLVPCQSPWNTPLLPVKKPGTNDYRPVQDLREINKRVQDIHPTVPNPYNLLSSLPPSHTWYSVLDLKDAFFCLKLHPNSQPLFAFEWRDPEKGNTGQLTWTRLPQGFKNSPTLFNEALHRDLAPFRALNPQVVLLQYVDDLLVAAPTYRDCKEGTQKLLQELSKLGYRVSAKKAQLCQKEVTYLGYLLKEGKRWLTPARKATVMKIPPPTTPRQVREFLGTAGFCRLWIPGFASLAAPLYPLTKPSIPFIWTEEHQKAFDRIKEALLSAPALALPDLTKPFTLYVDERAGVARGVLTQTLGPWRRPVAYLSKKLDPVASGWPTCLKAVAAVALLLKDADKLTLGQNVTVIASHSLESIVRQPPDRWMTNARMTHYQSLLLNERVSFAPPAVLNPATLLPVESEATPVHRCSEILAEETGTRRDLKDQPLPGVPAWYTDGSSFIAEGKRRAGAAIVDGKRTVWASSLPEGTSAQKAELVALTQALRLAEGKDINIYTDSRYAFATAHIHGAIYKQRGWLTSAGKDIKNKEEILALLEAIHLPKRVAIIHCPGHQKGNDPVATGNRRADEAAKQAALSTRVLAETTKPAGKRTADGSEFEKRTADGSEFESPKKKAKVE

SEQ ID NO: 871 - protein, 2129 aa, synthetic construct
MPAAKRVKLDGGDKKYSIGLDIGTNSVGWAVITDEYKVPSKKFKVLGNTDRHSIKKNLIGALLFDSGETAEATRLKRTARRRYTRRKNRICYLQEIFSNEMAKVDDSFFHRLEESFLVEEDKKHERHPIFGNIVDEVAYHEKYPTIYHLRKKLVDSTDKADLRLIYLALAHMIKFRGHFLIEGDLNPDNSDVDKLFIQLVQTYNQLFEENPINASGVDAKAILSARLSKSRRLENLIAQLPGEKKNGLFGNLIALSLGLTPNFKSNFDLAEDAKLQLSKDTYDDDLDNLLAQIGDQYADLFLAAKNLSDAILLSDILRVNTEITKAPLSASMIKRYDEHHQDLTLLKALVRQQLPEKYKEIFFDQSKNGYAGYIDGGASQEEFYKFIKPILEKMDGTEELLVKLNREDLLRKQRTFDNGSIPHQIHLGELHAILRRQEDFYPFLKDNREKIEKILTFRIPYYVGPLARGNSRFAWMTRKSEETITPWNFEEVVDKGASAQSFIERMTNFDKNLPNEKVLPKHSLLYEYFTVYNELTKVKYVTEGMRKPAFLSGEQKKAIVDLLFKTNRKVTVKQLKEDYFKKIECFDSVEISGVEDRFNASLGTYHDLLKIIKDKDFLDNEENEDILEDIVLTLTLFEDREMIEERLKTYAHLFDDKVMKQLKRRRYTGWGRLSRKLINGIRDKQSGKTILDFLKSDGFANRNFMQLIHDDSLTFKEDIQKAQVSGQGDSLHEHIANLAGSPAIKKGILQTVKVVDELVKVMGRHKPENIVIEMARENQTTQKGQKNSRERMKRIEEGIKELGSQILKEHPVENTQLQNEKLYLYYLQNGRDMYVDQELDINRLSDYDVDHIVPQSFLKDDSIDNKVLTRSDKARGKSDNVPSEEVVKKMKNYWRQLLNAKLITQRKFDNLTKAERGGLSELDKAGFIKRQLVETRQITKHVAQILDSRMNTKYDENDKLIREVKVITLKSKLVSDFRKDFQFYKVREINNYHHAHDAYLNAVVGTALIKKYPKLESEFVYGDYKVYDVRKMIAKSEQEIGKATAKYFFYSNIMNFFKTEITLANGEIRKRPLIETNGETGEIVWDKGRDFATVRKVLSMPQVNIVKKTEVQTGGFSKESILPKRNSDKLIARKKDWDPKKYGGFDSPTVAYSVLVVAKVEKGKSKKLKSVKELLGITIMERSSFEKNPIDFLEAKGYKEVKKDLIIKLPKYSLFELENGRKRMLASAGELQKGNELALPSKYVNFLYLASHYEKLKGSPEDNEQKQLFVEQHKHYLDEIIEQISEFSKRVILADANLDKVLSAYNKHRDKPIREQAENIIHLFTLTNLGAPAAFKYFDTTIDRKRYTSTKEVLDATLIHQSITGLYETRIDLSQLGGDGGAEAAAKEAAAKEAAAKEAAAKALEAEAAAKEAAAKEAAAKEAAAKAGGVLNLEEEYRLHEKPVPSSIDPSWLQLFPTVWAERAGMGLANQVPPVVVELRSGASPVAVRQYPMSKEAREGIRPHIQRFLDLGVLVPCQSPWNTPLLPVKKPGTNDYRPVQDLREINKRVQDIHPTVPNPYNLLSSLPPSHTWYSVLDLKDAFFCLKLHPNSQPLFAFEWRDPEKGNTGQLTWTRLPQGFKNSPTLFNEALHRDLAPFRALNPQVVLLQYVDDLLVAAPTYRDCKEGTQKLLQELSKLGYRVSAKKAQLCQKEVTYLGYLLKEGKRWLTPARKATVMKIPPPTTPRQVREFLGKAGFCRLFIPGFASLAAPLYPLTKPSIPFIWTEEHQKAFDRIKEALLSAPALALPDLTKPFTLYVDERAGVARGVLTQTLGPWRRPVAYLSKKLDPVASGWPTCLKAVAAVALLLKDADKLTLGQNVTVIASHSLESIVRQPPDRWMTNARMTHYQSLLLNERVSFAPPAVLNPATLLPVESEATPVHRCSEILAEETGTRRDLKDQPLPGVPAWYTDGSSFIAEGKRRAGAAIVDGKRTVWASSLPEGTSAQKAELVALTQALRLAEGKDINIYTDSRYAFATAHIHGAIYKQRGWLTSAGKDIKNKEEILALLEAIHLPKRVAIIHCPGHQKGNDPVATGNRRADEAAKQAALSTRVLAETTKPAGKRTADGSEFEKRTADGSEFESPKKKAKVE

SEQ ID NO: 872 - protein, 2092 aa, synthetic construct
MPAAKRVKLDGGDKKYSIGLDIGTNSVGWAVITDEYKVPSKKFKVLGNTDRHSIKKNLIGALLFDSGETAEATRLKRTARRRYTRRKNRICYLQEIFSNEMAKVDDSFFHRLEESFLVEEDKKHERHPIFGNIVDEVAYHEKYPTIYHLRKKLVDSTDKADLRLIYLALAHMIKFRGHFLIEGDLNPDNSDVDKLFIQLVQTYNQLFEENPINASGVDAKAILSARLSKSRRLENLIAQLPGEKKNGLFGNLIALSLGLTPNFKSNFDLAEDAKLQLSKDTYDDDLDNLLAQIGDQYADLFLAAKNLSDAILLSDILRVNTEITKAPLSASMIKRYDEHHQDLTLLKALVRQQLPEKYKEIFFDQSKNGYAGYIDGGASQEEFYKFIKPILEKMDGTEELLVKLNREDLLRKQRTFDNGSIPHQIHLGELHAILRRQEDFYPFLKDNREKIEKILTFRIPYYVGPLARGNSRFAWMTRKSEETITPWNFEEVVDKGASAQSFIERMTNFDKNLPNEKVLPKHSLLYEYFTVYNELTKVKYVTEGMRKPAFLSGEQKKAIVDLLFKTNRKVTVKQLKEDYFKKIECFDSVEISGVEDRFNASLGTYHDLLKIIKDKDFLDNEENEDILEDIVLTLTLFEDREMIEERLKTYAHLFDDKVMKQLKRRRYTGWGRLSRKLINGIRDKQSGKTILDFLKSDGFANRNFMQLIHDDSLTFKEDIQKAQVSGQGDSLHEHIANLAGSPAIKKGILQTVKVVDELVKVMGRHKPENIVIEMARENQTTQKGQKNSRERMKRIEEGIKELGSQILKEHPVENTQLQNEKLYLYYLQNGRDMYVDQELDINRLSDYDVDHIVPQSFLKDDSIDNKVLTRSDKARGKSDNVPSEEVVKKMKNYWRQLLNAKLITQRKFDNLTKAERGGLSELDKAGFIKRQLVETRQITKHVAQILDSRMNTKYDENDKLIREVKVITLKSKLVSDFRKDFQFYKVREINNYHHAHDAYLNAVVGTALIKKYPKLESEFVYGDYKVYDVRKMIAKSEQEIGKATAKYFFYSNIMNFFKTEITLANGEIRKRPLIETNGETGEIVWDKGRDFATVRKVLSMPQVNIVKKTEVQTGGFSKESILPKRNSDKLIARKKDWDPKKYGGFDSPTVAYSVLVVAKVEKGKSKKLKSVKELLGITIMERSSFEKNPIDFLEAKGYKEVKKDLIIKLPKYSLFELENGRKRMLASAGELQKGNELALPSKYVNFLYLASHYEKLKGSPEDNEQKQLFVEQHKHYLDEIIEQISEFSKRVILADANLDKVLSAYNKHRDKPIREQAENIIHLFTLTNLGAPAAFKYFDTTIDRKRYTSTKEVLDATLIHQSITGLYETRIDLSQLGGDGGPAPGGGGSSGGVLNLEEEYRLHEKPVPSSIDPSWLQLFPTVWAERAGMGLANQVPPVVVELRSGASPVAVRQYPMSKEAREGIRPHIQRFLDLGVLVPCQSPWNTPLLPVKKPGTNDYRPVQDLREINKRVQDIHPTVPNPYNLLSSLPPSHTWYSVLDLKDAFFCLKLHPNSQPLFAFEWRDPEKGNTGQLTWTRLPQGFKNSPTLFNEALHRDLAPFRALNPQVVLLQYVDDLLVAAPTYRDCKEGTQKLLQELSKLGYRVSAKKAQLCQKEVTYLGYLLKEGKRWLTPARKATVMKIPPPTTPRQVREFLGKAGFCRLFIPGFASLAAPLYPLTKPSIPFIWTEEHQKAFDRIKEALLSAPALALPDLTKPFTLYVDERAGVARGVLTQTLGPWRRPVAYLSKKLDPVASGWPTCLKAVAAVALLLKDADKLTLGQNVTVIASHSLESIVRQPPDRWMTNARMTHYQSLLLNERVSFAPPAVLNPATLLPVESEATPVHRCSEILAEETGTRRDLKDQPLPGVPAWYTDGSSFIAEGKRRAGAAIVDGKRTVWASSLPEGTSAQKAELVALTQALRLAEGKDINIYTDSRYAFATAHIHGAIYKQRGWLTSAGKDIKNKEEILALLEAIHLPKRVAIIHCPGHQKGNDPVATGNRRADEAAKQAALSTRVLAETTKPAGKRTADGSEFEKRTADGSEFESPKKKAKVE

SEQ ID NO: 873 - protein, 2108 aa, synthetic construct
MPAAKRVKLDGGDKKYSIGLDIGTNSVGWAVITDEYKVPSKKFKVLGNTDRHSIKKNLIGALLFDSGETAEATRLKRTARRRYTRRKNRICYLQEIFSNEMAKVDDSFFHRLEESFLVEEDKKHERHPIFGNIVDEVAYHEKYPTIYHLRKKLVDSTDKADLRLIYLALAHMIKFRGHFLIEGDLNPDNSDVDKLFIQLVQTYNQLFEENPINASGVDAKAILSARLSKSRRLENLIAQLPGEKKNGLFGNLIALSLGLTPNFKSNFDLAEDAKLQLSKDTYDDDLDNLLAQIGDQYADLFLAAKNLSDAILLSDILRVNTEITKAPLSASMIKRYDEHHQDLTLLKALVRQQLPEKYKEIFFDQSKNGYAGYIDGGASQEEFYKFIKPILEKMDGTEELLVKLNREDLLRKQRTFDNGSIPHQIHLGELHAILRRQEDFYPFLKDNREKIEKILTFRIPYYVGPLARGNSRFAWMTRKSEETITPWNFEEVVDKGASAQSFIERMTNFDKNLPNEKVLPKHSLLYEYFTVYNELTKVKYVTEGMRKPAFLSGEQKKAIVDLLFKTNRKVTVKQLKEDYFKKIECFDSVEISGVEDRFNASLGTYHDLLKIIKDKDFLDNEENEDILEDIVLTLTLFEDREMIEERLKTYAHLFDDKVMKQLKRRRYTGWGRLSRKLINGIRDKQSGKTILDFLKSDGFANRNFMQLIHDDSLTFKEDIQKAQVSGQGDSLHEHIANLAGSPAIKKGILQTVKVVDELVKVMGRHKPENIVIEMARENQTTQKGQKNSRERMKRIEEGIKELGSQILKEHPVENTQLQNEKLYLYYLQNGRDMYVDQELDINRLSDYDVDHIVPQSFLKDDSIDNKVLTRSDKARGKSDNVPSEEVVKKMKNYWRQLLNAKLITQRKFDNLTKAERGGLSELDKAGFIKRQLVETRQITKHVAQILDSRMNTKYDENDKLIREVKVITLKSKLVSDFRKDFQFYKVREINNYHHAHDAYLNAVVGTALIKKYPKLESEFVYGDYKVYDVRKMIAKSEQEIGKATAKYFFYSNIMNFFKTEITLANGEIRKRPLIETNGETGEIVWDKGRDFATVRKVLSMPQVNIVKKTEVQTGGFSKESILPKRNSDKLIARKKDWDPKKYGGFDSPTVAYSVLVVAKVEKGKSKKLKSVKELLGITIMERSSFEKNPIDFLEAKGYKEVKKDLIIKLPKYSLFELENGRKRMLASAGELQKGNELALPSKYVNFLYLASHYEKLKGSPEDNEQKQLFVEQHKHYLDEIIEQISEFSKRVILADANLDKVLSAYNKHRDKPIREQAENIIHLFTLTNLGAPAAFKYFDTTIDRKRYTSTKEVLDATLIHQSITGLYETRIDLSQLGGDGGGGGGSGGGGSGGGGSGGGGSGGGGSGGVLNLEEEYRLHEKPVPSSIDPSWLQLFPTVWAERAGMGLANQVPPVVVELRSGASPVAVRQYPMSKEAREGIRPHIQRFLDLGVLVPCQSPWNTPLLPVKKPGTNDYRPVQDLREINKRVQDIHPTVPNPYNLLSSLPPSHTWYSVLDLKDAFFCLKLHPNSQPLFAFEWRDPEKGNTGQLTWTRLPQGFKNSPTLFNEALHRDLAPFRALNPQVVLLQYVDDLLVAAPTYRDCKEGTQKLLQELSKLGYRVSAKKAQLCQKEVTYLGYLLKEGKRWLTPARKATVMKIPPPTTPRQVREFLGKAGFCRLFIPGFASLAAPLYPLTKPSIPFIWTEEHQKAFDRIKEALLSAPALALPDLTKPFTLYVDERAGVARGVLTQTLGPWRRPVAYLSKKLDPVASGWPTCLKAVAAVALLLKDADKLTLGQNVTVIASHSLESIVRQPPDRWMTNARMTHYQSLLLNERVSFAPPAVLNPATLLPVESEATPVHRCSEILAEETGTRRDLKDQPLPGVPAWYTDGSSFIAEGKRRAGAAIVDGKRTVWASSLPEGTSAQKAELVALTQALRLAEGKDINIYTDSRYAFATAHIHGAIYKQRGWLTSAGKDIKNKEEILALLEAIHLPKRVAIIHCPGHQKGNDPVATGNRRADEAAKQAALSTRVLAETTKPAGKRTADGSEFEKRTADGSEFESPKKKAKVE

SEQ ID NO: 874 - protein, 2094 aa, synthetic construct
MPAAKRVKLDGGDKKYSIGLDIGTNSVGWAVITDEYKVPSKKFKVLGNTDRHSIKKNLIGALLFDSGETAEATRLKRTARRRYTRRKNRICYLQEIFSNEMAKVDDSFFHRLEESFLVEEDKKHERHPIFGNIVDEVAYHEKYPTIYHLRKKLVDSTDKADLRLIYLALAHMIKFRGHFLIEGDLNPDNSDVDKLFIQLVQTYNQLFEENPINASGVDAKAILSARLSKSRRLENLIAQLPGEKKNGLFGNLIALSLGLTPNFKSNFDLAEDAKLQLSKDTYDDDLDNLLAQIGDQYADLFLAAKNLSDAILLSDILRVNTEITKAPLSASMIKRYDEHHQDLTLLKALVRQQLPEKYKEIFFDQSKNGYAGYIDGGASQEEFYKFIKPILEKMDGTEELLVKLNREDLLRKQRTFDNGSIPHQIHLGELHAILRRQEDFYPFLKDNREKIEKILTFRIPYYVGPLARGNSRFAWMTRKSEETITPWNFEEVVDKGASAQSFIERMTNFDKNLPNEKVLPKHSLLYEYFTVYNELTKVKYVTEGMRKPAFLSGEQKKAIVDLLFKTNRKVTVKQLKEDYFKKIECFDSVEISGVEDRFNASLGTYHDLLKIIKDKDFLDNEENEDILEDIVLTLTLFEDREMIEERLKTYAHLFDDKVMKQLKRRRYTGWGRLSRKLINGIRDKQSGKTILDFLKSDGFANRNFMQLIHDDSLTFKEDIQKAQVSGQGDSLHEHIANLAGSPAIKKGILQTVKVVDELVKVMGRHKPENIVIEMARENQTTQKGQKNSRERMKRIEEGIKELGSQILKEHPVENTQLQNEKLYLYYLQNGRDMYVDQELDINRLSDYDVDHIVPQSFLKDDSIDNKVLTRSDKARGKSDNVPSEEVVKKMKNYWRQLLNAKLITQRKFDNLTKAERGGLSELDKAGFIKRQLVETRQITKHVAQILDSRMNTKYDENDKLIREVKVITLKSKLVSDFRKDFQFYKVREINNYHHAHDAYLNAVVGTALIKKYPKLESEFVYGDYKVYDVRKMIAKSEQEIGKATAKYFFYSNIMNFFKTEITLANGEIRKRPLIETNGETGEIVWDKGRDFATVRKVLSMPQVNIVKKTEVQTGGFSKESILPKRNSDKLIARKKDWDPKKYGGFDSPTVAYSVLVVAKVEKGKSKKLKSVKELLGITIMERSSFEKNPIDFLEAKGYKEVKKDLIIKLPKYSLFELENGRKRMLASAGELQKGNELALPSKYVNFLYLASHYEKLKGSPEDNEQKQLFVEQHKHYLDEIIEQISEFSKRVILADANLDKVLSAYNKHRDKPIREQAENIIHLFTLTNLGAPAAFKYFDTTIDRKRYTSTKEVLDATLIHQSITGLYETRIDLSQLGGDGGEAAAKPAPGSSGGVLNLEEEYRLHEKPVPSSIDPSWLQLFPTVWAERAGMGLANQVPPVVVELRSGASPVAVRQYPMSKEAREGIRPHIQRFLDLGVLVPCQSPWNTPLLPVKKPGTNDYRPVQDLREINKRVQDIHPTVPNPYNLLSSLPPSHTWYSVLDLKDAFFCLKLHPNSQPLFAFEWRDPEKGNTGQLTWTRLPQGFKNSPTLFNEALHRDLAPFRALNPQVVLLQYVDDLLVAAPTYRDCKEGTQKLLQELSKLGYRVSAKKAQLCQKEVTYLGYLLKEGKRWLTPARKATVMKIPPPTTPRQVREFLGKAGFCRLFIPGFASLAAPLYPLTKPSIPFIWTEEHQKAFDRIKEALLSAPALALPDLTKPFTLYVDERAGVARGVLTQTLGPWRRPVAYLSKKLDPVASGWPTCLKAVAAVALLLKDADKLTLGQNVTVIASHSLESIVRQPPDRWMTNARMTHYQSLLLNERVSFAPPAVLNPATLLPVESEATPVHRCSEILAEETGTRRDLKDQPLPGVPAWYTDGSSFIAEGKRRAGAAIVDGKRTVWASSLPEGTSAQKAELVALTQALRLAEGKDINIYTDSRYAFATAHIHGAIYKQRGWLTSAGKDIKNKEEILALLEAIHLPKRVAIIHCPGHQKGNDPVATGNRRADEAAKQAALSTRVLAETTKPAGKRTADGSEFEKRTADGSEFESPKKKAKVE

SEQ ID NO: 875 - protein, 2092 aa, synthetic construct
MPAAKRVKLDGGDKKYSIGLDIGTNSVGWAVITDEYKVPSKKFKVLGNTDRHSIKKNLIGALLFDSGETAEATRLKRTARRRYTRRKNRICYLQEIFSNEMAKVDDSFFHRLEESFLVEEDKKHERHPIFGNIVDEVAYHEKYPTIYHLRKKLVDSTDKADLRLIYLALAHMIKFRGHFLIEGDLNPDNSDVDKLFIQLVQTYNQLFEENPINASGVDAKAILSARLSKSRRLENLIAQLPGEKKNGLFGNLIALSLGLTPNFKSNFDLAEDAKLQLSKDTYDDDLDNLLAQIGDQYADLFLAAKNLSDAILLSDILRVNTEITKAPLSASMIKRYDEHHQDLTLLKALVRQQLPEKYKEIFFDQSKNGYAGYIDGGASQEEFYKFIKPILEKMDGTEELLVKLNREDLLRKQRTFDNGSIPHQIHLGELHAILRRQEDFYPFLKDNREKIEKILTFRIPYYVGPLARGNSRFAWMTRKSEETITPWNFEEVVDKGASAQSFIERMTNFDKNLPNEKVLPKHSLLYEYFTVYNELTKVKYVTEGMRKPAFLSGEQKKAIVDLLFKTNRKVTVKQLKEDYFKKIECFDSVEISGVEDRFNASLGTYHDLLKIIKDKDFLDNEENEDILEDIVLTLTLFEDREMIEERLKTYAHLFDDKVMKQLKRRRYTGWGRLSRKLINGIRDKQSGKTILDFLKSDGFANRNFMQLIHDDSLTFKEDIQKAQVSGQGDSLHEHIANLAGSPAIKKGILQTVKVVDELVKVMGRHKPENIVIEMARENQTTQKGQKNSRERMKRIEEGIKELGSQILKEHPVENTQLQNEKLYLYYLQNGRDMYVDQELDINRLSDYDVDHIVPQSFLKDDSIDNKVLTRSDKARGKSDNVPSEEVVKKMKNYWRQLLNAKLITQRKFDNLTKAERGGLSELDKAGFIKRQLVETRQITKHVAQILDSRMNTKYDENDKLIREVKVITLKSKLVSDFRKDFQFYKVREINNYHHAHDAYLNAVVGTALIKKYPKLESEFVYGDYKVYDVRKMIAKSEQEIGKATAKYFFYSNIMNFFKTEITLANGEIRKRPLIETNGETGEIVWDKGRDFATVRKVLSMPQVNIVKKTEVQTGGFSKESILPKRNSDKLIARKKDWDPKKYGGFDSPTVAYSVLVVAKVEKGKSKKLKSVKELLGITIMERSSFEKNPIDFLEAKGYKEVKKDLIIKLPKYSLFELENGRKRMLASAGELQKGNELALPSKYVNFLYLASHYEKLKGSPEDNEQKQLFVEQHKHYLDEIIEQISEFSKRVILADANLDKVLSAYNKHRDKPIREQAENIIHLFTLTNLGAPAAFKYFDTTIDRKRYTSTKEVLDATLIHQSITGLYETRIDLSQLGGDGGGGSPAPGSSGGVLNLEEEYRLHEKPVPSSIDPSWLQLFPTVWAERAGMGLANQVPPVVVELRSGASPVAVRQYPMSKEAREGIRPHIQRFLDLGVLVPCQSPWNTPLLPVKKPGTNDYRPVQDLREINKRVQDIHPTVPNPYNLLSSLPPSHTWYSVLDLKDAFFCLKLHPNSQPLFAFEWRDPEKGNTGQLTWTRLPQGFKNSPTLFNEALHRDLAPFRALNPQVVLLQYVDDLLVAAPTYRDCKEGTQKLLQELSKLGYRVSAKKAQLCQKEVTYLGYLLKEGKRWLTPARKATVMKIPPPTTPRQVREFLGKAGFCRLFIPGFASLAAPLYPLTKPSIPFIWTEEHQKAFDRIKEALLSAPALALPDLTKPFTLYVDERAGVARGVLTQTLGPWRRPVAYLSKKLDPVASGWPTCLKAVAAVALLLKDADKLTLGQNVTVIASHSLESIVRQPPDRWMTNARMTHYQSLLLNERVSFAPPAVLNPATLLPVESEATPVHRCSEILAEETGTRRDLKDQPLPGVPAWYTDGSSFIAEGKRRAGAAIVDGKRTVWASSLPEGTSAQKAELVALTQALRLAEGKDINIYTDSRYAFATAHIHGAIYKQRGWLTSAGKDIKNKEEILALLEAIHLPKRVAIIHCPGHQKGNDPVATGNRRADEAAKQAALSTRVLAETTKPAGKRTADGSEFEKRTADGSEFESPKKKAKVE

SEQ ID NO: 876 - protein, 2086 aa, synthetic construct
MPAAKRVKLDGGDKKYSIGLDIGTNSVGWAVITDEYKVPSKKFKVLGNTDRHSIKKNLIGALLFDSGETAEATRLKRTARRRYTRRKNRICYLQEIFSNEMAKVDDSFFHRLEESFLVEEDKKHERHPIFGNIVDEVAYHEKYPTIYHLRKKLVDSTDKADLRLIYLALAHMIKFRGHFLIEGDLNPDNSDVDKLFIQLVQTYNQLFEENPINASGVDAKAILSARLSKSRRLENLIAQLPGEKKNGLFGNLIALSLGLTPNFKSNFDLAEDAKLQLSKDTYDDDLDNLLAQIGDQYADLFLAAKNLSDAILLSDILRVNTEITKAPLSASMIKRYDEHHQDLTLLKALVRQQLPEKYKEIFFDQSKNGYAGYIDGGASQEEFYKFIKPILEKMDGTEELLVKLNREDLLRKQRTFDNGSIPHQIHLGELHAILRRQEDFYPFLKDNREKIEKILTFRIPYYVGPLARGNSRFAWMTRKSEETITPWNFEEVVDKGASAQSFIERMTNFDKNLPNEKVLPKHSLLYEYFTVYNELTKVKYVTEGMRKPAFLSGEQKKAIVDLLFKTNRKVTVKQLKEDYFKKIECFDSVEISGVEDRFNASLGTYHDLLKIIKDKDFLDNEENEDILEDIVLTLTLFEDREMIEERLKTYAHLFDDKVMKQLKRRRYTGWGRLSRKLINGIRDKQSGKTILDFLKSDGFANRNFMQLIHDDSLTFKEDIQKAQVSGQGDSLHEHIANLAGSPAIKKGILQTVKVVDELVKVMGRHKPENIVIEMARENQTTQKGQKNSRERMKRIEEGIKELGSQILKEHPVENTQLQNEKLYLYYLQNGRDMYVDQELDINRLSDYDVDHIVPQSFLKDDSIDNKVLTRSDKARGKSDNVPSEEVVKKMKNYWRQLLNAKLITQRKFDNLTKAERGGLSELDKAGFIKRQLVETRQITKHVAQILDSRMNTKYDENDKLIREVKVITLKSKLVSDFRKDFQFYKVREINNYHHAHDAYLNAVVGTALIKKYPKLESEFVYGDYKVYDVRKMIAKSEQEIGKATAKYFFYSNIMNFFKTEITLANGEIRKRPLIETNGETGEIVWDKGRDFATVRKVLSMPQVNIVKKTEVQTGGFSKESILPKRNSDKLIARKKDWDPKKYGGFDSPTVAYSVLVVAKVEKGKSKKLKSVKELLGITIMERSSFEKNPIDFLEAKGYKEVKKDLIIKLPKYSLFELENGRKRMLASAGELQKGNELALPSKYVNFLYLASHYEKLKGSPEDNEQKQLFVEQHKHYLDEIIEQISEFSKRVILADANLDKVLSAYNKHRDKPIREQAENIIHLFTLTNLGAPAAFKYFDTTIDRKRYTSTKEVLDATLIHQSITGLYETRIDLSQLGGDGGGSSGGVLNLEEEYRLHEKPVPSSIDPSWLQLFPTVWAERAGMGLANQVPPVVVELRSGASPVAVRQYPMSKEAREGIRPHIQRFLDLGVLVPCQSPWNTPLLPVKKPGTNDYRPVQDLREINKRVQDIHPTVPNPYNLLSSLPPSHTWYSVLDLKDAFFCLKLHPNSQPLFAFEWRDPEKGNTGQLTWTRLPQGFKNSPTLFNEALHRDLAPFRALNPQVVLLQYVDDLLVAAPTYRDCKEGTQKLLQELSKLGYRVSAKKAQLCQKEVTYLGYLLKEGKRWLTPARKATVMKIPPPTTPRQVREFLGKAGFCRLFIPGFASLAAPLYPLTKPSIPFIWTEEHQKAFDRIKEALLSAPALALPDLTKPFTLYVDERAGVARGVLTQTLGPWRRPVAYLSKKLDPVASGWPTCLKAVAAVALLLKDADKLTLGQNVTVIASHSLESIVRQPPDRWMTNARMTHYQSLLLNERVSFAPPAVLNPATLLPVESEATPVHRCSEILAEETGTRRDLKDQPLPGVPAWYTDGSSFIAEGKRRAGAAIVDGKRTVWASSLPEGTSAQKAELVALTQALRLAEGKDINIYTDSRYAFATAHIHGAIYKQRGWLTSAGKDIKNKEEILALLEAIHLPKRVAIIHCPGHQKGNDPVATGNRRADEAAKQAALSTRVLAETTKPAGKRTADGSEFEKRTADGSEFESPKKKAKVE

SEQ ID NO: 877 - protein, 2099 aa, synthetic construct
MPAAKRVKLDGGDKKYSIGLDIGTNSVGWAVITDEYKVPSKKFKVLGNTDRHSIKKNLIGALLFDSGETAEATRLKRTARRRYTRRKNRICYLQEIFSNEMAKVDDSFFHRLEESFLVEEDKKHERHPIFGNIVDEVAYHEKYPTIYHLRKKLVDSTDKADLRLIYLALAHMIKFRGHFLIEGDLNPDNSDVDKLFIQLVQTYNQLFEENPINASGVDAKAILSARLSKSRRLENLIAQLPGEKKNGLFGNLIALSLGLTPNFKSNFDLAEDAKLQLSKDTYDDDLDNLLAQIGDQYADLFLAAKNLSDAILLSDILRVNTEITKAPLSASMIKRYDEHHQDLTLLKALVRQQLPEKYKEIFFDQSKNGYAGYIDGGASQEEFYKFIKPILEKMDGTEELLVKLNREDLLRKQRTFDNGSIPHQIHLGELHAILRRQEDFYPFLKDNREKIEKILTFRIPYYVGPLARGNSRFAWMTRKSEETITPWNFEEVVDKGASAQSFIERMTNFDKNLPNEKVLPKHSLLYEYFTVYNELTKVKYVTEGMRKPAFLSGEQKKAIVDLLFKTNRKVTVKQLKEDYFKKIECFDSVEISGVEDRFNASLGTYHDLLKIIKDKDFLDNEENEDILEDIVLTLTLFEDREMIEERLKTYAHLFDDKVMKQLKRRRYTGWGRLSRKLINGIRDKQSGKTILDFLKSDGFANRNFMQLIHDDSLTFKEDIQKAQVSGQGDSLHEHIANLAGSPAIKKGILQTVKVVDELVKVMGRHKPENIVIEMARENQTTQKGQKNSRERMKRIEEGIKELGSQILKEHPVENTQLQNEKLYLYYLQNGRDMYVDQELDINRLSDYDVDHIVPQSFLKDDSIDNKVLTRSDKARGKSDNVPSEEVVKKMKNYWRQLLNAKLITQRKFDNLTKAERGGLSELDKAGFIKRQLVETRQITKHVAQILDSRMNTKYDENDKLIREVKVITLKSKLVSDFRKDFQFYKVREINNYHHAHDAYLNAVVGTALIKKYPKLESEFVYGDYKVYDVRKMIAKSEQEIGKATAKYFFYSNIMNFFKTEITLANGEIRKRPLIETNGETGEIVWDKGRDFATVRKVLSMPQVNIVKKTEVQTGGFSKESILPKRNSDKLIARKKDWDPKKYGGFDSPTVAYSVLVVAKVEKGKSKKLKSVKELLGITIMERSSFEKNPIDFLEAKGYKEVKKDLIIKLPKYSLFELENGRKRMLASAGELQKGNELALPSKYVNFLYLASHYEKLKGSPEDNEQKQLFVEQHKHYLDEIIEQISEFSKRVILADANLDKVLSAYNKHRDKPIREQAENIIHLFTLTNLGAPAAFKYFDTTIDRKRYTSTKEVLDATLIHQSITGLYETRIDLSQLGGDGGSGSETPGTSESATPESGGVLNLEEEYRLHEKPVPSSIDPSWLQLFPTVWAERAGMGLANQVPPVVVELRSGASPVAVRQYPMSKEAREGIRPHIQRFLDLGVLVPCQSPWNTPLLPVKKPGTNDYRPVQDLREINKRVQDIHPTVPNPYNLLSSLPPSHTWYSVLDLKDAFFCLKLHPNSQPLFAFEWRDPEKGNTGQLTWTRLPQGFKNSPTLFNEALHRDLAPFRALNPQVVLLQYVDDLLVAAPTYRDCKEGTQKLLQELSKLGYRVSAKKAQLCQKEVTYLGYLLKEGKRWLTPARKATVMKIPPPTTPRQVREFLGKAGFCRLFIPGFASLAAPLYPLTKPSIPFIWTEEHQKAFDRIKEALLSAPALALPDLTKPFTLYVDERAGVARGVLTQTLGPWRRPVAYLSKKLDPVASGWPTCLKAVAAVALLLKDADKLTLGQNVTVIASHSLESIVRQPPDRWMTNARMTHYQSLLLNERVSFAPPAVLNPATLLPVESEATPVHRCSEILAEETGTRRDLKDQPLPGVPAWYTDGSSFIAEGKRRAGAAIVDGKRTVWASSLPEGTSAQKAELVALTQALRLAEGKDINIYTDSRYAFATAHIHGAIYKQRGWLTSAGKDIKNKEEILALLEAIHLPKRVAIIHCPGHQKGNDPVATGNRRADEAAKQAALSTRVLAETTKPAGKRTADGSEFEKRTADGSEFESPKKKAKVE

SEQ ID NO: 878 - protein, 2092 aa, synthetic construct
MPAAKRVKLDGGDKKYSIGLDIGTNSVGWAVITDEYKVPSKKFKVLGNTDRHSIKKNLIGALLFDSGETAEATRLKRTARRRYTRRKNRICYLQEIFSNEMAKVDDSFFHRLEESFLVEEDKKHERHPIFGNIVDEVAYHEKYPTIYHLRKKLVDSTDKADLRLIYLALAHMIKFRGHFLIEGDLNPDNSDVDKLFIQLVQTYNQLFEENPINASGVDAKAILSARLSKSRRLENLIAQLPGEKKNGLFGNLIALSLGLTPNFKSNFDLAEDAKLQLSKDTYDDDLDNLLAQIGDQYADLFLAAKNLSDAILLSDILRVNTEITKAPLSASMIKRYDEHHQDLTLLKALVRQQLPEKYKEIFFDQSKNGYAGYIDGGASQEEFYKFIKPILEKMDGTEELLVKLNREDLLRKQRTFDNGSIPHQIHLGELHAILRRQEDFYPFLKDNREKIEKILTFRIPYYVGPLARGNSRFAWMTRKSEETITPWNFEEVVDKGASAQSFIERMTNFDKNLPNEKVLPKHSLLYEYFTVYNELTKVKYVTEGMRKPAFLSGEQKKAIVDLLFKTNRKVTVKQLKEDYFKKIECFDSVEISGVEDRFNASLGTYHDLLKIIKDKDFLDNEENEDILEDIVLTLTLFEDREMIEERLKTYAHLFDDKVMKQLKRRRYTGWGRLSRKLINGIRDKQSGKTILDFLKSDGFANRNFMQLIHDDSLTFKEDIQKAQVSGQGDSLHEHIANLAGSPAIKKGILQTVKVVDELVKVMGRHKPENIVIEMARENQTTQKGQKNSRERMKRIEEGIKELGSQILKEHPVENTQLQNEKLYLYYLQNGRDMYVDQELDINRLSDYDVDHIVPQSFLKDDSIDNKVLTRSDKARGKSDNVPSEEVVKKMKNYWRQLLNAKLITQRKFDNLTKAERGGLSELDKAGFIKRQLVETRQITKHVAQILDSRMNTKYDENDKLIREVKVITLKSKLVSDFRKDFQFYKVREINNYHHAHDAYLNAVVGTALIKKYPKLESEFVYGDYKVYDVRKMIAKSEQEIGKATAKYFFYSNIMNFFKTEITLANGEIRKRPLIETNGETGEIVWDKGRDFATVRKVLSMPQVNIVKKTEVQTGGFSKESILPKRNSDKLIARKKDWDPKKYGGFDSPTVAYSVLVVAKVEKGKSKKLKSVKELLGITIMERSSFEKNPIDFLEAKGYKEVKKDLIIKLPKYSLFELENGRKRMLASAGELQKGNELALPSKYVNFLYLASHYEKLKGSPEDNEQKQLFVEQHKHYLDEIIEQISEFSKRVILADANLDKVLSAYNKHRDKPIREQAENIIHLFTLTNLGAPAAFKYFDTTIDRKRYTSTKEVLDATLIHQSITGLYETRIDLSQLGGDGGGGGPAPGGSGGVLNLEEEYRLHEKPVPSSIDPSWLQLFPTVWAERAGMGLANQVPPVVVELRSGASPVAVRQYPMSKEAREGIRPHIQRFLDLGVLVPCQSPWNTPLLPVKKPGTNDYRPVQDLREINKRVQDIHPTVPNPYNLLSSLPPSHTWYSVLDLKDAFFCLKLHPNSQPLFAFEWRDPEKGNTGQLTWTRLPQGFKNSPTLFNEALHRDLAPFRALNPQVVLLQYVDDLLVAAPTYRDCKEGTQKLLQELSKLGYRVSAKKAQLCQKEVTYLGYLLKEGKRWLTPARKATVMKIPPPTTPRQVREFLGKAGFCRLFIPGFASLAAPLYPLTKPSIPFIWTEEHQKAFDRIKEALLSAPALALPDLTKPFTLYVDERAGVARGVLTQTLGPWRRPVAYLSKKLDPVASGWPTCLKAVAAVALLLKDADKLTLGQNVTVIASHSLESIVRQPPDRWMTNARMTHYQSLLLNERVSFAPPAVLNPATLLPVESEATPVHRCSEILAEETGTRRDLKDQPLPGVPAWYTDGSSFIAEGKRRAGAAIVDGKRTVWASSLPEGTSAQKAELVALTQALRLAEGKDINIYTDSRYAFATAHIHGAIYKQRGWLTSAGKDIKNKEEILALLEAIHLPKRVAIIHCPGHQKGNDPVATGNRRADEAAKQAALSTRVLAETTKPAGKRTADGSEFEKRTADGSEFESPKKKAKVE

SEQ ID NO: 879 - protein, 2108 aa, synthetic construct
MPAAKRVKLDGGDKKYSIGLDIGTNSVGWAVITDEYKVPSKKFKVLGNTDRHSIKKNLIGALLFDSGETAEATRLKRTARRRYTRRKNRICYLQEIFSNEMAKVDDSFFHRLEESFLVEEDKKHERHPIFGNIVDEVAYHEKYPTIYHLRKKLVDSTDKADLRLIYLALAHMIKFRGHFLIEGDLNPDNSDVDKLFIQLVQTYNQLFEENPINASGVDAKAILSARLSKSRRLENLIAQLPGEKKNGLFGNLIALSLGLTPNFKSNFDLAEDAKLQLSKDTYDDDLDNLLAQIGDQYADLFLAAKNLSDAILLSDILRVNTEITKAPLSASMIKRYDEHHQDLTLLKALVRQQLPEKYKEIFFDQSKNGYAGYIDGGASQEEFYKFIKPILEKMDGTEELLVKLNREDLLRKQRTFDNGSIPHQIHLGELHAILRRQEDFYPFLKDNREKIEKILTFRIPYYVGPLARGNSRFAWMTRKSEETITPWNFEEVVDKGASAQSFIERMTNFDKNLPNEKVLPKHSLLYEYFTVYNELTKVKYVTEGMRKPAFLSGEQKKAIVDLLFKTNRKVTVKQLKEDYFKKIECFDSVEISGVEDRFNASLGTYHDLLKIIKDKDFLDNEENEDILEDIVLTLTLFEDREMIEERLKTYAHLFDDKVMKQLKRRRYTGWGRLSRKLINGIRDKQSGKTILDFLKSDGFANRNFMQLIHDDSLTFKEDIQKAQVSGQGDSLHEHIANLAGSPAIKKGILQTVKVVDELVKVMGRHKPENIVIEMARENQTTQKGQKNSRERMKRIEEGIKELGSQILKEHPVENTQLQNEKLYLYYLQNGRDMYVDQELDINRLSDYDVDHIVPQSFLKDDSIDNKVLTRSDKARGKSDNVPSEEVVKKMKNYWRQLLNAKLITQRKFDNLTKAERGGLSELDKAGFIKRQLVETRQITKHVAQILDSRMNTKYDENDKLIREVKVITLKSKLVSDFRKDFQFYKVREINNYHHAHDAYLNAVVGTALIKKYPKLESEFVYGDYKVYDVRKMIAKSEQEIGKATAKYFFYSNIMNFFKTEITLANGEIRKRPLIETNGETGEIVWDKGRDFATVRKVLSMPQVNIVKKTEVQTGGFSKESILPKRNSDKLIARKKDWDPKKYGGFDSPTVAYSVLVVAKVEKGKSKKLKSVKELLGITIMERSSFEKNPIDFLEAKGYKEVKKDLIIKLPKYSLFELENGRKRMLASAGELQKGNELALPSKYVNFLYLASHYEKLKGSPEDNEQKQLFVEQHKHYLDEIIEQISEFSKRVILADANLDKVLSAYNKHRDKPIREQAENIIHLFTLTNLGAPAAFKYFDTTIDRKRYTSTKEVLDATLIHQSITGLYETRIDLSQLGGDGGEAAAKEAAAKEAAAKEAAAKEAAAKGGVLNLEEEYRLHEKPVPSSIDPSWLQLFPTVWAERAGMGLANQVPPVVVELRSGASPVAVRQYPMSKEAREGIRPHIQRFLDLGVLVPCQSPWNTPLLPVKKPGTNDYRPVQDLREINKRVQDIHPTVPNPYNLLSSLPPSHTWYSVLDLKDAFFCLKLHPNSQPLFAFEWRDPEKGNTGQLTWTRLPQGFKNSPTLFNEALHRDLAPFRALNPQVVLLQYVDDLLVAAPTYRDCKEGTQKLLQELSKLGYRVSAKKAQLCQKEVTYLGYLLKEGKRWLTPARKATVMKIPPPTTPRQVREFLGKAGFCRLFIPGFASLAAPLYPLTKPSIPFIWTEEHQKAFDRIKEALLSAPALALPDLTKPFTLYVDERAGVARGVLTQTLGPWRRPVAYLSKKLDPVASGWPTCLKAVAAVALLLKDADKLTLGQNVTVIASHSLESIVRQPPDRWMTNARMTHYQSLLLNERVSFAPPAVLNPATLLPVESEATPVHRCSEILAEETGTRRDLKDQPLPGVPAWYTDGSSFIAEGKRRAGAAIVDGKRTVWASSLPEGTSAQKAELVALTQALRLAEGKDINIYTDSRYAFATAHIHGAIYKQRGWLTSAGKDIKNKEEILALLEAIHLPKRVAIIHCPGHQKGNDPVATGNRRADEAAKQAALSTRVLAETTKPAGKRTADGSEFEKRTADGSEFESPKKKAKVE

SEQ ID NO: 880 - protein, 2092 aa, synthetic construct
MPAAKRVKLDGGDKKYSIGLDIGTNSVGWAVITDEYKVPSKKFKVLGNTDRHSIKKNLIGALLFDSGETAEATRLKRTARRRYTRRKNRICYLQEIFSNEMAKVDDSFFHRLEESFLVEEDKKHERHPIFGNIVDEVAYHEKYPTIYHLRKKLVDSTDKADLRLIYLALAHMIKFRGHFLIEGDLNPDNSDVDKLFIQLVQTYNQLFEENPINASGVDAKAILSARLSKSRRLENLIAQLPGEKKNGLFGNLIALSLGLTPNFKSNFDLAEDAKLQLSKDTYDDDLDNLLAQIGDQYADLFLAAKNLSDAILLSDILRVNTEITKAPLSASMIKRYDEHHQDLTLLKALVRQQLPEKYKEIFFDQSKNGYAGYIDGGASQEEFYKFIKPILEKMDGTEELLVKLNREDLLRKQRTFDNGSIPHQIHLGELHAILRRQEDFYPFLKDNREKIEKILTFRIPYYVGPLARGNSRFAWMTRKSEETITPWNFEEVVDKGASAQSFIERMTNFDKNLPNEKVLPKHSLLYEYFTVYNELTKVKYVTEGMRKPAFLSGEQKKAIVDLLFKTNRKVTVKQLKEDYFKKIECFDSVEISGVEDRFNASLGTYHDLLKIIKDKDFLDNEENEDILEDIVLTLTLFEDREMIEERLKTYAHLFDDKVMKQLKRRRYTGWGRLSRKLINGIRDKQSGKTILDFLKSDGFANRNFMQLIHDDSLTFKEDIQKAQVSGQGDSLHEHIANLAGSPAIKKGILQTVKVVDELVKVMGRHKPENIVIEMARENQTTQKGQKNSRERMKRIEEGIKELGSQILKEHPVENTQLQNEKLYLYYLQNGRDMYVDQELDINRLSDYDVDHIVPQSFLKDDSIDNKVLTRSDKARGKSDNVPSEEVVKKMKNYWRQLLNAKLITQRKFDNLTKAERGGLSELDKAGFIKRQLVETRQITKHVAQILDSRMNTKYDENDKLIREVKVITLKSKLVSDFRKDFQFYKVREINNYHHAHDAYLNAVVGTALIKKYPKLESEFVYGDYKVYDVRKMIAKSEQEIGKATAKYFFYSNIMNFFKTEITLANGEIRKRPLIETNGETGEIVWDKGRDFATVRKVLSMPQVNIVKKTEVQTGGFSKESILPKRNSDKLIARKKDWDPKKYGGFDSPTVAYSVLVVAKVEKGKSKKLKSVKELLGITIMERSSFEKNPIDFLEAKGYKEVKKDLIIKLPKYSLFELENGRKRMLASAGELQKGNELALPSKYVNFLYLASHYEKLKGSPEDNEQKQLFVEQHKHYLDEIIEQISEFSKRVILADANLDKVLSAYNKHRDKPIREQAENIIHLFTLTNLGAPAAFKYFDTTIDRKRYTSTKEVLDATLIHQSITGLYETRIDLSQLGGDGGPAPGGSGSSGGVLNLEEEYRLHEKPVPSSIDPSWLQLFPTVWAERAGMGLANQVPPVVVELRSGASPVAVRQYPMSKEAREGIRPHIQRFLDLGVLVPCQSPWNTPLLPVKKPGTNDYRPVQDLREINKRVQDIHPTVPNPYNLLSSLPPSHTWYSVLDLKDAFFCLKLHPNSQPLFAFEWRDPEKGNTGQLTWTRLPQGFKNSPTLFNEALHRDLAPFRALNPQVVLLQYVDDLLVAAPTYRDCKEGTQKLLQELSKLGYRVSAKKAQLCQKEVTYLGYLLKEGKRWLTPARKATVMKIPPPTTPRQVREFLGKAGFCRLFIPGFASLAAPLYPLTKPSIPFIWTEEHQKAFDRIKEALLSAPALALPDLTKPFTLYVDERAGVARGVLTQTLGPWRRPVAYLSKKLDPVASGWPTCLKAVAAVALLLKDADKLTLGQNVTVIASHSLESIVRQPPDRWMTNARMTHYQSLLLNERVSFAPPAVLNPATLLPVESEATPVHRCSEILAEETGTRRDLKDQPLPGVPAWYTDGSSFIAEGKRRAGAAIVDGKRTVWASSLPEGTSAQKAELVALTQALRLAEGKDINIYTDSRYAFATAHIHGAIYKQRGWLTSAGKDIKNKEEILALLEAIHLPKRVAIIHCPGHQKGNDPVATGNRRADEAAKQAALSTRVLAETTKPAGKRTADGSEFEKRTADGSEFESPKKKAKVE

SEQ ID NO: 881 - protein, 2089 aa, synthetic construct
MPAAKRVKLDGGDKKYSIGLDIGTNSVGWAVITDEYKVPSKKFKVLGNTDRHSIKKNLIGALLFDSGETAEATRLKRTARRRYTRRKNRICYLQEIFSNEMAKVDDSFFHRLEESFLVEEDKKHERHPIFGNIVDEVAYHEKYPTIYHLRKKLVDSTDKADLRLIYLALAHMIKFRGHFLIEGDLNPDNSDVDKLFIQLVQTYNQLFEENPINASGVDAKAILSARLSKSRRLENLIAQLPGEKKNGLFGNLIALSLGLTPNFKSNFDLAEDAKLQLSKDTYDDDLDNLLAQIGDQYADLFLAAKNLSDAILLSDILRVNTEITKAPLSASMIKRYDEHHQDLTLLKALVRQQLPEKYKEIFFDQSKNGYAGYIDGGASQEEFYKFIKPILEKMDGTEELLVKLNREDLLRKQRTFDNGSIPHQIHLGELHAILRRQEDFYPFLKDNREKIEKILTFRIPYYVGPLARGNSRFAWMTRKSEETITPWNFEEVVDKGASAQSFIERMTNFDKNLPNEKVLPKHSLLYEYFTVYNELTKVKYVTEGMRKPAFLSGEQKKAIVDLLFKTNRKVTVKQLKEDYFKKIECFDSVEISGVEDRFNASLGTYHDLLKIIKDKDFLDNEENEDILEDIVLTLTLFEDREMIEERLKTYAHLFDDKVMKQLKRRRYTGWGRLSRKLINGIRDKQSGKTILDFLKSDGFANRNFMQLIHDDSLTFKEDIQKAQVSGQGDSLHEHIANLAGSPAIKKGILQTVKVVDELVKVMGRHKPENIVIEMARENQTTQKGQKNSRERMKRIEEGIKELGSQILKEHPVENTQLQNEKLYLYYLQNGRDMYVDQELDINRLSDYDVDHIVPQSFLKDDSIDNKVLTRSDKARGKSDNVPSEEVVKKMKNYWRQLLNAKLITQRKFDNLTKAERGGLSELDKAGFIKRQLVETRQITKHVAQILDSRMNTKYDENDKLIREVKVITLKSKLVSDFRKDFQFYKVREINNYHHAHDAYLNAVVGTALIKKYPKLESEFVYGDYKVYDVRKMIAKSEQEIGKATAKYFFYSNIMNFFKTEITLANGEIRKRPLIETNGETGEIVWDKGRDFATVRKVLSMPQVNIVKKTEVQTGGFSKESILPKRNSDKLIARKKDWDPKKYGGFDSPTVAYSVLVVAKVEKGKSKKLKSVKELLGITIMERSSFEKNPIDFLEAKGYKEVKKDLIIKLPKYSLFELENGRKRMLASAGELQKGNELALPSKYVNFLYLASHYEKLKGSPEDNEQKQLFVEQHKHYLDEIIEQISEFSKRVILADANLDKVLSAYNKHRDKPIREQAENIIHLFTLTNLGAPAAFKYFDTTIDRKRYTSTKEVLDATLIHQSITGLYETRIDLSQLGGDGGGGSGSSGGVLNLEEEYRLHEKPVPSSIDPSWLQLFPTVWAERAGMGLANQVPPVVVELRSGASPVAVRQYPMSKEAREGIRPHIQRFLDLGVLVPCQSPWNTPLLPVKKPGTNDYRPVQDLREINKRVQDIHPTVPNPYNLLSSLPPSHTWYSVLDLKDAFFCLKLHPNSQPLFAFEWRDPEKGNTGQLTWTRLPQGFKNSPTLFNEALHRDLAPFRALNPQVVLLQYVDDLLVAAPTYRDCKEGTQKLLQELSKLGYRVSAKKAQLCQKEVTYLGYLLKEGKRWLTPARKATVMKIPPPTTPRQVREFLGKAGFCRLFIPGFASLAAPLYPLTKPSIPFIWTEEHQKAFDRIKEALLSAPALALPDLTKPFTLYVDERAGVARGVLTQTLGPWRRPVAYLSKKLDPVASGWPTCLKAVAAVALLLKDADKLTLGQNVTVIASHSLESIVRQPPDRWMTNARMTHYQSLLLNERVSFAPPAVLNPATLLPVESEATPVHRCSEILAEETGTRRDLKDQPLPGVPAWYTDGSSFIAEGKRRAGAAIVDGKRTVWASSLPEGTSAQKAELVALTQALRLAEGKDINIYTDSRYAFATAHIHGAIYKQRGWLTSAGKDIKNKEEILALLEAIHLPKRVAIIHCPGHQKGNDPVATGNRRADEAAKQAALSTRVLAETTKPAGKRTADGSEFEKRTADGSEFESPKKKAKVE

SEQ ID NO: 882 - protein, 2089 aa, synthetic construct
MPAAKRVKLDGGDKKYSIGLDIGTNSVGWAVITDEYKVPSKKFKVLGNTDRHSIKKNLIGALLFDSGETAEATRLKRTARRRYTRRKNRICYLQEIFSNEMAKVDDSFFHRLEESFLVEEDKKHERHPIFGNIVDEVAYHEKYPTIYHLRKKLVDSTDKADLRLIYLALAHMIKFRGHFLIEGDLNPDNSDVDKLFIQLVQTYNQLFEENPINASGVDAKAILSARLSKSRRLENLIAQLPGEKKNGLFGNLIALSLGLTPNFKSNFDLAEDAKLQLSKDTYDDDLDNLLAQIGDQYADLFLAAKNLSDAILLSDILRVNTEITKAPLSASMIKRYDEHHQDLTLLKALVRQQLPEKYKEIFFDQSKNGYAGYIDGGASQEEFYKFIKPILEKMDGTEELLVKLNREDLLRKQRTFDNGSIPHQIHLGELHAILRRQEDFYPFLKDNREKIEKILTFRIPYYVGPLARGNSRFAWMTRKSEETITPWNFEEVVDKGASAQSFIERMTNFDKNLPNEKVLPKHSLLYEYFTVYNELTKVKYVTEGMRKPAFLSGEQKKAIVDLLFKTNRKVTVKQLKEDYFKKIECFDSVEISGVEDRFNASLGTYHDLLKIIKDKDFLDNEENEDILEDIVLTLTLFEDREMIEERLKTYAHLFDDKVMKQLKRRRYTGWGRLSRKLINGIRDKQSGKTILDFLKSDGFANRNFMQLIHDDSLTFKEDIQKAQVSGQGDSLHEHIANLAGSPAIKKGILQTVKVVDELVKVMGRHKPENIVIEMARENQTTQKGQKNSRERMKRIEEGIKELGSQILKEHPVENTQLQNEKLYLYYLQNGRDMYVDQELDINRLSDYDVDHIVPQSFLKDDSIDNKVLTRSDKARGKSDNVPSEEVVKKMKNYWRQLLNAKLITQRKFDNLTKAERGGLSELDKAGFIKRQLVETRQITKHVAQILDSRMNTKYDENDKLIREVKVITLKSKLVSDFRKDFQFYKVREINNYHHAHDAYLNAVVGTALIKKYPKLESEFVYGDYKVYDVRKMIAKSEQEIGKATAKYFFYSNIMNFFKTEITLANGEIRKRPLIETNGETGEIVWDKGRDFATVRKVLSMPQVNIVKKTEVQTGGFSKESILPKRNSDKLIARKKDWDPKKYGGFDSPTVAYSVLVVAKVEKGKSKKLKSVKELLGITIMERSSFEKNPIDFLEAKGYKEVKKDLIIKLPKYSLFELENGRKRMLASAGELQKGNELALPSKYVNFLYLASHYEKLKGSPEDNEQKQLFVEQHKHYLDEIIEQISEFSKRVILADANLDKVLSAYNKHRDKPIREQAENIIHLFTLTNLGAPAAFKYFDTTIDRKRYTSTKEVLDATLIHQSITGLYETRIDLSQLGGDGGGGGGGGGGVLNLEEEYRLHEKPVPSSIDPSWLQLFPTVWAERAGMGLANQVPPVVVELRSGASPVAVRQYPMSKEAREGIRPHIQRFLDLGVLVPCQSPWNTPLLPVKKPGTNDYRPVQDLREINKRVQDIHPTVPNPYNLLSSLPPSHTWYSVLDLKDAFFCLKLHPNSQPLFAFEWRDPEKGNTGQLTWTRLPQGFKNSPTLFNEALHRDLAPFRALNPQVVLLQYVDDLLVAAPTYRDCKEGTQKLLQELSKLGYRVSAKKAQLCQKEVTYLGYLLKEGKRWLTPARKATVMKIPPPTTPRQVREFLGKAGFCRLFIPGFASLAAPLYPLTKPSIPFIWTEEHQKAFDRIKEALLSAPALALPDLTKPFTLYVDERAGVARGVLTQTLGPWRRPVAYLSKKLDPVASGWPTCLKAVAAVALLLKDADKLTLGQNVTVIASHSLESIVRQPPDRWMTNARMTHYQSLLLNERVSFAPPAVLNPATLLPVESEATPVHRCSEILAEETGTRRDLKDQPLPGVPAWYTDGSSFIAEGKRRAGAAIVDGKRTVWASSLPEGTSAQKAELVALTQALRLAEGKDINIYTDSRYAFATAHIHGAIYKQRGWLTSAGKDIKNKEEILALLEAIHLPKRVAIIHCPGHQKGNDPVATGNRRADEAAKQAALSTRVLAETTKPAGKRTADGSEFEKRTADGSEFESPKKKAKVE

SEQ ID NO: 883 - protein, 2091 aa, synthetic construct
MPAAKRVKLDGGDKKYSIGLDIGTNSVGWAVITDEYKVPSKKFKVLGNTDRHSIKKNLIGALLFDSGETAEATRLKRTARRRYTRRKNRICYLQEIFSNEMAKVDDSFFHRLEESFLVEEDKKHERHPIFGNIVDEVAYHEKYPTIYHLRKKLVDSTDKADLRLIYLALAHMIKFRGHFLIEGDLNPDNSDVDKLFIQLVQTYNQLFEENPINASGVDAKAILSARLSKSRRLENLIAQLPGEKKNGLFGNLIALSLGLTPNFKSNFDLAEDAKLQLSKDTYDDDLDNLLAQIGDQYADLFLAAKNLSDAILLSDILRVNTEITKAPLSASMIKRYDEHHQDLTLLKALVRQQLPEKYKEIFFDQSKNGYAGYIDGGASQEEFYKFIKPILEKMDGTEELLVKLNREDLLRKQRTFDNGSIPHQIHLGELHAILRRQEDFYPFLKDNREKIEKILTFRIPYYVGPLARGNSRFAWMTRKSEETITPWNFEEVVDKGASAQSFIERMTNFDKNLPNEKVLPKHSLLYEYFTVYNELTKVKYVTEGMRKPAFLSGEQKKAIVDLLFKTNRKVTVKQLKEDYFKKIECFDSVEISGVEDRFNASLGTYHDLLKIIKDKDFLDNEENEDILEDIVLTLTLFEDREMIEERLKTYAHLFDDKVMKQLKRRRYTGWGRLSRKLINGIRDKQSGKTILDFLKSDGFANRNFMQLIHDDSLTFKEDIQKAQVSGQGDSLHEHIANLAGSPAIKKGILQTVKVVDELVKVMGRHKPENIVIEMARENQTTQKGQKNSRERMKRIEEGIKELGSQILKEHPVENTQLQNEKLYLYYLQNGRDMYVDQELDINRLSDYDVDHIVPQSFLKDDSIDNKVLTRSDKARGKSDNVPSEEVVKKMKNYWRQLLNAKLITQRKFDNLTKAERGGLSELDKAGFIKRQLVETRQITKHVAQILDSRMNTKYDENDKLIREVKVITLKSKLVSDFRKDFQFYKVREINNYHHAHDAYLNAVVGTALIKKYPKLESEFVYGDYKVYDVRKMIAKSEQEIGKATAKYFFYSNIMNFFKTEITLANGEIRKRPLIETNGETGEIVWDKGRDFATVRKVLSMPQVNIVKKTEVQTGGFSKESILPKRNSDKLIARKKDWDPKKYGGFDSPTVAYSVLVVAKVEKGKSKKLKSVKELLGITIMERSSFEKNPIDFLEAKGYKEVKKDLIIKLPKYSLFELENGRKRMLASAGELQKGNELALPSKYVNFLYLASHYEKLKGSPEDNEQKQLFVEQHKHYLDEIIEQISEFSKRVILADANLDKVLSAYNKHRDKPIREQAENIIHLFTLTNLGAPAAFKYFDTTIDRKRYTSTKEVLDATLIHQSITGLYETRIDLSQLGGDGGGSSEAAAKGGVLNLEEEYRLHEKPVPSSIDPSWLQLFPTVWAERAGMGLANQVPPVVVELRSGASPVAVRQYPMSKEAREGIRPHIQRFLDLGVLVPCQSPWNTPLLPVKKPGTNDYRPVQDLREINKRVQDIHPTVPNPYNLLSSLPPSHTWYSVLDLKDAFFCLKLHPNSQPLFAFEWRDPEKGNTGQLTWTRLPQGFKNSPTLFNEALHRDLAPFRALNPQVVLLQYVDDLLVAAPTYRDCKEGTQKLLQELSKLGYRVSAKKAQLCQKEVTYLGYLLKEGKRWLTPARKATVMKIPPPTTPRQVREFLGKAGFCRLFIPGFASLAAPLYPLTKPSIPFIWTEEHQKAFDRIKEALLSAPALALPDLTKPFTLYVDERAGVARGVLTQTLGPWRRPVAYLSKKLDPVASGWPTCLKAVAAVALLLKDADKLTLGQNVTVIASHSLESIVRQPPDRWMTNARMTHYQSLLLNERVSFAPPAVLNPATLLPVESEATPVHRCSEILAEETGTRRDLKDQPLPGVPAWYTDGSSFIAEGKRRAGAAIVDGKRTVWASSLPEGTSAQKAELVALTQALRLAEGKDINIYTDSRYAFATAHIHGAIYKQRGWLTSAGKDIKNKEEILALLEAIHLPKRVAIIHCPGHQKGNDPVATGNRRADEAAKQAALSTRVLAETTKPAGKRTADGSEFEKRTADGSEFESPKKKAKVE

SEQ ID NO: 884 - protein, 2089 aa, synthetic construct
MPAAKRVKLDGGDKKYSIGLDIGTNSVGWAVITDEYKVPSKKFKVLGNTDRHSIKKNLIGALLFDSGETAEATRLKRTARRRYTRRKNRICYLQEIFSNEMAKVDDSFFHRLEESFLVEEDKKHERHPIFGNIVDEVAYHEKYPTIYHLRKKLVDSTDKADLRLIYLALAHMIKFRGHFLIEGDLNPDNSDVDKLFIQLVQTYNQLFEENPINASGVDAKAILSARLSKSRRLENLIAQLPGEKKNGLFGNLIALSLGLTPNFKSNFDLAEDAKLQLSKDTYDDDLDNLLAQIGDQYADLFLAAKNLSDAILLSDILRVNTEITKAPLSASMIKRYDEHHQDLTLLKALVRQQLPEKYKEIFFDQSKNGYAGYIDGGASQEEFYKFIKPILEKMDGTEELLVKLNREDLLRKQRTFDNGSIPHQIHLGELHAILRRQEDFYPFLKDNREKIEKILTFRIPYYVGPLARGNSRFAWMTRKSEETITPWNFEEVVDKGASAQSFIERMTNFDKNLPNEKVLPKHSLLYEYFTVYNELTKVKYVTEGMRKPAFLSGEQKKAIVDLLFKTNRKVTVKQLKEDYFKKIECFDSVEISGVEDRFNASLGTYHDLLKIIKDKDFLDNEENEDILEDIVLTLTLFEDREMIEERLKTYAHLFDDKVMKQLKRRRYTGWGRLSRKLINGIRDKQSGKTILDFLKSDGFANRNFMQLIHDDSLTFKEDIQKAQVSGQGDSLHEHIANLAGSPAIKKGILQTVKVVDELVKVMGRHKPENIVIEMARENQTTQKGQKNSRERMKRIEEGIKELGSQILKEHPVENTQLQNEKLYLYYLQNGRDMYVDQELDINRLSDYDVDHIVPQSFLKDDSIDNKVLTRSDKARGKSDNVPSEEVVKKMKNYWRQLLNAKLITQRKFDNLTKAERGGLSELDKAGFIKRQLVETRQITKHVAQILDSRMNTKYDENDKLIREVKVITLKSKLVSDFRKDFQFYKVREINNYHHAHDAYLNAVVGTALIKKYPKLESEFVYGDYKVYDVRKMIAKSEQEIGKATAKYFFYSNIMNFFKTEITLANGEIRKRPLIETNGETGEIVWDKGRDFATVRKVLSMPQVNIVKKTEVQTGGFSKESILPKRNSDKLIARKKDWDPKKYGGFDSPTVAYSVLVVAKVEKGKSKKLKSVKELLGITIMERSSFEKNPIDFLEAKGYKEVKKDLIIKLPKYSLFELENGRKRMLASAGELQKGNELALPSKYVNFLYLASHYEKLKGSPEDNEQKQLFVEQHKHYLDEIIEQISEFSKRVILADANLDKVLSAYNKHRDKPIREQAENIIHLFTLTNLGAPAAFKYFDTTIDRKRYTSTKEVLDATLIHQSITGLYETRIDLSQLGGDGGGSSPAPGGVLNLEEEYRLHEKPVPSSIDPSWLQLFPTVWAERAGMGLANQVPPVVVELRSGASPVAVRQYPMSKEAREGIRPHIQRFLDLGVLVPCQSPWNTPLLPVKKPGTNDYRPVQDLREINKRVQDIHPTVPNPYNLLSSLPPSHTWYSVLDLKDAFFCLKLHPNSQPLFAFEWRDPEKGNTGQLTWTRLPQGFKNSPTLFNEALHRDLAPFRALNPQVVLLQYVDDLLVAAPTYRDCKEGTQKLLQELSKLGYRVSAKKAQLCQKEVTYLGYLLKEGKRWLTPARKATVMKIPPPTTPRQVREFLGKAGFCRLFIPGFASLAAPLYPLTKPSIPFIWTEEHQKAFDRIKEALLSAPALALPDLTKPFTLYVDERAGVARGVLTQTLGPWRRPVAYLSKKLDPVASGWPTCLKAVAAVALLLKDADKLTLGQNVTVIASHSLESIVRQPPDRWMTNARMTHYQSLLLNERVSFAPPAVLNPATLLPVESEATPVHRCSEILAEETGTRRDLKDQPLPGVPAWYTDGSSFIAEGKRRAGAAIVDGKRTVWASSLPEGTSAQKAELVALTQALRLAEGKDINIYTDSRYAFATAHIHGAIYKQRGWLTSAGKDIKNKEEILALLEAIHLPKRVAIIHCPGHQKGNDPVATGNRRADEAAKQAALSTRVLAETTKPAGKRTADGSEFEKRTADGSEFESPKKKAKVE

SEQ ID NO: 885 - protein, 2092 aa, synthetic construct
MPAAKRVKLDGGDKKYSIGLDIGTNSVGWAVITDEYKVPSKKFKVLGNTDRHSIKKNLIGALLFDSGETAEATRLKRTARRRYTRRKNRICYLQEIFSNEMAKVDDSFFHRLEESFLVEEDKKHERHPIFGNIVDEVAYHEKYPTIYHLRKKLVDSTDKADLRLIYLALAHMIKFRGHFLIEGDLNPDNSDVDKLFIQLVQTYNQLFEENPINASGVDAKAILSARLSKSRRLENLIAQLPGEKKNGLFGNLIALSLGLTPNFKSNFDLAEDAKLQLSKDTYDDDLDNLLAQIGDQYADLFLAAKNLSDAILLSDILRVNTEITKAPLSASMIKRYDEHHQDLTLLKALVRQQLPEKYKEIFFDQSKNGYAGYIDGGASQEEFYKFIKPILEKMDGTEELLVKLNREDLLRKQRTFDNGSIPHQIHLGELHAILRRQEDFYPFLKDNREKIEKILTFRIPYYVGPLARGNSRFAWMTRKSEETITPWNFEEVVDKGASAQSFIERMTNFDKNLPNEKVLPKHSLLYEYFTVYNELTKVKYVTEGMRKPAFLSGEQKKAIVDLLFKTNRKVTVKQLKEDYFKKIECFDSVEISGVEDRFNASLGTYHDLLKIIKDKDFLDNEENEDILEDIVLTLTLFEDREMIEERLKTYAHLFDDKVMKQLKRRRYTGWGRLSRKLINGIRDKQSGKTILDFLKSDGFANRNFMQLIHDDSLTFKEDIQKAQVSGQGDSLHEHIANLAGSPAIKKGILQTVKVVDELVKVMGRHKPENIVIEMARENQTTQKGQKNSRERMKRIEEGIKELGSQILKEHPVENTQLQNEKLYLYYLQNGRDMYVDQELDINRLSDYDVDHIVPQSFLKDDSIDNKVLTRSDKARGKSDNVPSEEVVKKMKNYWRQLLNAKLITQRKFDNLTKAERGGLSELDKAGFIKRQLVETRQITKHVAQILDSRMNTKYDENDKLIREVKVITLKSKLVSDFRKDFQFYKVREINNYHHAHDAYLNAVVGTALIKKYPKLESEFVYGDYKVYDVRKMIAKSEQEIGKATAKYFFYSNIMNFFKTEITLANGEIRKRPLIETNGETGEIVWDKGRDFATVRKVLSMPQVNIVKKTEVQTGGFSKESILPKRNSDKLIARKKDWDPKKYGGFDSPTVAYSVLVVAKVEKGKSKKLKSVKELLGITIMERSSFEKNPIDFLEAKGYKEVKKDLIIKLPKYSLFELENGRKRMLASAGELQKGNELALPSKYVNFLYLASHYEKLKGSPEDNEQKQLFVEQHKHYLDEIIEQISEFSKRVILADANLDKVLSAYNKHRDKPIREQAENIIHLFTLTNLGAPAAFKYFDTTIDRKRYTSTKEVLDATLIHQSITGLYETRIDLSQLGGDGGGGSGGSGGSGGVLNLEEEYRLHEKPVPSSIDPSWLQLFPTVWAERAGMGLANQVPPVVVELRSGASPVAVRQYPMSKEAREGIRPHIQRFLDLGVLVPCQSPWNTPLLPVKKPGTNDYRPVQDLREINKRVQDIHPTVPNPYNLLSSLPPSHTWYSVLDLKDAFFCLKLHPNSQPLFAFEWRDPEKGNTGQLTWTRLPQGFKNSPTLFNEALHRDLAPFRALNPQVVLLQYVDDLLVAAPTYRDCKEGTQKLLQELSKLGYRVSAKKAQLCQKEVTYLGYLLKEGKRWLTPARKATVMKIPPPTTPRQVREFLGKAGFCRLFIPGFASLAAPLYPLTKPSIPFIWTEEHQKAFDRIKEALLSAPALALPDLTKPFTLYVDERAGVARGVLTQTLGPWRRPVAYLSKKLDPVASGWPTCLKAVAAVALLLKDADKLTLGQNVTVIASHSLESIVRQPPDRWMTNARMTHYQSLLLNERVSFAPPAVLNPATLLPVESEATPVHRCSEILAEETGTRRDLKDQPLPGVPAWYTDGSSFIAEGKRRAGAAIVDGKRTVWASSLPEGTSAQKAELVALTQALRLAEGKDINIYTDSRYAFATAHIHGAIYKQRGWLTSAGKDIKNKEEILALLEAIHLPKRVAIIHCPGHQKGNDPVATGNRRADEAAKQAALSTRVLAETTKPAGKRTADGSEFEKRTADGSEFESPKKKAKVE

SEQ ID NO: 886 - protein, 2095 aa, synthetic construct
MPAAKRVKLDGGDKKYSIGLDIGTNSVGWAVITDEYKVPSKKFKVLGNTDRHSIKKNLIGALLFDSGETAEATRLKRTARRRYTRRKNRICYLQEIFSNEMAKVDDSFFHRLEESFLVEEDKKHERHPIFGNIVDEVAYHEKYPTIYHLRKKLVDSTDKADLRLIYLALAHMIKFRGHFLIEGDLNPDNSDVDKLFIQLVQTYNQLFEENPINASGVDAKAILSARLSKSRRLENLIAQLPGEKKNGLFGNLIALSLGLTPNFKSNFDLAEDAKLQLSKDTYDDDLDNLLAQIGDQYADLFLAAKNLSDAILLSDILRVNTEITKAPLSASMIKRYDEHHQDLTLLKALVRQQLPEKYKEIFFDQSKNGYAGYIDGGASQEEFYKFIKPILEKMDGTEELLVKLNREDLLRKQRTFDNGSIPHQIHLGELHAILRRQEDFYPFLKDNREKIEKILTFRIPYYVGPLARGNSRFAWMTRKSEETITPWNFEEVVDKGASAQSFIERMTNFDKNLPNEKVLPKHSLLYEYFTVYNELTKVKYVTEGMRKPAFLSGEQKKAIVDLLFKTNRKVTVKQLKEDYFKKIECFDSVEISGVEDRFNASLGTYHDLLKIIKDKDFLDNEENEDILEDIVLTLTLFEDREMIEERLKTYAHLFDDKVMKQLKRRRYTGWGRLSRKLINGIRDKQSGKTILDFLKSDGFANRNFMQLIHDDSLTFKEDIQKAQVSGQGDSLHEHIANLAGSPAIKKGILQTVKVVDELVKVMGRHKPENIVIEMARENQTTQKGQKNSRERMKRIEEGIKELGSQILKEHPVENTQLQNEKLYLYYLQNGRDMYVDQELDINRLSDYDVDHIVPQSFLKDDSIDNKVLTRSDKARGKSDNVPSEEVVKKMKNYWRQLLNAKLITQRKFDNLTKAERGGLSELDKAGFIKRQLVETRQITKHVAQILDSRMNTKYDENDKLIREVKVITLKSKLVSDFRKDFQFYKVREINNYHHAHDAYLNAVVGTALIKKYPKLESEFVYGDYKVYDVRKMIAKSEQEIGKATAKYFFYSNIMNFFKTEITLANGEIRKRPLIETNGETGEIVWDKGRDFATVRKVLSMPQVNIVKKTEVQTGGFSKESILPKRNSDKLIARKKDWDPKKYGGFDSPTVAYSVLVVAKVEKGKSKKLKSVKELLGITIMERSSFEKNPIDFLEAKGYKEVKKDLIIKLPKYSLFELENGRKRMLASAGELQKGNELALPSKYVNFLYLASHYEKLKGSPEDNEQKQLFVEQHKHYLDEIIEQISEFSKRVILADANLDKVLSAYNKHRDKPIREQAENIIHLFTLTNLGAPAAFKYFDTTIDRKRYTSTKEVLDATLIHQSITGLYETRIDLSQLGGDGGGGSGGSGGSGGSGGVLNLEEEYRLHEKPVPSSIDPSWLQLFPTVWAERAGMGLANQVPPVVVELRSGASPVAVRQYPMSKEAREGIRPHIQRFLDLGVLVPCQSPWNTPLLPVKKPGTNDYRPVQDLREINKRVQDIHPTVPNPYNLLSSLPPSHTWYSVLDLKDAFFCLKLHPNSQPLFAFEWRDPEKGNTGQLTWTRLPQGFKNSPTLFNEALHRDLAPFRALNPQVVLLQYVDDLLVAAPTYRDCKEGTQKLLQELSKLGYRVSAKKAQLCQKEVTYLGYLLKEGKRWLTPARKATVMKIPPPTTPRQVREFLGKAGFCRLFIPGFASLAAPLYPLTKPSIPFIWTEEHQKAFDRIKEALLSAPALALPDLTKPFTLYVDERAGVARGVLTQTLGPWRRPVAYLSKKLDPVASGWPTCLKAVAAVALLLKDADKLTLGQNVTVIASHSLESIVRQPPDRWMTNARMTHYQSLLLNERVSFAPPAVLNPATLLPVESEATPVHRCSEILAEETGTRRDLKDQPLPGVPAWYTDGSSFIAEGKRRAGAAIVDGKRTVWASSLPEGTSAQKAELVALTQALRLAEGKDINIYTDSRYAFATAHIHGAIYKQRGWLTSAGKDIKNKEEILALLEAIHLPKRVAIIHCPGHQKGNDPVATGNRRADEAAKQAALSTRVLAETTKPAGKRTADGSEFEKRTADGSEFESPKKKAKVE

SEQ ID NO: 887 - protein, 2095 aa, synthetic construct
MPAAKRVKLDGGDKKYSIGLDIGTNSVGWAVITDEYKVPSKKFKVLGNTDRHSIKKNLIGALLFDSGETAEATRLKRTARRRYTRRKNRICYLQEIFSNEMAKVDDSFFHRLEESFLVEEDKKHERHPIFGNIVDEVAYHEKYPTIYHLRKKLVDSTDKADLRLIYLALAHMIKFRGHFLIEGDLNPDNSDVDKLFIQLVQTYNQLFEENPINASGVDAKAILSARLSKSRRLENLIAQLPGEKKNGLFGNLIALSLGLTPNFKSNFDLAEDAKLQLSKDTYDDDLDNLLAQIGDQYADLFLAAKNLSDAILLSDILRVNTEITKAPLSASMIKRYDEHHQDLTLLKALVRQQLPEKYKEIFFDQSKNGYAGYIDGGASQEEFYKFIKPILEKMDGTEELLVKLNREDLLRKQRTFDNGSIPHQIHLGELHAILRRQEDFYPFLKDNREKIEKILTFRIPYYVGPLARGNSRFAWMTRKSEETITPWNFEEVVDKGASAQSFIERMTNFDKNLPNEKVLPKHSLLYEYFTVYNELTKVKYVTEGMRKPAFLSGEQKKAIVDLLFKTNRKVTVKQLKEDYFKKIECFDSVEISGVEDRFNASLGTYHDLLKIIKDKDFLDNEENEDILEDIVLTLTLFEDREMIEERLKTYAHLFDDKVMKQLKRRRYTGWGRLSRKLINGIRDKQSGKTILDFLKSDGFANRNFMQLIHDDSLTFKEDIQKAQVSGQGDSLHEHIANLAGSPAIKKGILQTVKVVDELVKVMGRHKPENIVIEMARENQTTQKGQKNSRERMKRIEEGIKELGSQILKEHPVENTQLQNEKLYLYYLQNGRDMYVDQELDINRLSDYDVDHIVPQSFLKDDSIDNKVLTRSDKARGKSDNVPSEEVVKKMKNYWRQLLNAKLITQRKFDNLTKAERGGLSELDKAGFIKRQLVETRQITKHVAQILDSRMNTKYDENDKLIREVKVITLKSKLVSDFRKDFQFYKVREINNYHHAHDAYLNAVVGTALIKKYPKLESEFVYGDYKVYDVRKMIAKSEQEIGKATAKYFFYSNIMNFFKTEITLANGEIRKRPLIETNGETGEIVWDKGRDFATVRKVLSMPQVNIVKKTEVQTGGFSKESILPKRNSDKLIARKKDWDPKKYGGFDSPTVAYSVLVVAKVEKGKSKKLKSVKELLGITIMERSSFEKNPIDFLEAKGYKEVKKDLIIKLPKYSLFELENGRKRMLASAGELQKGNELALPSKYVNFLYLASHYEKLKGSPEDNEQKQLFVEQHKHYLDEIIEQISEFSKRVILADANLDKVLSAYNKHRDKPIREQAENIIHLFTLTNLGAPAAFKYFDTTIDRKRYTSTKEVLDATLIHQSITGLYETRIDLSQLGGDGGGSSGSSGSSGSSGGVLNLEEEYRLHEKPVPSSIDPSWLQLFPTVWAERAGMGLANQVPPVVVELRSGASPVAVRQYPMSKEAREGIRPHIQRFLDLGVLVPCQSPWNTPLLPVKKPGTNDYRPVQDLREINKRVQDIHPTVPNPYNLLSSLPPSHTWYSVLDLKDAFFCLKLHPNSQPLFAFEWRDPEKGNTGQLTWTRLPQGFKNSPTLFNEALHRDLAPFRALNPQVVLLQYVDDLLVAAPTYRDCKEGTQKLLQELSKLGYRVSAKKAQLCQKEVTYLGYLLKEGKRWLTPARKATVMKIPPPTTPRQVREFLGKAGFCRLFIPGFASLAAPLYPLTKPSIPFIWTEEHQKAFDRIKEALLSAPALALPDLTKPFTLYVDERAGVARGVLTQTLGPWRRPVAYLSKKLDPVASGWPTCLKAVAAVALLLKDADKLTLGQNVTVIASHSLESIVRQPPDRWMTNARMTHYQSLLLNERVSFAPPAVLNPATLLPVESEATPVHRCSEILAEETGTRRDLKDQPLPGVPAWYTDGSSFIAEGKRRAGAAIVDGKRTVWASSLPEGTSAQKAELVALTQALRLAEGKDINIYTDSRYAFATAHIHGAIYKQRGWLTSAGKDIKNKEEILALLEAIHLPKRVAIIHCPGHQKGNDPVATGNRRADEAAKQAALSTRVLAETTKPAGKRTADGSEFEKRTADGSEFESPKKKAKVE

SEQ ID NO: 888 - protein, 2092 aa, synthetic construct
MPAAKRVKLDGGDKKYSIGLDIGTNSVGWAVITDEYKVPSKKFKVLGNTDRHSIKKNLIGALLFDSGETAEATRLKRTARRRYTRRKNRICYLQEIFSNEMAKVDDSFFHRLEESFLVEEDKKHERHPIFGNIVDEVAYHEKYPTIYHLRKKLVDSTDKADLRLIYLALAHMIKFRGHFLIEGDLNPDNSDVDKLFIQLVQTYNQLFEENPINASGVDAKAILSARLSKSRRLENLIAQLPGEKKNGLFGNLIALSLGLTPNFKSNFDLAEDAKLQLSKDTYDDDLDNLLAQIGDQYADLFLAAKNLSDAILLSDILRVNTEITKAPLSASMIKRYDEHHQDLTLLKALVRQQLPEKYKEIFFDQSKNGYAGYIDGGASQEEFYKFIKPILEKMDGTEELLVKLNREDLLRKQRTFDNGSIPHQIHLGELHAILRRQEDFYPFLKDNREKIEKILTFRIPYYVGPLARGNSRFAWMTRKSEETITPWNFEEVVDKGASAQSFIERMTNFDKNLPNEKVLPKHSLLYEYFTVYNELTKVKYVTEGMRKPAFLSGEQKKAIVDLLFKTNRKVTVKQLKEDYFKKIECFDSVEISGVEDRFNASLGTYHDLLKIIKDKDFLDNEENEDILEDIVLTLTLFEDREMIEERLKTYAHLFDDKVMKQLKRRRYTGWGRLSRKLINGIRDKQSGKTILDFLKSDGFANRNFMQLIHDDSLTFKEDIQKAQVSGQGDSLHEHIANLAGSPAIKKGILQTVKVVDELVKVMGRHKPENIVIEMARENQTTQKGQKNSRERMKRIEEGIKELGSQILKEHPVENTQLQNEKLYLYYLQNGRDMYVDQELDINRLSDYDVDHIVPQSFLKDDSIDNKVLTRSDKARGKSDNVPSEEVVKKMKNYWRQLLNAKLITQRKFDNLTKAERGGLSELDKAGFIKRQLVETRQITKHVAQILDSRMNTKYDENDKLIREVKVITLKSKLVSDFRKDFQFYKVREINNYHHAHDAYLNAVVGTALIKKYPKLESEFVYGDYKVYDVRKMIAKSEQEIGKATAKYFFYSNIMNFFKTEITLANGEIRKRPLIETNGETGEIVWDKGRDFATVRKVLSMPQVNIVKKTEVQTGGFSKESILPKRNSDKLIARKKDWDPKKYGGFDSPTVAYSVLVVAKVEKGKSKKLKSVKELLGITIMERSSFEKNPIDFLEAKGYKEVKKDLIIKLPKYSLFELENGRKRMLASAGELQKGNELALPSKYVNFLYLASHYEKLKGSPEDNEQKQLFVEQHKHYLDEIIEQISEFSKRVILADANLDKVLSAYNKHRDKPIREQAENIIHLFTLTNLGAPAAFKYFDTTIDRKRYTSTKEVLDATLIHQSITGLYETRIDLSQLGGDGGGGGGSSPAPGGVLNLEEEYRLHEKPVPSSIDPSWLQLFPTVWAERAGMGLANQVPPVVVELRSGASPVAVRQYPMSKEAREGIRPHIQRFLDLGVLVPCQSPWNTPLLPVKKPGTNDYRPVQDLREINKRVQDIHPTVPNPYNLLSSLPPSHTWYSVLDLKDAFFCLKLHPNSQPLFAFEWRDPEKGNTGQLTWTRLPQGFKNSPTLFNEALHRDLAPFRALNPQVVLLQYVDDLLVAAPTYRDCKEGTQKLLQELSKLGYRVSAKKAQLCQKEVTYLGYLLKEGKRWLTPARKATVMKIPPPTTPRQVREFLGKAGFCRLFIPGFASLAAPLYPLTKPSIPFIWTEEHQKAFDRIKEALLSAPALALPDLTKPFTLYVDERAGVARGVLTQTLGPWRRPVAYLSKKLDPVASGWPTCLKAVAAVALLLKDADKLTLGQNVTVIASHSLESIVRQPPDRWMTNARMTHYQSLLLNERVSFAPPAVLNPATLLPVESEATPVHRCSEILAEETGTRRDLKDQPLPGVPAWYTDGSSFIAEGKRRAGAAIVDGKRTVWASSLPEGTSAQKAELVALTQALRLAEGKDINIYTDSRYAFATAHIHGAIYKQRGWLTSAGKDIKNKEEILALLEAIHLPKRVAIIHCPGHQKGNDPVATGNRRADEAAKQAALSTRVLAETTKPAGKRTADGSEFEKRTADGSEFESPKKKAKVE

SEQ ID NO: 889 - protein, 2092 aa, synthetic construct
MPAAKRVKLDGGDKKYSIGLDIGTNSVGWAVITDEYKVPSKKFKVLGNTDRHSIKKNLIGALLFDSGETAEATRLKRTARRRYTRRKNRICYLQEIFSNEMAKVDDSFFHRLEESFLVEEDKKHERHPIFGNIVDEVAYHEKYPTIYHLRKKLVDSTDKADLRLIYLALAHMIKFRGHFLIEGDLNPDNSDVDKLFIQLVQTYNQLFEENPINASGVDAKAILSARLSKSRRLENLIAQLPGEKKNGLFGNLIALSLGLTPNFKSNFDLAEDAKLQLSKDTYDDDLDNLLAQIGDQYADLFLAAKNLSDAILLSDILRVNTEITKAPLSASMIKRYDEHHQDLTLLKALVRQQLPEKYKEIFFDQSKNGYAGYIDGGASQEEFYKFIKPILEKMDGTEELLVKLNREDLLRKQRTFDNGSIPHQIHLGELHAILRRQEDFYPFLKDNREKIEKILTFRIPYYVGPLARGNSRFAWMTRKSEETITPWNFEEVVDKGASAQSFIERMTNFDKNLPNEKVLPKHSLLYEYFTVYNELTKVKYVTEGMRKPAFLSGEQKKAIVDLLFKTNRKVTVKQLKEDYFKKIECFDSVEISGVEDRFNASLGTYHDLLKIIKDKDFLDNEENEDILEDIVLTLTLFEDREMIEERLKTYAHLFDDKVMKQLKRRRYTGWGRLSRKLINGIRDKQSGKTILDFLKSDGFANRNFMQLIHDDSLTFKEDIQKAQVSGQGDSLHEHIANLAGSPAIKKGILQTVKVVDELVKVMGRHKPENIVIEMARENQTTQKGQKNSRERMKRIEEGIKELGSQILKEHPVENTQLQNEKLYLYYLQNGRDMYVDQELDINRLSDYDVDHIVPQSFLKDDSIDNKVLTRSDKARGKSDNVPSEEVVKKMKNYWRQLLNAKLITQRKFDNLTKAERGGLSELDKAGFIKRQLVETRQITKHVAQILDSRMNTKYDENDKLIREVKVITLKSKLVSDFRKDFQFYKVREINNYHHAHDAYLNAVVGTALIKKYPKLESEFVYGDYKVYDVRKMIAKSEQEIGKATAKYFFYSNIMNFFKTEITLANGEIRKRPLIETNGETGEIVWDKGRDFATVRKVLSMPQVNIVKKTEVQTGGFSKESILPKRNSDKLIARKKDWDPKKYGGFDSPTVAYSVLVVAKVEKGKSKKLKSVKELLGITIMERSSFEKNPIDFLEAKGYKEVKKDLIIKLPKYSLFELENGRKRMLASAGELQKGNELALPSKYVNFLYLASHYEKLKGSPEDNEQKQLFVEQHKHYLDEIIEQISEFSKRVILADANLDKVLSAYNKHRDKPIREQAENIIHLFTLTNLGAPAAFKYFDTTIDRKRYTSTKEVLDATLIHQSITGLYETRIDLSQLGGDGGPAPGGSGGGGGVLNLEEEYRLHEKPVPSSIDPSWLQLFPTVWAERAGMGLANQVPPVVVELRSGASPVAVRQYPMSKEAREGIRPHIQRFLDLGVLVPCQSPWNTPLLPVKKPGTNDYRPVQDLREINKRVQDIHPTVPNPYNLLSSLPPSHTWYSVLDLKDAFFCLKLHPNSQPLFAFEWRDPEKGNTGQLTWTRLPQGFKNSPTLFNEALHRDLAPFRALNPQVVLLQYVDDLLVAAPTYRDCKEGTQKLLQELSKLGYRVSAKKAQLCQKEVTYLGYLLKEGKRWLTPARKATVMKIPPPTTPRQVREFLGKAGFCRLFIPGFASLAAPLYPLTKPSIPFIWTEEHQKAFDRIKEALLSAPALALPDLTKPFTLYVDERAGVARGVLTQTLGPWRRPVAYLSKKLDPVASGWPTCLKAVAAVALLLKDADKLTLGQNVTVIASHSLESIVRQPPDRWMTNARMTHYQSLLLNERVSFAPPAVLNPATLLPVESEATPVHRCSEILAEETGTRRDLKDQPLPGVPAWYTDGSSFIAEGKRRAGAAIVDGKRTVWASSLPEGTSAQKAELVALTQALRLAEGKDINIYTDSRYAFATAHIHGAIYKQRGWLTSAGKDIKNKEEILALLEAIHLPKRVAIIHCPGHQKGNDPVATGNRRADEAAKQAALSTRVLAETTKPAGKRTADGSEFEKRTADGSEFESPKKKAKVE

SEQ ID NO: 890 - protein, 2096 aa, synthetic construct
MPAAKRVKLDGGDKKYSIGLDIGTNSVGWAVITDEYKVPSKKFKVLGNTDRHSIKKNLIGALLFDSGETAEATRLKRTARRRYTRRKNRICYLQEIFSNEMAKVDDSFFHRLEESFLVEEDKKHERHPIFGNIVDEVAYHEKYPTIYHLRKKLVDSTDKADLRLIYLALAHMIKFRGHFLIEGDLNPDNSDVDKLFIQLVQTYNQLFEENPINASGVDAKAILSARLSKSRRLENLIAQLPGEKKNGLFGNLIALSLGLTPNFKSNFDLAEDAKLQLSKDTYDDDLDNLLAQIGDQYADLFLAAKNLSDAILLSDILRVNTEITKAPLSASMIKRYDEHHQDLTLLKALVRQQLPEKYKEIFFDQSKNGYAGYIDGGASQEEFYKFIKPILEKMDGTEELLVKLNREDLLRKQRTFDNGSIPHQIHLGELHAILRRQEDFYPFLKDNREKIEKILTFRIPYYVGPLARGNSRFAWMTRKSEETITPWNFEEVVDKGASAQSFIERMTNFDKNLPNEKVLPKHSLLYEYFTVYNELTKVKYVTEGMRKPAFLSGEQKKAIVDLLFKTNRKVTVKQLKEDYFKKIECFDSVEISGVEDRFNASLGTYHDLLKIIKDKDFLDNEENEDILEDIVLTLTLFEDREMIEERLKTYAHLFDDKVMKQLKRRRYTGWGRLSRKLINGIRDKQSGKTILDFLKSDGFANRNFMQLIHDDSLTFKEDIQKAQVSGQGDSLHEHIANLAGSPAIKKGILQTVKVVDELVKVMGRHKPENIVIEMARENQTTQKGQKNSRERMKRIEEGIKELGSQILKEHPVENTQLQNEKLYLYYLQNGRDMYVDQELDINRLSDYDVDHIVPQSFLKDDSIDNKVLTRSDKARGKSDNVPSEEVVKKMKNYWRQLLNAKLITQRKFDNLTKAERGGLSELDKAGFIKRQLVETRQITKHVAQILDSRMNTKYDENDKLIREVKVITLKSKLVSDFRKDFQFYKVREINNYHHAHDAYLNAVVGTALIKKYPKLESEFVYGDYKVYDVRKMIAKSEQEIGKATAKYFFYSNIMNFFKTEITLANGEIRKRPLIETNGETGEIVWDKGRDFATVRKVLSMPQVNIVKKTEVQTGGFSKESILPKRNSDKLIARKKDWDPKKYGGFDSPTVAYSVLVVAKVEKGKSKKLKSVKELLGITIMERSSFEKNPIDFLEAKGYKEVKKDLIIKLPKYSLFELENGRKRMLASAGELQKGNELALPSKYVNFLYLASHYEKLKGSPEDNEQKQLFVEQHKHYLDEIIEQISEFSKRVILADANLDKVLSAYNKHRDKPIREQAENIIHLFTLTNLGAPAAFKYFDTTIDRKRYTSTKEVLDATLIHQSITGLYETRIDLSQLGGDGGPAPAPAPAPAPAPGGVLNLEEEYRLHEKPVPSSIDPSWLQLFPTVWAERAGMGLANQVPPVVVELRSGASPVAVRQYPMSKEAREGIRPHIQRFLDLGVLVPCQSPWNTPLLPVKKPGTNDYRPVQDLREINKRVQDIHPTVPNPYNLLSSLPPSHTWYSVLDLKDAFFCLKLHPNSQPLFAFEWRDPEKGNTGQLTWTRLPQGFKNSPTLFNEALHRDLAPFRALNPQVVLLQYVDDLLVAAPTYRDCKEGTQKLLQELSKLGYRVSAKKAQLCQKEVTYLGYLLKEGKRWLTPARKATVMKIPPPTTPRQVREFLGKAGFCRLFIPGFASLAAPLYPLTKPSIPFIWTEEHQKAFDRIKEALLSAPALALPDLTKPFTLYVDERAGVARGVLTQTLGPWRRPVAYLSKKLDPVASGWPTCLKAVAAVALLLKDADKLTLGQNVTVIASHSLESIVRQPPDRWMTNARMTHYQSLLLNERVSFAPPAVLNPATLLPVESEATPVHRCSEILAEETGTRRDLKDQPLPGVPAWYTDGSSFIAEGKRRAGAAIVDGKRTVWASSLPEGTSAQKAELVALTQALRLAEGKDINIYTDSRYAFATAHIHGAIYKQRGWLTSAGKDIKNKEEILALLEAIHLPKRVAIIHCPGHQKGNDPVATGNRRADEAAKQAALSTRVLAETTKPAGKRTADGSEFEKRTADGSEFESPKKKAKVE

SEQ ID NO: 891 - protein, 2094 aa, synthetic construct
MPAAKRVKLDGGDKKYSIGLDIGTNSVGWAVITDEYKVPSKKFKVLGNTDRHSIKKNLIGALLFDSGETAEATRLKRTARRRYTRRKNRICYLQEIFSNEMAKVDDSFFHRLEESFLVEEDKKHERHPIFGNIVDEVAYHEKYPTIYHLRKKLVDSTDKADLRLIYLALAHMIKFRGHFLIEGDLNPDNSDVDKLFIQLVQTYNQLFEENPINASGVDAKAILSARLSKSRRLENLIAQLPGEKKNGLFGNLIALSLGLTPNFKSNFDLAEDAKLQLSKDTYDDDLDNLLAQIGDQYADLFLAAKNLSDAILLSDILRVNTEITKAPLSASMIKRYDEHHQDLTLLKALVRQQLPEKYKEIFFDQSKNGYAGYIDGGASQEEFYKFIKPILEKMDGTEELLVKLNREDLLRKQRTFDNGSIPHQIHLGELHAILRRQEDFYPFLKDNREKIEKILTFRIPYYVGPLARGNSRFAWMTRKSEETITPWNFEEVVDKGASAQSFIERMTNFDKNLPNEKVLPKHSLLYEYFTVYNELTKVKYVTEGMRKPAFLSGEQKKAIVDLLFKTNRKVTVKQLKEDYFKKIECFDSVEISGVEDRFNASLGTYHDLLKIIKDKDFLDNEENEDILEDIVLTLTLFEDREMIEERLKTYAHLFDDKVMKQLKRRRYTGWGRLSRKLINGIRDKQSGKTILDFLKSDGFANRNFMQLIHDDSLTFKEDIQKAQVSGQGDSLHEHIANLAGSPAIKKGILQTVKVVDELVKVMGRHKPENIVIEMARENQTTQKGQKNSRERMKRIEEGIKELGSQILKEHPVENTQLQNEKLYLYYLQNGRDMYVDQELDINRLSDYDVDHIVPQSFLKDDSIDNKVLTRSDKARGKSDNVPSEEVVKKMKNYWRQLLNAKLITQRKFDNLTKAERGGLSELDKAGFIKRQLVETRQITKHVAQILDSRMNTKYDENDKLIREVKVITLKSKLVSDFRKDFQFYKVREINNYHHAHDAYLNAVVGTALIKKYPKLESEFVYGDYKVYDVRKMIAKSEQEIGKATAKYFFYSNIMNFFKTEITLANGEIRKRPLIETNGETGEIVWDKGRDFATVRKVLSMPQVNIVKKTEVQTGGFSKESILPKRNSDKLIARKKDWDPKKYGGFDSPTVAYSVLVVAKVEKGKSKKLKSVKELLGITIMERSSFEKNPIDFLEAKGYKEVKKDLIIKLPKYSLFELENGRKRMLASAGELQKGNELALPSKYVNFLYLASHYEKLKGSPEDNEQKQLFVEQHKHYLDEIIEQISEFSKRVILADANLDKVLSAYNKHRDKPIREQAENIIHLFTLTNLGAPAAFKYFDTTIDRKRYTSTKEVLDATLIHQSITGLYETRIDLSQLGGDGGEAAAKGSSGGGGGVLNLEEEYRLHEKPVPSSIDPSWLQLFPTVWAERAGMGLANQVPPVVVELRSGASPVAVRQYPMSKEAREGIRPHIQRFLDLGVLVPCQSPWNTPLLPVKKPGTNDYRPVQDLREINKRVQDIHPTVPNPYNLLSSLPPSHTWYSVLDLKDAFFCLKLHPNSQPLFAFEWRDPEKGNTGQLTWTRLPQGFKNSPTLFNEALHRDLAPFRALNPQVVLLQYVDDLLVAAPTYRDCKEGTQKLLQELSKLGYRVSAKKAQLCQKEVTYLGYLLKEGKRWLTPARKATVMKIPPPTTPRQVREFLGKAGFCRLFIPGFASLAAPLYPLTKPSIPFIWTEEHQKAFDRIKEALLSAPALALPDLTKPFTLYVDERAGVARGVLTQTLGPWRRPVAYLSKKLDPVASGWPTCLKAVAAVALLLKDADKLTLGQNVTVIASHSLESIVRQPPDRWMTNARMTHYQSLLLNERVSFAPPAVLNPATLLPVESEATPVHRCSEILAEETGTRRDLKDQPLPGVPAWYTDGSSFIAEGKRRAGAAIVDGKRTVWASSLPEGTSAQKAELVALTQALRLAEGKDINIYTDSRYAFATAHIHGAIYKQRGWLTSAGKDIKNKEEILALLEAIHLPKRVAIIHCPGHQKGNDPVATGNRRADEAAKQAALSTRVLAETTKPAGKRTADGSEFEKRTADGSEFESPKKKAKVE

SEQ ID NO: 892 - protein, 2094 aa, synthetic construct
MPAAKRVKLDGGDKKYSIGLDIGTNSVGWAVITDEYKVPSKKFKVLGNTDRHSIKKNLIGALLFDSGETAEATRLKRTARRRYTRRKNRICYLQEIFSNEMAKVDDSFFHRLEESFLVEEDKKHERHPIFGNIVDEVAYHEKYPTIYHLRKKLVDSTDKADLRLIYLALAHMIKFRGHFLIEGDLNPDNSDVDKLFIQLVQTYNQLFEENPINASGVDAKAILSARLSKSRRLENLIAQLPGEKKNGLFGNLIALSLGLTPNFKSNFDLAEDAKLQLSKDTYDDDLDNLLAQIGDQYADLFLAAKNLSDAILLSDILRVNTEITKAPLSASMIKRYDEHHQDLTLLKALVRQQLPEKYKEIFFDQSKNGYAGYIDGGASQEEFYKFIKPILEKMDGTEELLVKLNREDLLRKQRTFDNGSIPHQIHLGELHAILRRQEDFYPFLKDNREKIEKILTFRIPYYVGPLARGNSRFAWMTRKSEETITPWNFEEVVDKGASAQSFIERMTNFDKNLPNEKVLPKHSLLYEYFTVYNELTKVKYVTEGMRKPAFLSGEQKKAIVDLLFKTNRKVTVKQLKEDYFKKIECFDSVEISGVEDRFNASLGTYHDLLKIIKDKDFLDNEENEDILEDIVLTLTLFEDREMIEERLKTYAHLFDDKVMKQLKRRRYTGWGRLSRKLINGIRDKQSGKTILDFLKSDGFANRNFMQLIHDDSLTFKEDIQKAQVSGQGDSLHEHIANLAGSPAIKKGILQTVKVVDELVKVMGRHKPENIVIEMARENQTTQKGQKNSRERMKRIEEGIKELGSQILKEHPVENTQLQNEKLYLYYLQNGRDMYVDQELDINRLSDYDVDHIVPQSFLKDDSIDNKVLTRSDKARGKSDNVPSEEVVKKMKNYWRQLLNAKLITQRKFDNLTKAERGGLSELDKAGFIKRQLVETRQITKHVAQILDSRMNTKYDENDKLIREVKVITLKSKLVSDFRKDFQFYKVREINNYHHAHDAYLNAVVGTALIKKYPKLESEFVYGDYKVYDVRKMIAKSEQEIGKATAKYFFYSNIMNFFKTEITLANGEIRKRPLIETNGETGEIVWDKGRDFATVRKVLSMPQVNIVKKTEVQTGGFSKESILPKRNSDKLIARKKDWDPKKYGGFDSPTVAYSVLVVAKVEKGKSKKLKSVKELLGITIMERSSFEKNPIDFLEAKGYKEVKKDLIIKLPKYSLFELENGRKRMLASAGELQKGNELALPSKYVNFLYLASHYEKLKGSPEDNEQKQLFVEQHKHYLDEIIEQISEFSKRVILADANLDKVLSAYNKHRDKPIREQAENIIHLFTLTNLGAPAAFKYFDTTIDRKRYTSTKEVLDATLIHQSITGLYETRIDLSQLGGDGGPAPEAAAKGSSGGVLNLEEEYRLHEKPVPSSIDPSWLQLFPTVWAERAGMGLANQVPPVVVELRSGASPVAVRQYPMSKEAREGIRPHIQRFLDLGVLVPCQSPWNTPLLPVKKPGTNDYRPVQDLREINKRVQDIHPTVPNPYNLLSSLPPSHTWYSVLDLKDAFFCLKLHPNSQPLFAFEWRDPEKGNTGQLTWTRLPQGFKNSPTLFNEALHRDLAPFRALNPQVVLLQYVDDLLVAAPTYRDCKEGTQKLLQELSKLGYRVSAKKAQLCQKEVTYLGYLLKEGKRWLTPARKATVMKIPPPTTPRQVREFLGKAGFCRLFIPGFASLAAPLYPLTKPSIPFIWTEEHQKAFDRIKEALLSAPALALPDLTKPFTLYVDERAGVARGVLTQTLGPWRRPVAYLSKKLDPVASGWPTCLKAVAAVALLLKDADKLTLGQNVTVIASHSLESIVRQPPDRWMTNARMTHYQSLLLNERVSFAPPAVLNPATLLPVESEATPVHRCSEILAEETGTRRDLKDQPLPGVPAWYTDGSSFIAEGKRRAGAAIVDGKRTVWASSLPEGTSAQKAELVALTQALRLAEGKDINIYTDSRYAFATAHIHGAIYKQRGWLTSAGKDIKNKEEILALLEAIHLPKRVAIIHCPGHQKGNDPVATGNRRADEAAKQAALSTRVLAETTKPAGKRTADGSEFEKRTADGSEFESPKKKAKVE

SEQ ID NO: 893 - protein, 2113 aa, synthetic construct
MPAAKRVKLDGGDKKYSIGLDIGTNSVGWAVITDEYKVPSKKFKVLGNTDRHSIKKNLIGALLFDSGETAEATRLKRTARRRYTRRKNRICYLQEIFSNEMAKVDDSFFHRLEESFLVEEDKKHERHPIFGNIVDEVAYHEKYPTIYHLRKKLVDSTDKADLRLIYLALAHMIKFRGHFLIEGDLNPDNSDVDKLFIQLVQTYNQLFEENPINASGVDAKAILSARLSKSRRLENLIAQLPGEKKNGLFGNLIALSLGLTPNFKSNFDLAEDAKLQLSKDTYDDDLDNLLAQIGDQYADLFLAAKNLSDAILLSDILRVNTEITKAPLSASMIKRYDEHHQDLTLLKALVRQQLPEKYKEIFFDQSKNGYAGYIDGGASQEEFYKFIKPILEKMDGTEELLVKLNREDLLRKQRTFDNGSIPHQIHLGELHAILRRQEDFYPFLKDNREKIEKILTFRIPYYVGPLARGNSRFAWMTRKSEETITPWNFEEVVDKGASAQSFIERMTNFDKNLPNEKVLPKHSLLYEYFTVYNELTKVKYVTEGMRKPAFLSGEQKKAIVDLLFKTNRKVTVKQLKEDYFKKIECFDSVEISGVEDRFNASLGTYHDLLKIIKDKDFLDNEENEDILEDIVLTLTLFEDREMIEERLKTYAHLFDDKVMKQLKRRRYTGWGRLSRKLINGIRDKQSGKTILDFLKSDGFANRNFMQLIHDDSLTFKEDIQKAQVSGQGDSLHEHIANLAGSPAIKKGILQTVKVVDELVKVMGRHKPENIVIEMARENQTTQKGQKNSRERMKRIEEGIKELGSQILKEHPVENTQLQNEKLYLYYLQNGRDMYVDQELDINRLSDYDVDHIVPQSFLKDDSIDNKVLTRSDKARGKSDNVPSEEVVKKMKNYWRQLLNAKLITQRKFDNLTKAERGGLSELDKAGFIKRQLVETRQITKHVAQILDSRMNTKYDENDKLIREVKVITLKSKLVSDFRKDFQFYKVREINNYHHAHDAYLNAVVGTALIKKYPKLESEFVYGDYKVYDVRKMIAKSEQEIGKATAKYFFYSNIMNFFKTEITLANGEIRKRPLIETNGETGEIVWDKGRDFATVRKVLSMPQVNIVKKTEVQTGGFSKESILPKRNSDKLIARKKDWDPKKYGGFDSPTVAYSVLVVAKVEKGKSKKLKSVKELLGITIMERSSFEKNPIDFLEAKGYKEVKKDLIIKLPKYSLFELENGRKRMLASAGELQKGNELALPSKYVNFLYLASHYEKLKGSPEDNEQKQLFVEQHKHYLDEIIEQISEFSKRVILADANLDKVLSAYNKHRDKPIREQAENIIHLFTLTNLGAPAAFKYFDTTIDRKRYTSTKEVLDATLIHQSITGLYETRIDLSQLGGDGGEAAAKEAAAKEAAAKEAAAKEAAAKEAAAKGGVLNLEEEYRLHEKPVPSSIDPSWLQLFPTVWAERAGMGLANQVPPVVVELRSGASPVAVRQYPMSKEAREGIRPHIQRFLDLGVLVPCQSPWNTPLLPVKKPGTNDYRPVQDLREINKRVQDIHPTVPNPYNLLSSLPPSHTWYSVLDLKDAFFCLKLHPNSQPLFAFEWRDPEKGNTGQLTWTRLPQGFKNSPTLFNEALHRDLAPFRALNPQVVLLQYVDDLLVAAPTYRDCKEGTQKLLQELSKLGYRVSAKKAQLCQKEVTYLGYLLKEGKRWLTPARKATVMKIPPPTTPRQVREFLGKAGFCRLFIPGFASLAAPLYPLTKPSIPFIWTEEHQKAFDRIKEALLSAPALALPDLTKPFTLYVDERAGVARGVLTQTLGPWRRPVAYLSKKLDPVASGWPTCLKAVAAVALLLKDADKLTLGQNVTVIASHSLESIVRQPPDRWMTNARMTHYQSLLLNERVSFAPPAVLNPATLLPVESEATPVHRCSEILAEETGTRRDLKDQPLPGVPAWYTDGSSFIAEGKRRAGAAIVDGKRTVWASSLPEGTSAQKAELVALTQALRLAEGKDINIYTDSRYAFATAHIHGAIYKQRGWLTSAGKDIKNKEEILALLEAIHLPKRVAIIHCPGHQKGNDPVATGNRRADEAAKQAALSTRVLAETTKPAGKRTADGSEFEKRTADGSEFESPKKKAKVE

SEQ ID NO: 894 - protein, 2088 aa, synthetic construct
MPAAKRVKLDGGDKKYSIGLDIGTNSVGWAVITDEYKVPSKKFKVLGNTDRHSIKKNLIGALLFDSGETAEATRLKRTARRRYTRRKNRICYLQEIFSNEMAKVDDSFFHRLEESFLVEEDKKHERHPIFGNIVDEVAYHEKYPTIYHLRKKLVDSTDKADLRLIYLALAHMIKFRGHFLIEGDLNPDNSDVDKLFIQLVQTYNQLFEENPINASGVDAKAILSARLSKSRRLENLIAQLPGEKKNGLFGNLIALSLGLTPNFKSNFDLAEDAKLQLSKDTYDDDLDNLLAQIGDQYADLFLAAKNLSDAILLSDILRVNTEITKAPLSASMIKRYDEHHQDLTLLKALVRQQLPEKYKEIFFDQSKNGYAGYIDGGASQEEFYKFIKPILEKMDGTEELLVKLNREDLLRKQRTFDNGSIPHQIHLGELHAILRRQEDFYPFLKDNREKIEKILTFRIPYYVGPLARGNSRFAWMTRKSEETITPWNFEEVVDKGASAQSFIERMTNFDKNLPNEKVLPKHSLLYEYFTVYNELTKVKYVTEGMRKPAFLSGEQKKAIVDLLFKTNRKVTVKQLKEDYFKKIECFDSVEISGVEDRFNASLGTYHDLLKIIKDKDFLDNEENEDILEDIVLTLTLFEDREMIEERLKTYAHLFDDKVMKQLKRRRYTGWGRLSRKLINGIRDKQSGKTILDFLKSDGFANRNFMQLIHDDSLTFKEDIQKAQVSGQGDSLHEHIANLAGSPAIKKGILQTVKVVDELVKVMGRHKPENIVIEMARENQTTQKGQKNSRERMKRIEEGIKELGSQILKEHPVENTQLQNEKLYLYYLQNGRDMYVDQELDINRLSDYDVDHIVPQSFLKDDSIDNKVLTRSDKARGKSDNVPSEEVVKKMKNYWRQLLNAKLITQRKFDNLTKAERGGLSELDKAGFIKRQLVETRQITKHVAQILDSRMNTKYDENDKLIREVKVITLKSKLVSDFRKDFQFYKVREINNYHHAHDAYLNAVVGTALIKKYPKLESEFVYGDYKVYDVRKMIAKSEQEIGKATAKYFFYSNIMNFFKTEITLANGEIRKRPLIETNGETGEIVWDKGRDFATVRKVLSMPQVNIVKKTEVQTGGFSKESILPKRNSDKLIARKKDWDPKKYGGFDSPTVAYSVLVVAKVEKGKSKKLKSVKELLGITIMERSSFEKNPIDFLEAKGYKEVKKDLIIKLPKYSLFELENGRKRMLASAGELQKGNELALPSKYVNFLYLASHYEKLKGSPEDNEQKQLFVEQHKHYLDEIIEQISEFSKRVILADANLDKVLSAYNKHRDKPIREQAENIIHLFTLTNLGAPAAFKYFDTTIDRKRYTSTKEVLDATLIHQSITGLYETRIDLSQLGGDGGEAAAKGGVLNLEEEYRLHEKPVPSSIDPSWLQLFPTVWAERAGMGLANQVPPVVVELRSGASPVAVRQYPMSKEAREGIRPHIQRFLDLGVLVPCQSPWNTPLLPVKKPGTNDYRPVQDLREINKRVQDIHPTVPNPYNLLSSLPPSHTWYSVLDLKDAFFCLKLHPNSQPLFAFEWRDPEKGNTGQLTWTRLPQGFKNSPTLFNEALHRDLAPFRALNPQVVLLQYVDDLLVAAPTYRDCKEGTQKLLQELSKLGYRVSAKKAQLCQKEVTYLGYLLKEGKRWLTPARKATVMKIPPPTTPRQVREFLGKAGFCRLFIPGFASLAAPLYPLTKPSIPFIWTEEHQKAFDRIKEALLSAPALALPDLTKPFTLYVDERAGVARGVLTQTLGPWRRPVAYLSKKLDPVASGWPTCLKAVAAVALLLKDADKLTLGQNVTVIASHSLESIVRQPPDRWMTNARMTHYQSLLLNERVSFAPPAVLNPATLLPVESEATPVHRCSEILAEETGTRRDLKDQPLPGVPAWYTDGSSFIAEGKRRAGAAIVDGKRTVWASSLPEGTSAQKAELVALTQALRLAEGKDINIYTDSRYAFATAHIHGAIYKQRGWLTSAGKDIKNKEEILALLEAIHLPKRVAIIHCPGHQKGNDPVATGNRRADEAAKQAALSTRVLAETTKPAGKRTADGSEFEKRTADGSEFESPKKKAKVE

SEQ ID NO: 895 - protein, 2088 aa, synthetic construct
MPAAKRVKLDGGDKKYSIGLDIGTNSVGWAVITDEYKVPSKKFKVLGNTDRHSIKKNLIGALLFDSGETAEATRLKRTARRRYTRRKNRICYLQEIFSNEMAKVDDSFFHRLEESFLVEEDKKHERHPIFGNIVDEVAYHEKYPTIYHLRKKLVDSTDKADLRLIYLALAHMIKFRGHFLIEGDLNPDNSDVDKLFIQLVQTYNQLFEENPINASGVDAKAILSARLSKSRRLENLIAQLPGEKKNGLFGNLIALSLGLTPNFKSNFDLAEDAKLQLSKDTYDDDLDNLLAQIGDQYADLFLAAKNLSDAILLSDILRVNTEITKAPLSASMIKRYDEHHQDLTLLKALVRQQLPEKYKEIFFDQSKNGYAGYIDGGASQEEFYKFIKPILEKMDGTEELLVKLNREDLLRKQRTFDNGSIPHQIHLGELHAILRRQEDFYPFLKDNREKIEKILTFRIPYYVGPLARGNSRFAWMTRKSEETITPWNFEEVVDKGASAQSFIERMTNFDKNLPNEKVLPKHSLLYEYFTVYNELTKVKYVTEGMRKPAFLSGEQKKAIVDLLFKTNRKVTVKQLKEDYFKKIECFDSVEISGVEDRFNASLGTYHDLLKIIKDKDFLDNEENEDILEDIVLTLTLFEDREMIEERLKTYAHLFDDKVMKQLKRRRYTGWGRLSRKLINGIRDKQSGKTILDFLKSDGFANRNFMQLIHDDSLTFKEDIQKAQVSGQGDSLHEHIANLAGSPAIKKGILQTVKVVDELVKVMGRHKPENIVIEMARENQTTQKGQKNSRERMKRIEEGIKELGSQILKEHPVENTQLQNEKLYLYYLQNGRDMYVDQELDINRLSDYDVDHIVPQSFLKDDSIDNKVLTRSDKARGKSDNVPSEEVVKKMKNYWRQLLNAKLITQRKFDNLTKAERGGLSELDKAGFIKRQLVETRQITKHVAQILDSRMNTKYDENDKLIREVKVITLKSKLVSDFRKDFQFYKVREINNYHHAHDAYLNAVVGTALIKKYPKLESEFVYGDYKVYDVRKMIAKSEQEIGKATAKYFFYSNIMNFFKTEITLANGEIRKRPLIETNGETGEIVWDKGRDFATVRKVLSMPQVNIVKKTEVQTGGFSKESILPKRNSDKLIARKKDWDPKKYGGFDSPTVAYSVLVVAKVEKGKSKKLKSVKELLGITIMERSSFEKNPIDFLEAKGYKEVKKDLIIKLPKYSLFELENGRKRMLASAGELQKGNELALPSKYVNFLYLASHYEKLKGSPEDNEQKQLFVEQHKHYLDEIIEQISEFSKRVILADANLDKVLSAYNKHRDKPIREQAENIIHLFTLTNLGAPAAFKYFDTTIDRKRYTSTKEVLDATLIHQSITGLYETRIDLSQLGGDGGGGGGGGGVLNLEEEYRLHEKPVPSSIDPSWLQLFPTVWAERAGMGLANQVPPVVVELRSGASPVAVRQYPMSKEAREGIRPHIQRFLDLGVLVPCQSPWNTPLLPVKKPGTNDYRPVQDLREINKRVQDIHPTVPNPYNLLSSLPPSHTWYSVLDLKDAFFCLKLHPNSQPLFAFEWRDPEKGNTGQLTWTRLPQGFKNSPTLFNEALHRDLAPFRALNPQVVLLQYVDDLLVAAPTYRDCKEGTQKLLQELSKLGYRVSAKKAQLCQKEVTYLGYLLKEGKRWLTPARKATVMKIPPPTTPRQVREFLGKAGFCRLFIPGFASLAAPLYPLTKPSIPFIWTEEHQKAFDRIKEALLSAPALALPDLTKPFTLYVDERAGVARGVLTQTLGPWRRPVAYLSKKLDPVASGWPTCLKAVAAVALLLKDADKLTLGQNVTVIASHSLESIVRQPPDRWMTNARMTHYQSLLLNERVSFAPPAVLNPATLLPVESEATPVHRCSEILAEETGTRRDLKDQPLPGVPAWYTDGSSFIAEGKRRAGAAIVDGKRTVWASSLPEGTSAQKAELVALTQALRLAEGKDINIYTDSRYAFATAHIHGAIYKQRGWLTSAGKDIKNKEEILALLEAIHLPKRVAIIHCPGHQKGNDPVATGNRRADEAAKQAALSTRVLAETTKPAGKRTADGSEFEKRTADGSEFESPKKKAKVE

SEQ ID NO: 896 - protein, 2094 aa, synthetic construct
MPAAKRVKLDGGDKKYSIGLDIGTNSVGWAVITDEYKVPSKKFKVLGNTDRHSIKKNLIGALLFDSGETAEATRLKRTARRRYTRRKNRICYLQEIFSNEMAKVDDSFFHRLEESFLVEEDKKHERHPIFGNIVDEVAYHEKYPTIYHLRKKLVDSTDKADLRLIYLALAHMIKFRGHFLIEGDLNPDNSDVDKLFIQLVQTYNQLFEENPINASGVDAKAILSARLSKSRRLENLIAQLPGEKKNGLFGNLIALSLGLTPNFKSNFDLAEDAKLQLSKDTYDDDLDNLLAQIGDQYADLFLAAKNLSDAILLSDILRVNTEITKAPLSASMIKRYDEHHQDLTLLKALVRQQLPEKYKEIFFDQSKNGYAGYIDGGASQEEFYKFIKPILEKMDGTEELLVKLNREDLLRKQRTFDNGSIPHQIHLGELHAILRRQEDFYPFLKDNREKIEKILTFRIPYYVGPLARGNSRFAWMTRKSEETITPWNFEEVVDKGASAQSFIERMTNFDKNLPNEKVLPKHSLLYEYFTVYNELTKVKYVTEGMRKPAFLSGEQKKAIVDLLFKTNRKVTVKQLKEDYFKKIECFDSVEISGVEDRFNASLGTYHDLLKIIKDKDFLDNEENEDILEDIVLTLTLFEDREMIEERLKTYAHLFDDKVMKQLKRRRYTGWGRLSRKLINGIRDKQSGKTILDFLKSDGFANRNFMQLIHDDSLTFKEDIQKAQVSGQGDSLHEHIANLAGSPAIKKGILQTVKVVDELVKVMGRHKPENIVIEMARENQTTQKGQKNSRERMKRIEEGIKELGSQILKEHPVENTQLQNEKLYLYYLQNGRDMYVDQELDINRLSDYDVDHIVPQSFLKDDSIDNKVLTRSDKARGKSDNVPSEEVVKKMKNYWRQLLNAKLITQRKFDNLTKAERGGLSELDKAGFIKRQLVETRQITKHVAQILDSRMNTKYDENDKLIREVKVITLKSKLVSDFRKDFQFYKVREINNYHHAHDAYLNAVVGTALIKKYPKLESEFVYGDYKVYDVRKMIAKSEQEIGKATAKYFFYSNIMNFFKTEITLANGEIRKRPLIETNGETGEIVWDKGRDFATVRKVLSMPQVNIVKKTEVQTGGFSKESILPKRNSDKLIARKKDWDPKKYGGFDSPTVAYSVLVVAKVEKGKSKKLKSVKELLGITIMERSSFEKNPIDFLEAKGYKEVKKDLIIKLPKYSLFELENGRKRMLASAGELQKGNELALPSKYVNFLYLASHYEKLKGSPEDNEQKQLFVEQHKHYLDEIIEQISEFSKRVILADANLDKVLSAYNKHRDKPIREQAENIIHLFTLTNLGAPAAFKYFDTTIDRKRYTSTKEVLDATLIHQSITGLYETRIDLSQLGGDGGPAPEAAAKGGGGGVLNLEEEYRLHEKPVPSSIDPSWLQLFPTVWAERAGMGLANQVPPVVVELRSGASPVAVRQYPMSKEAREGIRPHIQRFLDLGVLVPCQSPWNTPLLPVKKPGTNDYRPVQDLREINKRVQDIHPTVPNPYNLLSSLPPSHTWYSVLDLKDAFFCLKLHPNSQPLFAFEWRDPEKGNTGQLTWTRLPQGFKNSPTLFNEALHRDLAPFRALNPQVVLLQYVDDLLVAAPTYRDCKEGTQKLLQELSKLGYRVSAKKAQLCQKEVTYLGYLLKEGKRWLTPARKATVMKIPPPTTPRQVREFLGKAGFCRLFIPGFASLAAPLYPLTKPSIPFIWTEEHQKAFDRIKEALLSAPALALPDLTKPFTLYVDERAGVARGVLTQTLGPWRRPVAYLSKKLDPVASGWPTCLKAVAAVALLLKDADKLTLGQNVTVIASHSLESIVRQPPDRWMTNARMTHYQSLLLNERVSFAPPAVLNPATLLPVESEATPVHRCSEILAEETGTRRDLKDQPLPGVPAWYTDGSSFIAEGKRRAGAAIVDGKRTVWASSLPEGTSAQKAELVALTQALRLAEGKDINIYTDSRYAFATAHIHGAIYKQRGWLTSAGKDIKNKEEILALLEAIHLPKRVAIIHCPGHQKGNDPVATGNRRADEAAKQAALSTRVLAETTKPAGKRTADGSEFEKRTADGSEFESPKKKAKVE

SEQ ID NO: 897 - protein, 2091 aa, synthetic construct
MPAAKRVKLDGGDKKYSIGLDIGTNSVGWAVITDEYKVPSKKFKVLGNTDRHSIKKNLIGALLFDSGETAEATRLKRTARRRYTRRKNRICYLQEIFSNEMAKVDDSFFHRLEESFLVEEDKKHERHPIFGNIVDEVAYHEKYPTIYHLRKKLVDSTDKADLRLIYLALAHMIKFRGHFLIEGDLNPDNSDVDKLFIQLVQTYNQLFEENPINASGVDAKAILSARLSKSRRLENLIAQLPGEKKNGLFGNLIALSLGLTPNFKSNFDLAEDAKLQLSKDTYDDDLDNLLAQIGDQYADLFLAAKNLSDAILLSDILRVNTEITKAPLSASMIKRYDEHHQDLTLLKALVRQQLPEKYKEIFFDQSKNGYAGYIDGGASQEEFYKFIKPILEKMDGTEELLVKLNREDLLRKQRTFDNGSIPHQIHLGELHAILRRQEDFYPFLKDNREKIEKILTFRIPYYVGPLARGNSRFAWMTRKSEETITPWNFEEVVDKGASAQSFIERMTNFDKNLPNEKVLPKHSLLYEYFTVYNELTKVKYVTEGMRKPAFLSGEQKKAIVDLLFKTNRKVTVKQLKEDYFKKIECFDSVEISGVEDRFNASLGTYHDLLKIIKDKDFLDNEENEDILEDIVLTLTLFEDREMIEERLKTYAHLFDDKVMKQLKRRRYTGWGRLSRKLINGIRDKQSGKTILDFLKSDGFANRNFMQLIHDDSLTFKEDIQKAQVSGQGDSLHEHIANLAGSPAIKKGILQTVKVVDELVKVMGRHKPENIVIEMARENQTTQKGQKNSRERMKRIEEGIKELGSQILKEHPVENTQLQNEKLYLYYLQNGRDMYVDQELDINRLSDYDVDHIVPQSFLKDDSIDNKVLTRSDKARGKSDNVPSEEVVKKMKNYWRQLLNAKLITQRKFDNLTKAERGGLSELDKAGFIKRQLVETRQITKHVAQILDSRMNTKYDENDKLIREVKVITLKSKLVSDFRKDFQFYKVREINNYHHAHDAYLNAVVGTALIKKYPKLESEFVYGDYKVYDVRKMIAKSEQEIGKATAKYFFYSNIMNFFKTEITLANGEIRKRPLIETNGETGEIVWDKGRDFATVRKVLSMPQVNIVKKTEVQTGGFSKESILPKRNSDKLIARKKDWDPKKYGGFDSPTVAYSVLVVAKVEKGKSKKLKSVKELLGITIMERSSFEKNPIDFLEAKGYKEVKKDLIIKLPKYSLFELENGRKRMLASAGELQKGNELALPSKYVNFLYLASHYEKLKGSPEDNEQKQLFVEQHKHYLDEIIEQISEFSKRVILADANLDKVLSAYNKHRDKPIREQAENIIHLFTLTNLGAPAAFKYFDTTIDRKRYTSTKEVLDATLIHQSITGLYETRIDLSQLGGDGGEAAAKGGSGGVLNLEEEYRLHEKPVPSSIDPSWLQLFPTVWAERAGMGLANQVPPVVVELRSGASPVAVRQYPMSKEAREGIRPHIQRFLDLGVLVPCQSPWNTPLLPVKKPGTNDYRPVQDLREINKRVQDIHPTVPNPYNLLSSLPPSHTWYSVLDLKDAFFCLKLHPNSQPLFAFEWRDPEKGNTGQLTWTRLPQGFKNSPTLFNEALHRDLAPFRALNPQVVLLQYVDDLLVAAPTYRDCKEGTQKLLQELSKLGYRVSAKKAQLCQKEVTYLGYLLKEGKRWLTPARKATVMKIPPPTTPRQVREFLGKAGFCRLFIPGFASLAAPLYPLTKPSIPFIWTEEHQKAFDRIKEALLSAPALALPDLTKPFTLYVDERAGVARGVLTQTLGPWRRPVAYLSKKLDPVASGWPTCLKAVAAVALLLKDADKLTLGQNVTVIASHSLESIVRQPPDRWMTNARMTHYQSLLLNERVSFAPPAVLNPATLLPVESEATPVHRCSEILAEETGTRRDLKDQPLPGVPAWYTDGSSFIAEGKRRAGAAIVDGKRTVWASSLPEGTSAQKAELVALTQALRLAEGKDINIYTDSRYAFATAHIHGAIYKQRGWLTSAGKDIKNKEEILALLEAIHLPKRVAIIHCPGHQKGNDPVATGNRRADEAAKQAALSTRVLAETTKPAGKRTADGSEFEKRTADGSEFESPKKKAKVE

SEQ ID NO: 898 - protein, 2094 aa, synthetic construct
MPAAKRVKLDGGDKKYSIGLDIGTNSVGWAVITDEYKVPSKKFKVLGNTDRHSIKKNLIGALLFDSGETAEATRLKRTARRRYTRRKNRICYLQEIFSNEMAKVDDSFFHRLEESFLVEEDKKHERHPIFGNIVDEVAYHEKYPTIYHLRKKLVDSTDKADLRLIYLALAHMIKFRGHFLIEGDLNPDNSDVDKLFIQLVQTYNQLFEENPINASGVDAKAILSARLSKSRRLENLIAQLPGEKKNGLFGNLIALSLGLTPNFKSNFDLAEDAKLQLSKDTYDDDLDNLLAQIGDQYADLFLAAKNLSDAILLSDILRVNTEITKAPLSASMIKRYDEHHQDLTLLKALVRQQLPEKYKEIFFDQSKNGYAGYIDGGASQEEFYKFIKPILEKMDGTEELLVKLNREDLLRKQRTFDNGSIPHQIHLGELHAILRRQEDFYPFLKDNREKIEKILTFRIPYYVGPLARGNSRFAWMTRKSEETITPWNFEEVVDKGASAQSFIERMTNFDKNLPNEKVLPKHSLLYEYFTVYNELTKVKYVTEGMRKPAFLSGEQKKAIVDLLFKTNRKVTVKQLKEDYFKKIECFDSVEISGVEDRFNASLGTYHDLLKIIKDKDFLDNEENEDILEDIVLTLTLFEDREMIEERLKTYAHLFDDKVMKQLKRRRYTGWGRLSRKLINGIRDKQSGKTILDFLKSDGFANRNFMQLIHDDSLTFKEDIQKAQVSGQGDSLHEHIANLAGSPAIKKGILQTVKVVDELVKVMGRHKPENIVIEMARENQTTQKGQKNSRERMKRIEEGIKELGSQILKEHPVENTQLQNEKLYLYYLQNGRDMYVDQELDINRLSDYDVDHIVPQSFLKDDSIDNKVLTRSDKARGKSDNVPSEEVVKKMKNYWRQLLNAKLITQRKFDNLTKAERGGLSELDKAGFIKRQLVETRQITKHVAQILDSRMNTKYDENDKLIREVKVITLKSKLVSDFRKDFQFYKVREINNYHHAHDAYLNAVVGTALIKKYPKLESEFVYGDYKVYDVRKMIAKSEQEIGKATAKYFFYSNIMNFFKTEITLANGEIRKRPLIETNGETGEIVWDKGRDFATVRKVLSMPQVNIVKKTEVQTGGFSKESILPKRNSDKLIARKKDWDPKKYGGFDSPTVAYSVLVVAKVEKGKSKKLKSVKELLGITIMERSSFEKNPIDFLEAKGYKEVKKDLIIKLPKYSLFELENGRKRMLASAGELQKGNELALPSKYVNFLYLASHYEKLKGSPEDNEQKQLFVEQHKHYLDEIIEQISEFSKRVILADANLDKVLSAYNKHRDKPIREQAENIIHLFTLTNLGAPAAFKYFDTTIDRKRYTSTKEVLDATLIHQSITGLYETRIDLSQLGGDGGGGSPAPEAAAKGGVLNLEEEYRLHEKPVPSSIDPSWLQLFPTVWAERAGMGLANQVPPVVVELRSGASPVAVRQYPMSKEAREGIRPHIQRFLDLGVLVPCQSPWNTPLLPVKKPGTNDYRPVQDLREINKRVQDIHPTVPNPYNLLSSLPPSHTWYSVLDLKDAFFCLKLHPNSQPLFAFEWRDPEKGNTGQLTWTRLPQGFKNSPTLFNEALHRDLAPFRALNPQVVLLQYVDDLLVAAPTYRDCKEGTQKLLQELSKLGYRVSAKKAQLCQKEVTYLGYLLKEGKRWLTPARKATVMKIPPPTTPRQVREFLGKAGFCRLFIPGFASLAAPLYPLTKPSIPFIWTEEHQKAFDRIKEALLSAPALALPDLTKPFTLYVDERAGVARGVLTQTLGPWRRPVAYLSKKLDPVASGWPTCLKAVAAVALLLKDADKLTLGQNVTVIASHSLESIVRQPPDRWMTNARMTHYQSLLLNERVSFAPPAVLNPATLLPVESEATPVHRCSEILAEETGTRRDLKDQPLPGVPAWYTDGSSFIAEGKRRAGAAIVDGKRTVWASSLPEGTSAQKAELVALTQALRLAEGKDINIYTDSRYAFATAHIHGAIYKQRGWLTSAGKDIKNKEEILALLEAIHLPKRVAIIHCPGHQKGNDPVATGNRRADEAAKQAALSTRVLAETTKPAGKRTADGSEFEKRTADGSEFESPKKKAKVE

SEQ ID NO: 899 - protein, 2101 aa, synthetic construct
MPAAKRVKLDGGDKKYSIGLDIGTNSVGWAVITDEYKVPSKKFKVLGNTDRHSIKKNLIGALLFDSGETAEATRLKRTARRRYTRRKNRICYLQEIFSNEMAKVDDSFFHRLEESFLVEEDKKHERHPIFGNIVDEVAYHEKYPTIYHLRKKLVDSTDKADLRLIYLALAHMIKFRGHFLIEGDLNPDNSDVDKLFIQLVQTYNQLFEENPINASGVDAKAILSARLSKSRRLENLIAQLPGEKKNGLFGNLIALSLGLTPNFKSNFDLAEDAKLQLSKDTYDDDLDNLLAQIGDQYADLFLAAKNLSDAILLSDILRVNTEITKAPLSASMIKRYDEHHQDLTLLKALVRQQLPEKYKEIFFDQSKNGYAGYIDGGASQEEFYKFIKPILEKMDGTEELLVKLNREDLLRKQRTFDNGSIPHQIHLGELHAILRRQEDFYPFLKDNREKIEKILTFRIPYYVGPLARGNSRFAWMTRKSEETITPWNFEEVVDKGASAQSFIERMTNFDKNLPNEKVLPKHSLLYEYFTVYNELTKVKYVTEGMRKPAFLSGEQKKAIVDLLFKTNRKVTVKQLKEDYFKKIECFDSVEISGVEDRFNASLGTYHDLLKIIKDKDFLDNEENEDILEDIVLTLTLFEDREMIEERLKTYAHLFDDKVMKQLKRRRYTGWGRLSRKLINGIRDKQSGKTILDFLKSDGFANRNFMQLIHDDSLTFKEDIQKAQVSGQGDSLHEHIANLAGSPAIKKGILQTVKVVDELVKVMGRHKPENIVIEMARENQTTQKGQKNSRERMKRIEEGIKELGSQILKEHPVENTQLQNEKLYLYYLQNGRDMYVDQELDINRLSDYDVDHIVPQSFLKDDSIDNKVLTRSDKARGKSDNVPSEEVVKKMKNYWRQLLNAKLITQRKFDNLTKAERGGLSELDKAGFIKRQLVETRQITKHVAQILDSRMNTKYDENDKLIREVKVITLKSKLVSDFRKDFQFYKVREINNYHHAHDAYLNAVVGTALIKKYPKLESEFVYGDYKVYDVRKMIAKSEQEIGKATAKYFFYSNIMNFFKTEITLANGEIRKRPLIETNGETGEIVWDKGRDFATVRKVLSMPQVNIVKKTEVQTGGFSKESILPKRNSDKLIARKKDWDPKKYGGFDSPTVAYSVLVVAKVEKGKSKKLKSVKELLGITIMERSSFEKNPIDFLEAKGYKEVKKDLIIKLPKYSLFELENGRKRMLASAGELQKGNELALPSKYVNFLYLASHYEKLKGSPEDNEQKQLFVEQHKHYLDEIIEQISEFSKRVILADANLDKVLSAYNKHRDKPIREQAENIIHLFTLTNLGAPAAFKYFDTTIDRKRYTSTKEVLDATLIHQSITGLYETRIDLSQLGGDGGGGSGGSGGSGGSGGSGGSGGVLNLEEEYRLHEKPVPSSIDPSWLQLFPTVWAERAGMGLANQVPPVVVELRSGASPVAVRQYPMSKEAREGIRPHIQRFLDLGVLVPCQSPWNTPLLPVKKPGTNDYRPVQDLREINKRVQDIHPTVPNPYNLLSSLPPSHTWYSVLDLKDAFFCLKLHPNSQPLFAFEWRDPEKGNTGQLTWTRLPQGFKNSPTLFNEALHRDLAPFRALNPQVVLLQYVDDLLVAAPTYRDCKEGTQKLLQELSKLGYRVSAKKAQLCQKEVTYLGYLLKEGKRWLTPARKATVMKIPPPTTPRQVREFLGKAGFCRLFIPGFASLAAPLYPLTKPSIPFIWTEEHQKAFDRIKEALLSAPALALPDLTKPFTLYVDERAGVARGVLTQTLGPWRRPVAYLSKKLDPVASGWPTCLKAVAAVALLLKDADKLTLGQNVTVIASHSLESIVRQPPDRWMTNARMTHYQSLLLNERVSFAPPAVLNPATLLPVESEATPVHRCSEILAEETGTRRDLKDQPLPGVPAWYTDGSSFIAEGKRRAGAAIVDGKRTVWASSLPEGTSAQKAELVALTQALRLAEGKDINIYTDSRYAFATAHIHGAIYKQRGWLTSAGKDIKNKEEILALLEAIHLPKRVAIIHCPGHQKGNDPVATGNRRADEAAKQAALSTRVLAETTKPAGKRTADGSEFEKRTADGSEFESPKKKAKVE

SEQ ID NO: 900 - protein, 2098 aa, synthetic construct
MPAAKRVKLDGGDKKYSIGLDIGTNSVGWAVITDEYKVPSKKFKVLGNTDRHSIKKNLIGALLFDSGETAEATRLKRTARRRYTRRKNRICYLQEIFSNEMAKVDDSFFHRLEESFLVEEDKKHERHPIFGNIVDEVAYHEKYPTIYHLRKKLVDSTDKADLRLIYLALAHMIKFRGHFLIEGDLNPDNSDVDKLFIQLVQTYNQLFEENPINASGVDAKAILSARLSKSRRLENLIAQLPGEKKNGLFGNLIALSLGLTPNFKSNFDLAEDAKLQLSKDTYDDDLDNLLAQIGDQYADLFLAAKNLSDAILLSDILRVNTEITKAPLSASMIKRYDEHHQDLTLLKALVRQQLPEKYKEIFFDQSKNGYAGYIDGGASQEEFYKFIKPILEKMDGTEELLVKLNREDLLRKQRTFDNGSIPHQIHLGELHAILRRQEDFYPFLKDNREKIEKILTFRIPYYVGPLARGNSRFAWMTRKSEETITPWNFEEVVDKGASAQSFIERMTNFDKNLPNEKVLPKHSLLYEYFTVYNELTKVKYVTEGMRKPAFLSGEQKKAIVDLLFKTNRKVTVKQLKEDYFKKIECFDSVEISGVEDRFNASLGTYHDLLKIIKDKDFLDNEENEDILEDIVLTLTLFEDREMIEERLKTYAHLFDDKVMKQLKRRRYTGWGRLSRKLINGIRDKQSGKTILDFLKSDGFANRNFMQLIHDDSLTFKEDIQKAQVSGQGDSLHEHIANLAGSPAIKKGILQTVKVVDELVKVMGRHKPENIVIEMARENQTTQKGQKNSRERMKRIEEGIKELGSQILKEHPVENTQLQNEKLYLYYLQNGRDMYVDQELDINRLSDYDVDHIVPQSFLKDDSIDNKVLTRSDKARGKSDNVPSEEVVKKMKNYWRQLLNAKLITQRKFDNLTKAERGGLSELDKAGFIKRQLVETRQITKHVAQILDSRMNTKYDENDKLIREVKVITLKSKLVSDFRKDFQFYKVREINNYHHAHDAYLNAVVGTALIKKYPKLESEFVYGDYKVYDVRKMIAKSEQEIGKATAKYFFYSNIMNFFKTEITLANGEIRKRPLIETNGETGEIVWDKGRDFATVRKVLSMPQVNIVKKTEVQTGGFSKESILPKRNSDKLIARKKDWDPKKYGGFDSPTVAYSVLVVAKVEKGKSKKLKSVKELLGITIMERSSFEKNPIDFLEAKGYKEVKKDLIIKLPKYSLFELENGRKRMLASAGELQKGNELALPSKYVNFLYLASHYEKLKGSPEDNEQKQLFVEQHKHYLDEIIEQISEFSKRVILADANLDKVLSAYNKHRDKPIREQAENIIHLFTLTNLGAPAAFKYFDTTIDRKRYTSTKEVLDATLIHQSITGLYETRIDLSQLGGDGGEAAAKGGGGSEAAAKGGVLNLEEEYRLHEKPVPSSIDPSWLQLFPTVWAERAGMGLANQVPPVVVELRSGASPVAVRQYPMSKEAREGIRPHIQRFLDLGVLVPCQSPWNTPLLPVKKPGTNDYRPVQDLREINKRVQDIHPTVPNPYNLLSSLPPSHTWYSVLDLKDAFFCLKLHPNSQPLFAFEWRDPEKGNTGQLTWTRLPQGFKNSPTLFNEALHRDLAPFRALNPQVVLLQYVDDLLVAAPTYRDCKEGTQKLLQELSKLGYRVSAKKAQLCQKEVTYLGYLLKEGKRWLTPARKATVMKIPPPTTPRQVREFLGKAGFCRLFIPGFASLAAPLYPLTKPSIPFIWTEEHQKAFDRIKEALLSAPALALPDLTKPFTLYVDERAGVARGVLTQTLGPWRRPVAYLSKKLDPVASGWPTCLKAVAAVALLLKDADKLTLGQNVTVIASHSLESIVRQPPDRWMTNARMTHYQSLLLNERVSFAPPAVLNPATLLPVESEATPVHRCSEILAEETGTRRDLKDQPLPGVPAWYTDGSSFIAEGKRRAGAAIVDGKRTVWASSLPEGTSAQKAELVALTQALRLAEGKDINIYTDSRYAFATAHIHGAIYKQRGWLTSAGKDIKNKEEILALLEAIHLPKRVAIIHCPGHQKGNDPVATGNRRADEAAKQAALSTRVLAETTKPAGKRTADGSEFEKRTADGSEFESPKKKAKVE

SEQ ID NO: 901 - protein, 2094 aa, synthetic construct
MPAAKRVKLDGGDKKYSIGLDIGTNSVGWAVITDEYKVPSKKFKVLGNTDRHSIKKNLIGALLFDSGETAEATRLKRTARRRYTRRKNRICYLQEIFSNEMAKVDDSFFHRLEESFLVEEDKKHERHPIFGNIVDEVAYHEKYPTIYHLRKKLVDSTDKADLRLIYLALAHMIKFRGHFLIEGDLNPDNSDVDKLFIQLVQTYNQLFEENPINASGVDAKAILSARLSKSRRLENLIAQLPGEKKNGLFGNLIALSLGLTPNFKSNFDLAEDAKLQLSKDTYDDDLDNLLAQIGDQYADLFLAAKNLSDAILLSDILRVNTEITKAPLSASMIKRYDEHHQDLTLLKALVRQQLPEKYKEIFFDQSKNGYAGYIDGGASQEEFYKFIKPILEKMDGTEELLVKLNREDLLRKQRTFDNGSIPHQIHLGELHAILRRQEDFYPFLKDNREKIEKILTFRIPYYVGPLARGNSRFAWMTRKSEETITPWNFEEVVDKGASAQSFIERMTNFDKNLPNEKVLPKHSLLYEYFTVYNELTKVKYVTEGMRKPAFLSGEQKKAIVDLLFKTNRKVTVKQLKEDYFKKIECFDSVEISGVEDRFNASLGTYHDLLKIIKDKDFLDNEENEDILEDIVLTLTLFEDREMIEERLKTYAHLFDDKVMKQLKRRRYTGWGRLSRKLINGIRDKQSGKTILDFLKSDGFANRNFMQLIHDDSLTFKEDIQKAQVSGQGDSLHEHIANLAGSPAIKKGILQTVKVVDELVKVMGRHKPENIVIEMARENQTTQKGQKNSRERMKRIEEGIKELGSQILKEHPVENTQLQNEKLYLYYLQNGRDMYVDQELDINRLSDYDVDHIVPQSFLKDDSIDNKVLTRSDKARGKSDNVPSEEVVKKMKNYWRQLLNAKLITQRKFDNLTKAERGGLSELDKAGFIKRQLVETRQITKHVAQILDSRMNTKYDENDKLIREVKVITLKSKLVSDFRKDFQFYKVREINNYHHAHDAYLNAVVGTALIKKYPKLESEFVYGDYKVYDVRKMIAKSEQEIGKATAKYFFYSNIMNFFKTEITLANGEIRKRPLIETNGETGEIVWDKGRDFATVRKVLSMPQVNIVKKTEVQTGGFSKESILPKRNSDKLIARKKDWDPKKYGGFDSPTVAYSVLVVAKVEKGKSKKLKSVKELLGITIMERSSFEKNPIDFLEAKGYKEVKKDLIIKLPKYSLFELENGRKRMLASAGELQKGNELALPSKYVNFLYLASHYEKLKGSPEDNEQKQLFVEQHKHYLDEIIEQISEFSKRVILADANLDKVLSAYNKHRDKPIREQAENIIHLFTLTNLGAPAAFKYFDTTIDRKRYTSTKEVLDATLIHQSITGLYETRIDLSQLGGDGGGGGEAAAKGGSGGVLNLEEEYRLHEKPVPSSIDPSWLQLFPTVWAERAGMGLANQVPPVVVELRSGASPVAVRQYPMSKEAREGIRPHIQRFLDLGVLVPCQSPWNTPLLPVKKPGTNDYRPVQDLREINKRVQDIHPTVPNPYNLLSSLPPSHTWYSVLDLKDAFFCLKLHPNSQPLFAFEWRDPEKGNTGQLTWTRLPQGFKNSPTLFNEALHRDLAPFRALNPQVVLLQYVDDLLVAAPTYRDCKEGTQKLLQELSKLGYRVSAKKAQLCQKEVTYLGYLLKEGKRWLTPARKATVMKIPPPTTPRQVREFLGKAGFCRLFIPGFASLAAPLYPLTKPSIPFIWTEEHQKAFDRIKEALLSAPALALPDLTKPFTLYVDERAGVARGVLTQTLGPWRRPVAYLSKKLDPVASGWPTCLKAVAAVALLLKDADKLTLGQNVTVIASHSLESIVRQPPDRWMTNARMTHYQSLLLNERVSFAPPAVLNPATLLPVESEATPVHRCSEILAEETGTRRDLKDQPLPGVPAWYTDGSSFIAEGKRRAGAAIVDGKRTVWASSLPEGTSAQKAELVALTQALRLAEGKDINIYTDSRYAFATAHIHGAIYKQRGWLTSAGKDIKNKEEILALLEAIHLPKRVAIIHCPGHQKGNDPVATGNRRADEAAKQAALSTRVLAETTKPAGKRTADGSEFEKRTADGSEFESPKKKAKVE

SEQ ID NO: 902 - protein, 2094 aa, synthetic construct
MPAAKRVKLDGGDKKYSIGLDIGTNSVGWAVITDEYKVPSKKFKVLGNTDRHSIKKNLIGALLFDSGETAEATRLKRTARRRYTRRKNRICYLQEIFSNEMAKVDDSFFHRLEESFLVEEDKKHERHPIFGNIVDEVAYHEKYPTIYHLRKKLVDSTDKADLRLIYLALAHMIKFRGHFLIEGDLNPDNSDVDKLFIQLVQTYNQLFEENPINASGVDAKAILSARLSKSRRLENLIAQLPGEKKNGLFGNLIALSLGLTPNFKSNFDLAEDAKLQLSKDTYDDDLDNLLAQIGDQYADLFLAAKNLSDAILLSDILRVNTEITKAPLSASMIKRYDEHHQDLTLLKALVRQQLPEKYKEIFFDQSKNGYAGYIDGGASQEEFYKFIKPILEKMDGTEELLVKLNREDLLRKQRTFDNGSIPHQIHLGELHAILRRQEDFYPFLKDNREKIEKILTFRIPYYVGPLARGNSRFAWMTRKSEETITPWNFEEVVDKGASAQSFIERMTNFDKNLPNEKVLPKHSLLYEYFTVYNELTKVKYVTEGMRKPAFLSGEQKKAIVDLLFKTNRKVTVKQLKEDYFKKIECFDSVEISGVEDRFNASLGTYHDLLKIIKDKDFLDNEENEDILEDIVLTLTLFEDREMIEERLKTYAHLFDDKVMKQLKRRRYTGWGRLSRKLINGIRDKQSGKTILDFLKSDGFANRNFMQLIHDDSLTFKEDIQKAQVSGQGDSLHEHIANLAGSPAIKKGILQTVKVVDELVKVMGRHKPENIVIEMARENQTTQKGQKNSRERMKRIEEGIKELGSQILKEHPVENTQLQNEKLYLYYLQNGRDMYVDQELDINRLSDYDVDHIVPQSFLKDDSIDNKVLTRSDKARGKSDNVPSEEVVKKMKNYWRQLLNAKLITQRKFDNLTKAERGGLSELDKAGFIKRQLVETRQITKHVAQILDSRMNTKYDENDKLIREVKVITLKSKLVSDFRKDFQFYKVREINNYHHAHDAYLNAVVGTALIKKYPKLESEFVYGDYKVYDVRKMIAKSEQEIGKATAKYFFYSNIMNFFKTEITLANGEIRKRPLIETNGETGEIVWDKGRDFATVRKVLSMPQVNIVKKTEVQTGGFSKESILPKRNSDKLIARKKDWDPKKYGGFDSPTVAYSVLVVAKVEKGKSKKLKSVKELLGITIMERSSFEKNPIDFLEAKGYKEVKKDLIIKLPKYSLFELENGRKRMLASAGELQKGNELALPSKYVNFLYLASHYEKLKGSPEDNEQKQLFVEQHKHYLDEIIEQISEFSKRVILADANLDKVLSAYNKHRDKPIREQAENIIHLFTLTNLGAPAAFKYFDTTIDRKRYTSTKEVLDATLIHQSITGLYETRIDLSQLGGDGGGGSEAAAKGGGGGVLNLEEEYRLHEKPVPSSIDPSWLQLFPTVWAERAGMGLANQVPPVVVELRSGASPVAVRQYPMSKEAREGIRPHIQRFLDLGVLVPCQSPWNTPLLPVKKPGTNDYRPVQDLREINKRVQDIHPTVPNPYNLLSSLPPSHTWYSVLDLKDAFFCLKLHPNSQPLFAFEWRDPEKGNTGQLTWTRLPQGFKNSPTLFNEALHRDLAPFRALNPQVVLLQYVDDLLVAAPTYRDCKEGTQKLLQELSKLGYRVSAKKAQLCQKEVTYLGYLLKEGKRWLTPARKATVMKIPPPTTPRQVREFLGKAGFCRLFIPGFASLAAPLYPLTKPSIPFIWTEEHQKAFDRIKEALLSAPALALPDLTKPFTLYVDERAGVARGVLTQTLGPWRRPVAYLSKKLDPVASGWPTCLKAVAAVALLLKDADKLTLGQNVTVIASHSLESIVRQPPDRWMTNARMTHYQSLLLNERVSFAPPAVLNPATLLPVESEATPVHRCSEILAEETGTRRDLKDQPLPGVPAWYTDGSSFIAEGKRRAGAAIVDGKRTVWASSLPEGTSAQKAELVALTQALRLAEGKDINIYTDSRYAFATAHIHGAIYKQRGWLTSAGKDIKNKEEILALLEAIHLPKRVAIIHCPGHQKGNDPVATGNRRADEAAKQAALSTRVLAETTKPAGKRTADGSEFEKRTADGSEFESPKKKAKVE

SEQ ID NO: 903 - protein, 2092 aa, synthetic construct
MPAAKRVKLDGGDKKYSIGLDIGTNSVGWAVITDEYKVPSKKFKVLGNTDRHSIKKNLIGALLFDSGETAEATRLKRTARRRYTRRKNRICYLQEIFSNEMAKVDDSFFHRLEESFLVEEDKKHERHPIFGNIVDEVAYHEKYPTIYHLRKKLVDSTDKADLRLIYLALAHMIKFRGHFLIEGDLNPDNSDVDKLFIQLVQTYNQLFEENPINASGVDAKAILSARLSKSRRLENLIAQLPGEKKNGLFGNLIALSLGLTPNFKSNFDLAEDAKLQLSKDTYDDDLDNLLAQIGDQYADLFLAAKNLSDAILLSDILRVNTEITKAPLSASMIKRYDEHHQDLTLLKALVRQQLPEKYKEIFFDQSKNGYAGYIDGGASQEEFYKFIKPILEKMDGTEELLVKLNREDLLRKQRTFDNGSIPHQIHLGELHAILRRQEDFYPFLKDNREKIEKILTFRIPYYVGPLARGNSRFAWMTRKSEETITPWNFEEVVDKGASAQSFIERMTNFDKNLPNEKVLPKHSLLYEYFTVYNELTKVKYVTEGMRKPAFLSGEQKKAIVDLLFKTNRKVTVKQLKEDYFKKIECFDSVEISGVEDRFNASLGTYHDLLKIIKDKDFLDNEENEDILEDIVLTLTLFEDREMIEERLKTYAHLFDDKVMKQLKRRRYTGWGRLSRKLINGIRDKQSGKTILDFLKSDGFANRNFMQLIHDDSLTFKEDIQKAQVSGQGDSLHEHIANLAGSPAIKKGILQTVKVVDELVKVMGRHKPENIVIEMARENQTTQKGQKNSRERMKRIEEGIKELGSQILKEHPVENTQLQNEKLYLYYLQNGRDMYVDQELDINRLSDYDVDHIVPQSFLKDDSIDNKVLTRSDKARGKSDNVPSEEVVKKMKNYWRQLLNAKLITQRKFDNLTKAERGGLSELDKAGFIKRQLVETRQITKHVAQILDSRMNTKYDENDKLIREVKVITLKSKLVSDFRKDFQFYKVREINNYHHAHDAYLNAVVGTALIKKYPKLESEFVYGDYKVYDVRKMIAKSEQEIGKATAKYFFYSNIMNFFKTEITLANGEIRKRPLIETNGETGEIVWDKGRDFATVRKVLSMPQVNIVKKTEVQTGGFSKESILPKRNSDKLIARKKDWDPKKYGGFDSPTVAYSVLVVAKVEKGKSKKLKSVKELLGITIMERSSFEKNPIDFLEAKGYKEVKKDLIIKLPKYSLFELENGRKRMLASAGELQKGNELALPSKYVNFLYLASHYEKLKGSPEDNEQKQLFVEQHKHYLDEIIEQISEFSKRVILADANLDKVLSAYNKHRDKPIREQAENIIHLFTLTNLGAPAAFKYFDTTIDRKRYTSTKEVLDATLIHQSITGLYETRIDLSQLGGDGGGGSGGGGSSGGVLNLEEEYRLHEKPVPSSIDPSWLQLFPTVWAERAGMGLANQVPPVVVELRSGASPVAVRQYPMSKEAREGIRPHIQRFLDLGVLVPCQSPWNTPLLPVKKPGTNDYRPVQDLREINKRVQDIHPTVPNPYNLLSSLPPSHTWYSVLDLKDAFFCLKLHPNSQPLFAFEWRDPEKGNTGQLTWTRLPQGFKNSPTLFNEALHRDLAPFRALNPQVVLLQYVDDLLVAAPTYRDCKEGTQKLLQELSKLGYRVSAKKAQLCQKEVTYLGYLLKEGKRWLTPARKATVMKIPPPTTPRQVREFLGKAGFCRLFIPGFASLAAPLYPLTKPSIPFIWTEEHQKAFDRIKEALLSAPALALPDLTKPFTLYVDERAGVARGVLTQTLGPWRRPVAYLSKKLDPVASGWPTCLKAVAAVALLLKDADKLTLGQNVTVIASHSLESIVRQPPDRWMTNARMTHYQSLLLNERVSFAPPAVLNPATLLPVESEATPVHRCSEILAEETGTRRDLKDQPLPGVPAWYTDGSSFIAEGKRRAGAAIVDGKRTVWASSLPEGTSAQKAELVALTQALRLAEGKDINIYTDSRYAFATAHIHGAIYKQRGWLTSAGKDIKNKEEILALLEAIHLPKRVAIIHCPGHQKGNDPVATGNRRADEAAKQAALSTRVLAETTKPAGKRTADGSEFEKRTADGSEFESPKKKAKVE

SEQ ID NO: 904 - protein, 2088 aa, synthetic construct
MPAAKRVKLDGGDKKYSIGLDIGTNSVGWAVITDEYKVPSKKFKVLGNTDRHSIKKNLIGALLFDSGETAEATRLKRTARRRYTRRKNRICYLQEIFSNEMAKVDDSFFHRLEESFLVEEDKKHERHPIFGNIVDEVAYHEKYPTIYHLRKKLVDSTDKADLRLIYLALAHMIKFRGHFLIEGDLNPDNSDVDKLFIQLVQTYNQLFEENPINASGVDAKAILSARLSKSRRLENLIAQLPGEKKNGLFGNLIALSLGLTPNFKSNFDLAEDAKLQLSKDTYDDDLDNLLAQIGDQYADLFLAAKNLSDAILLSDILRVNTEITKAPLSASMIKRYDEHHQDLTLLKALVRQQLPEKYKEIFFDQSKNGYAGYIDGGASQEEFYKFIKPILEKMDGTEELLVKLNREDLLRKQRTFDNGSIPHQIHLGELHAILRRQEDFYPFLKDNREKIEKILTFRIPYYVGPLARGNSRFAWMTRKSEETITPWNFEEVVDKGASAQSFIERMTNFDKNLPNEKVLPKHSLLYEYFTVYNELTKVKYVTEGMRKPAFLSGEQKKAIVDLLFKTNRKVTVKQLKEDYFKKIECFDSVEISGVEDRFNASLGTYHDLLKIIKDKDFLDNEENEDILEDIVLTLTLFEDREMIEERLKTYAHLFDDKVMKQLKRRRYTGWGRLSRKLINGIRDKQSGKTILDFLKSDGFANRNFMQLIHDDSLTFKEDIQKAQVSGQGDSLHEHIANLAGSPAIKKGILQTVKVVDELVKVMGRHKPENIVIEMARENQTTQKGQKNSRERMKRIEEGIKELGSQILKEHPVENTQLQNEKLYLYYLQNGRDMYVDQELDINRLSDYDVDHIVPQSFLKDDSIDNKVLTRSDKARGKSDNVPSEEVVKKMKNYWRQLLNAKLITQRKFDNLTKAERGGLSELDKAGFIKRQLVETRQITKHVAQILDSRMNTKYDENDKLIREVKVITLKSKLVSDFRKDFQFYKVREINNYHHAHDAYLNAVVGTALIKKYPKLESEFVYGDYKVYDVRKMIAKSEQEIGKATAKYFFYSNIMNFFKTEITLANGEIRKRPLIETNGETGEIVWDKGRDFATVRKVLSMPQVNIVKKTEVQTGGFSKESILPKRNSDKLIARKKDWDPKKYGGFDSPTVAYSVLVVAKVEKGKSKKLKSVKELLGITIMERSSFEKNPIDFLEAKGYKEVKKDLIIKLPKYSLFELENGRKRMLASAGELQKGNELALPSKYVNFLYLASHYEKLKGSPEDNEQKQLFVEQHKHYLDEIIEQISEFSKRVILADANLDKVLSAYNKHRDKPIREQAENIIHLFTLTNLGAPAAFKYFDTTIDRKRYTSTKEVLDATLIHQSITGLYETRIDLSQLGGDGGPAPAPGGVLNLEEEYRLHEKPVPSSIDPSWLQLFPTVWAERAGMGLANQVPPVVVELRSGASPVAVRQYPMSKEAREGIRPHIQRFLDLGVLVPCQSPWNTPLLPVKKPGTNDYRPVQDLREINKRVQDIHPTVPNPYNLLSSLPPSHTWYSVLDLKDAFFCLKLHPNSQPLFAFEWRDPEKGNTGQLTWTRLPQGFKNSPTLFNEALHRDLAPFRALNPQVVLLQYVDDLLVAAPTYRDCKEGTQKLLQELSKLGYRVSAKKAQLCQKEVTYLGYLLKEGKRWLTPARKATVMKIPPPTTPRQVREFLGKAGFCRLFIPGFASLAAPLYPLTKPSIPFIWTEEHQKAFDRIKEALLSAPALALPDLTKPFTLYVDERAGVARGVLTQTLGPWRRPVAYLSKKLDPVASGWPTCLKAVAAVALLLKDADKLTLGQNVTVIASHSLESIVRQPPDRWMTNARMTHYQSLLLNERVSFAPPAVLNPATLLPVESEATPVHRCSEILAEETGTRRDLKDQPLPGVPAWYTDGSSFIAEGKRRAGAAIVDGKRTVWASSLPEGTSAQKAELVALTQALRLAEGKDINIYTDSRYAFATAHIHGAIYKQRGWLTSAGKDIKNKEEILALLEAIHLPKRVAIIHCPGHQKGNDPVATGNRRADEAAKQAALSTRVLAETTKPAGKRTADGSEFEKRTADGSEFESPKKKAKVE

SEQ ID NO: 905 - protein, 2094 aa, synthetic construct
MPAAKRVKLDGGDKKYSIGLDIGTNSVGWAVITDEYKVPSKKFKVLGNTDRHSIKKNLIGALLFDSGETAEATRLKRTARRRYTRRKNRICYLQEIFSNEMAKVDDSFFHRLEESFLVEEDKKHERHPIFGNIVDEVAYHEKYPTIYHLRKKLVDSTDKADLRLIYLALAHMIKFRGHFLIEGDLNPDNSDVDKLFIQLVQTYNQLFEENPINASGVDAKAILSARLSKSRRLENLIAQLPGEKKNGLFGNLIALSLGLTPNFKSNFDLAEDAKLQLSKDTYDDDLDNLLAQIGDQYADLFLAAKNLSDAILLSDILRVNTEITKAPLSASMIKRYDEHHQDLTLLKALVRQQLPEKYKEIFFDQSKNGYAGYIDGGASQEEFYKFIKPILEKMDGTEELLVKLNREDLLRKQRTFDNGSIPHQIHLGELHAILRRQEDFYPFLKDNREKIEKILTFRIPYYVGPLARGNSRFAWMTRKSEETITPWNFEEVVDKGASAQSFIERMTNFDKNLPNEKVLPKHSLLYEYFTVYNELTKVKYVTEGMRKPAFLSGEQKKAIVDLLFKTNRKVTVKQLKEDYFKKIECFDSVEISGVEDRFNASLGTYHDLLKIIKDKDFLDNEENEDILEDIVLTLTLFEDREMIEERLKTYAHLFDDKVMKQLKRRRYTGWGRLSRKLINGIRDKQSGKTILDFLKSDGFANRNFMQLIHDDSLTFKEDIQKAQVSGQGDSLHEHIANLAGSPAIKKGILQTVKVVDELVKVMGRHKPENIVIEMARENQTTQKGQKNSRERMKRIEEGIKELGSQILKEHPVENTQLQNEKLYLYYLQNGRDMYVDQELDINRLSDYDVDHIVPQSFLKDDSIDNKVLTRSDKARGKSDNVPSEEVVKKMKNYWRQLLNAKLITQRKFDNLTKAERGGLSELDKAGFIKRQLVETRQITKHVAQILDSRMNTKYDENDKLIREVKVITLKSKLVSDFRKDFQFYKVREINNYHHAHDAYLNAVVGTALIKKYPKLESEFVYGDYKVYDVRKMIAKSEQEIGKATAKYFFYSNIMNFFKTEITLANGEIRKRPLIETNGETGEIVWDKGRDFATVRKVLSMPQVNIVKKTEVQTGGFSKESILPKRNSDKLIARKKDWDPKKYGGFDSPTVAYSVLVVAKVEKGKSKKLKSVKELLGITIMERSSFEKNPIDFLEAKGYKEVKKDLIIKLPKYSLFELENGRKRMLASAGELQKGNELALPSKYVNFLYLASHYEKLKGSPEDNEQKQLFVEQHKHYLDEIIEQISEFSKRVILADANLDKVLSAYNKHRDKPIREQAENIIHLFTLTNLGAPAAFKYFDTTIDRKRYTSTKEVLDATLIHQSITGLYETRIDLSQLGGDGGEAAAKGGSGSSGGVLNLEEEYRLHEKPVPSSIDPSWLQLFPTVWAERAGMGLANQVPPVVVELRSGASPVAVRQYPMSKEAREGIRPHIQRFLDLGVLVPCQSPWNTPLLPVKKPGTNDYRPVQDLREINKRVQDIHPTVPNPYNLLSSLPPSHTWYSVLDLKDAFFCLKLHPNSQPLFAFEWRDPEKGNTGQLTWTRLPQGFKNSPTLFNEALHRDLAPFRALNPQVVLLQYVDDLLVAAPTYRDCKEGTQKLLQELSKLGYRVSAKKAQLCQKEVTYLGYLLKEGKRWLTPARKATVMKIPPPTTPRQVREFLGKAGFCRLFIPGFASLAAPLYPLTKPSIPFIWTEEHQKAFDRIKEALLSAPALALPDLTKPFTLYVDERAGVARGVLTQTLGPWRRPVAYLSKKLDPVASGWPTCLKAVAAVALLLKDADKLTLGQNVTVIASHSLESIVRQPPDRWMTNARMTHYQSLLLNERVSFAPPAVLNPATLLPVESEATPVHRCSEILAEETGTRRDLKDQPLPGVPAWYTDGSSFIAEGKRRAGAAIVDGKRTVWASSLPEGTSAQKAELVALTQALRLAEGKDINIYTDSRYAFATAHIHGAIYKQRGWLTSAGKDIKNKEEILALLEAIHLPKRVAIIHCPGHQKGNDPVATGNRRADEAAKQAALSTRVLAETTKPAGKRTADGSEFEKRTADGSEFESPKKKAKVE

SEQ ID NO: 906 - protein, 2089 aa, synthetic construct
MPAAKRVKLDGGDKKYSIGLDIGTNSVGWAVITDEYKVPSKKFKVLGNTDRHSIKKNLIGALLFDSGETAEATRLKRTARRRYTRRKNRICYLQEIFSNEMAKVDDSFFHRLEESFLVEEDKKHERHPIFGNIVDEVAYHEKYPTIYHLRKKLVDSTDKADLRLIYLALAHMIKFRGHFLIEGDLNPDNSDVDKLFIQLVQTYNQLFEENPINASGVDAKAILSARLSKSRRLENLIAQLPGEKKNGLFGNLIALSLGLTPNFKSNFDLAEDAKLQLSKDTYDDDLDNLLAQIGDQYADLFLAAKNLSDAILLSDILRVNTEITKAPLSASMIKRYDEHHQDLTLLKALVRQQLPEKYKEIFFDQSKNGYAGYIDGGASQEEFYKFIKPILEKMDGTEELLVKLNREDLLRKQRTFDNGSIPHQIHLGELHAILRRQEDFYPFLKDNREKIEKILTFRIPYYVGPLARGNSRFAWMTRKSEETITPWNFEEVVDKGASAQSFIERMTNFDKNLPNEKVLPKHSLLYEYFTVYNELTKVKYVTEGMRKPAFLSGEQKKAIVDLLFKTNRKVTVKQLKEDYFKKIECFDSVEISGVEDRFNASLGTYHDLLKIIKDKDFLDNEENEDILEDIVLTLTLFEDREMIEERLKTYAHLFDDKVMKQLKRRRYTGWGRLSRKLINGIRDKQSGKTILDFLKSDGFANRNFMQLIHDDSLTFKEDIQKAQVSGQGDSLHEHIANLAGSPAIKKGILQTVKVVDELVKVMGRHKPENIVIEMARENQTTQKGQKNSRERMKRIEEGIKELGSQILKEHPVENTQLQNEKLYLYYLQNGRDMYVDQELDINRLSDYDVDHIVPQSFLKDDSIDNKVLTRSDKARGKSDNVPSEEVVKKMKNYWRQLLNAKLITQRKFDNLTKAERGGLSELDKAGFIKRQLVETRQITKHVAQILDSRMNTKYDENDKLIREVKVITLKSKLVSDFRKDFQFYKVREINNYHHAHDAYLNAVVGTALIKKYPKLESEFVYGDYKVYDVRKMIAKSEQEIGKATAKYFFYSNIMNFFKTEITLANGEIRKRPLIETNGETGEIVWDKGRDFATVRKVLSMPQVNIVKKTEVQTGGFSKESILPKRNSDKLIARKKDWDPKKYGGFDSPTVAYSVLVVAKVEKGKSKKLKSVKELLGITIMERSSFEKNPIDFLEAKGYKEVKKDLIIKLPKYSLFELENGRKRMLASAGELQKGNELALPSKYVNFLYLASHYEKLKGSPEDNEQKQLFVEQHKHYLDEIIEQISEFSKRVILADANLDKVLSAYNKHRDKPIREQAENIIHLFTLTNLGAPAAFKYFDTTIDRKRYTSTKEVLDATLIHQSITGLYETRIDLSQLGGDGGGGSGGSGGVLNLEEEYRLHEKPVPSSIDPSWLQLFPTVWAERAGMGLANQVPPVVVELRSGASPVAVRQYPMSKEAREGIRPHIQRFLDLGVLVPCQSPWNTPLLPVKKPGTNDYRPVQDLREINKRVQDIHPTVPNPYNLLSSLPPSHTWYSVLDLKDAFFCLKLHPNSQPLFAFEWRDPEKGNTGQLTWTRLPQGFKNSPTLFNEALHRDLAPFRALNPQVVLLQYVDDLLVAAPTYRDCKEGTQKLLQELSKLGYRVSAKKAQLCQKEVTYLGYLLKEGKRWLTPARKATVMKIPPPTTPRQVREFLGKAGFCRLFIPGFASLAAPLYPLTKPSIPFIWTEEHQKAFDRIKEALLSAPALALPDLTKPFTLYVDERAGVARGVLTQTLGPWRRPVAYLSKKLDPVASGWPTCLKAVAAVALLLKDADKLTLGQNVTVIASHSLESIVRQPPDRWMTNARMTHYQSLLLNERVSFAPPAVLNPATLLPVESEATPVHRCSEILAEETGTRRDLKDQPLPGVPAWYTDGSSFIAEGKRRAGAAIVDGKRTVWASSLPEGTSAQKAELVALTQALRLAEGKDINIYTDSRYAFATAHIHGAIYKQRGWLTSAGKDIKNKEEILALLEAIHLPKRVAIIHCPGHQKGNDPVATGNRRADEAAKQAALSTRVLAETTKPAGKRTADGSEFEKRTADGSEFESPKKKAKVE

SEQ ID NO: 907 - protein, 2095 aa, synthetic construct
MPAAKRVKLDGGDKKYSIGLDIGTNSVGWAVITDEYKVPSKKFKVLGNTDRHSIKKNLIGALLFDSGETAEATRLKRTARRRYTRRKNRICYLQEIFSNEMAKVDDSFFHRLEESFLVEEDKKHERHPIFGNIVDEVAYHEKYPTIYHLRKKLVDSTDKADLRLIYLALAHMIKFRGHFLIEGDLNPDNSDVDKLFIQLVQTYNQLFEENPINASGVDAKAILSARLSKSRRLENLIAQLPGEKKNGLFGNLIALSLGLTPNFKSNFDLAEDAKLQLSKDTYDDDLDNLLAQIGDQYADLFLAAKNLSDAILLSDILRVNTEITKAPLSASMIKRYDEHHQDLTLLKALVRQQLPEKYKEIFFDQSKNGYAGYIDGGASQEEFYKFIKPILEKMDGTEELLVKLNREDLLRKQRTFDNGSIPHQIHLGELHAILRRQEDFYPFLKDNREKIEKILTFRIPYYVGPLARGNSRFAWMTRKSEETITPWNFEEVVDKGASAQSFIERMTNFDKNLPNEKVLPKHSLLYEYFTVYNELTKVKYVTEGMRKPAFLSGEQKKAIVDLLFKTNRKVTVKQLKEDYFKKIECFDSVEISGVEDRFNASLGTYHDLLKIIKDKDFLDNEENEDILEDIVLTLTLFEDREMIEERLKTYAHLFDDKVMKQLKRRRYTGWGRLSRKLINGIRDKQSGKTILDFLKSDGFANRNFMQLIHDDSLTFKEDIQKAQVSGQGDSLHEHIANLAGSPAIKKGILQTVKVVDELVKVMGRHKPENIVIEMARENQTTQKGQKNSRERMKRIEEGIKELGSQILKEHPVENTQLQNEKLYLYYLQNGRDMYVDQELDINRLSDYDVDHIVPQSFLKDDSIDNKVLTRSDKARGKSDNVPSEEVVKKMKNYWRQLLNAKLITQRKFDNLTKAERGGLSELDKAGFIKRQLVETRQITKHVAQILDSRMNTKYDENDKLIREVKVITLKSKLVSDFRKDFQFYKVREINNYHHAHDAYLNAVVGTALIKKYPKLESEFVYGDYKVYDVRKMIAKSEQEIGKATAKYFFYSNIMNFFKTEITLANGEIRKRPLIETNGETGEIVWDKGRDFATVRKVLSMPQVNIVKKTEVQTGGFSKESILPKRNSDKLIARKKDWDPKKYGGFDSPTVAYSVLVVAKVEKGKSKKLKSVKELLGITIMERSSFEKNPIDFLEAKGYKEVKKDLIIKLPKYSLFELENGRKRMLASAGELQKGNELALPSKYVNFLYLASHYEKLKGSPEDNEQKQLFVEQHKHYLDEIIEQISEFSKRVILADANLDKVLSAYNKHRDKPIREQAENIIHLFTLTNLGAPAAFKYFDTTIDRKRYTSTKEVLDATLIHQSITGLYETRIDLSQLGGDGGGSAGSAAGSGEFGGVLNLEEEYRLHEKPVPSSIDPSWLQLFPTVWAERAGMGLANQVPPVVVELRSGASPVAVRQYPMSKEAREGIRPHIQRFLDLGVLVPCQSPWNTPLLPVKKPGTNDYRPVQDLREINKRVQDIHPTVPNPYNLLSSLPPSHTWYSVLDLKDAFFCLKLHPNSQPLFAFEWRDPEKGNTGQLTWTRLPQGFKNSPTLFNEALHRDLAPFRALNPQVVLLQYVDDLLVAAPTYRDCKEGTQKLLQELSKLGYRVSAKKAQLCQKEVTYLGYLLKEGKRWLTPARKATVMKIPPPTTPRQVREFLGKAGFCRLFIPGFASLAAPLYPLTKPSIPFIWTEEHQKAFDRIKEALLSAPALALPDLTKPFTLYVDERAGVARGVLTQTLGPWRRPVAYLSKKLDPVASGWPTCLKAVAAVALLLKDADKLTLGQNVTVIASHSLESIVRQPPDRWMTNARMTHYQSLLLNERVSFAPPAVLNPATLLPVESEATPVHRCSEILAEETGTRRDLKDQPLPGVPAWYTDGSSFIAEGKRRAGAAIVDGKRTVWASSLPEGTSAQKAELVALTQALRLAEGKDINIYTDSRYAFATAHIHGAIYKQRGWLTSAGKDIKNKEEILALLEAIHLPKRVAIIHCPGHQKGNDPVATGNRRADEAAKQAALSTRVLAETTKPAGKRTADGSEFEKRTADGSEFESPKKKAKVE

SEQ ID NO: 908 - protein, 2092 aa, synthetic construct
MPAAKRVKLDGGDKKYSIGLDIGTNSVGWAVITDEYKVPSKKFKVLGNTDRHSIKKNLIGALLFDSGETAEATRLKRTARRRYTRRKNRICYLQEIFSNEMAKVDDSFFHRLEESFLVEEDKKHERHPIFGNIVDEVAYHEKYPTIYHLRKKLVDSTDKADLRLIYLALAHMIKFRGHFLIEGDLNPDNSDVDKLFIQLVQTYNQLFEENPINASGVDAKAILSARLSKSRRLENLIAQLPGEKKNGLFGNLIALSLGLTPNFKSNFDLAEDAKLQLSKDTYDDDLDNLLAQIGDQYADLFLAAKNLSDAILLSDILRVNTEITKAPLSASMIKRYDEHHQDLTLLKALVRQQLPEKYKEIFFDQSKNGYAGYIDGGASQEEFYKFIKPILEKMDGTEELLVKLNREDLLRKQRTFDNGSIPHQIHLGELHAILRRQEDFYPFLKDNREKIEKILTFRIPYYVGPLARGNSRFAWMTRKSEETITPWNFEEVVDKGASAQSFIERMTNFDKNLPNEKVLPKHSLLYEYFTVYNELTKVKYVTEGMRKPAFLSGEQKKAIVDLLFKTNRKVTVKQLKEDYFKKIECFDSVEISGVEDRFNASLGTYHDLLKIIKDKDFLDNEENEDILEDIVLTLTLFEDREMIEERLKTYAHLFDDKVMKQLKRRRYTGWGRLSRKLINGIRDKQSGKTILDFLKSDGFANRNFMQLIHDDSLTFKEDIQKAQVSGQGDSLHEHIANLAGSPAIKKGILQTVKVVDELVKVMGRHKPENIVIEMARENQTTQKGQKNSRERMKRIEEGIKELGSQILKEHPVENTQLQNEKLYLYYLQNGRDMYVDQELDINRLSDYDVDHIVPQSFLKDDSIDNKVLTRSDKARGKSDNVPSEEVVKKMKNYWRQLLNAKLITQRKFDNLTKAERGGLSELDKAGFIKRQLVETRQITKHVAQILDSRMNTKYDENDKLIREVKVITLKSKLVSDFRKDFQFYKVREINNYHHAHDAYLNAVVGTALIKKYPKLESEFVYGDYKVYDVRKMIAKSEQEIGKATAKYFFYSNIMNFFKTEITLANGEIRKRPLIETNGETGEIVWDKGRDFATVRKVLSMPQVNIVKKTEVQTGGFSKESILPKRNSDKLIARKKDWDPKKYGGFDSPTVAYSVLVVAKVEKGKSKKLKSVKELLGITIMERSSFEKNPIDFLEAKGYKEVKKDLIIKLPKYSLFELENGRKRMLASAGELQKGNELALPSKYVNFLYLASHYEKLKGSPEDNEQKQLFVEQHKHYLDEIIEQISEFSKRVILADANLDKVLSAYNKHRDKPIREQAENIIHLFTLTNLGAPAAFKYFDTTIDRKRYTSTKEVLDATLIHQSITGLYETRIDLSQLGGDGGGGSGGGPAPGGVLNLEEEYRLHEKPVPSSIDPSWLQLFPTVWAERAGMGLANQVPPVVVELRSGASPVAVRQYPMSKEAREGIRPHIQRFLDLGVLVPCQSPWNTPLLPVKKPGTNDYRPVQDLREINKRVQDIHPTVPNPYNLLSSLPPSHTWYSVLDLKDAFFCLKLHPNSQPLFAFEWRDPEKGNTGQLTWTRLPQGFKNSPTLFNEALHRDLAPFRALNPQVVLLQYVDDLLVAAPTYRDCKEGTQKLLQELSKLGYRVSAKKAQLCQKEVTYLGYLLKEGKRWLTPARKATVMKIPPPTTPRQVREFLGKAGFCRLFIPGFASLAAPLYPLTKPSIPFIWTEEHQKAFDRIKEALLSAPALALPDLTKPFTLYVDERAGVARGVLTQTLGPWRRPVAYLSKKLDPVASGWPTCLKAVAAVALLLKDADKLTLGQNVTVIASHSLESIVRQPPDRWMTNARMTHYQSLLLNERVSFAPPAVLNPATLLPVESEATPVHRCSEILAEETGTRRDLKDQPLPGVPAWYTDGSSFIAEGKRRAGAAIVDGKRTVWASSLPEGTSAQKAELVALTQALRLAEGKDINIYTDSRYAFATAHIHGAIYKQRGWLTSAGKDIKNKEEILALLEAIHLPKRVAIIHCPGHQKGNDPVATGNRRADEAAKQAALSTRVLAETTKPAGKRTADGSEFEKRTADGSEFESPKKKAKVE

SEQ ID NO: 909 - protein, 2092 aa, synthetic construct
MPAAKRVKLDGGDKKYSIGLDIGTNSVGWAVITDEYKVPSKKFKVLGNTDRHSIKKNLIGALLFDSGETAEATRLKRTARRRYTRRKNRICYLQEIFSNEMAKVDDSFFHRLEESFLVEEDKKHERHPIFGNIVDEVAYHEKYPTIYHLRKKLVDSTDKADLRLIYLALAHMIKFRGHFLIEGDLNPDNSDVDKLFIQLVQTYNQLFEENPINASGVDAKAILSARLSKSRRLENLIAQLPGEKKNGLFGNLIALSLGLTPNFKSNFDLAEDAKLQLSKDTYDDDLDNLLAQIGDQYADLFLAAKNLSDAILLSDILRVNTEITKAPLSASMIKRYDEHHQDLTLLKALVRQQLPEKYKEIFFDQSKNGYAGYIDGGASQEEFYKFIKPILEKMDGTEELLVKLNREDLLRKQRTFDNGSIPHQIHLGELHAILRRQEDFYPFLKDNREKIEKILTFRIPYYVGPLARGNSRFAWMTRKSEETITPWNFEEVVDKGASAQSFIERMTNFDKNLPNEKVLPKHSLLYEYFTVYNELTKVKYVTEGMRKPAFLSGEQKKAIVDLLFKTNRKVTVKQLKEDYFKKIECFDSVEISGVEDRFNASLGTYHDLLKIIKDKDFLDNEENEDILEDIVLTLTLFEDREMIEERLKTYAHLFDDKVMKQLKRRRYTGWGRLSRKLINGIRDKQSGKTILDFLKSDGFANRNFMQLIHDDSLTFKEDIQKAQVSGQGDSLHEHIANLAGSPAIKKGILQTVKVVDELVKVMGRHKPENIVIEMARENQTTQKGQKNSRERMKRIEEGIKELGSQILKEHPVENTQLQNEKLYLYYLQNGRDMYVDQELDINRLSDYDVDHIVPQSFLKDDSIDNKVLTRSDKARGKSDNVPSEEVVKKMKNYWRQLLNAKLITQRKFDNLTKAERGGLSELDKAGFIKRQLVETRQITKHVAQILDSRMNTKYDENDKLIREVKVITLKSKLVSDFRKDFQFYKVREINNYHHAHDAYLNAVVGTALIKKYPKLESEFVYGDYKVYDVRKMIAKSEQEIGKATAKYFFYSNIMNFFKTEITLANGEIRKRPLIETNGETGEIVWDKGRDFATVRKVLSMPQVNIVKKTEVQTGGFSKESILPKRNSDKLIARKKDWDPKKYGGFDSPTVAYSVLVVAKVEKGKSKKLKSVKELLGITIMERSSFEKNPIDFLEAKGYKEVKKDLIIKLPKYSLFELENGRKRMLASAGELQKGNELALPSKYVNFLYLASHYEKLKGSPEDNEQKQLFVEQHKHYLDEIIEQISEFSKRVILADANLDKVLSAYNKHRDKPIREQAENIIHLFTLTNLGAPAAFKYFDTTIDRKRYTSTKEVLDATLIHQSITGLYETRIDLSQLGGDGGGGSGSSGGGGGVLNLEEEYRLHEKPVPSSIDPSWLQLFPTVWAERAGMGLANQVPPVVVELRSGASPVAVRQYPMSKEAREGIRPHIQRFLDLGVLVPCQSPWNTPLLPVKKPGTNDYRPVQDLREINKRVQDIHPTVPNPYNLLSSLPPSHTWYSVLDLKDAFFCLKLHPNSQPLFAFEWRDPEKGNTGQLTWTRLPQGFKNSPTLFNEALHRDLAPFRALNPQVVLLQYVDDLLVAAPTYRDCKEGTQKLLQELSKLGYRVSAKKAQLCQKEVTYLGYLLKEGKRWLTPARKATVMKIPPPTTPRQVREFLGKAGFCRLFIPGFASLAAPLYPLTKPSIPFIWTEEHQKAFDRIKEALLSAPALALPDLTKPFTLYVDERAGVARGVLTQTLGPWRRPVAYLSKKLDPVASGWPTCLKAVAAVALLLKDADKLTLGQNVTVIASHSLESIVRQPPDRWMTNARMTHYQSLLLNERVSFAPPAVLNPATLLPVESEATPVHRCSEILAEETGTRRDLKDQPLPGVPAWYTDGSSFIAEGKRRAGAAIVDGKRTVWASSLPEGTSAQKAELVALTQALRLAEGKDINIYTDSRYAFATAHIHGAIYKQRGWLTSAGKDIKNKEEILALLEAIHLPKRVAIIHCPGHQKGNDPVATGNRRADEAAKQAALSTRVLAETTKPAGKRTADGSEFEKRTADGSEFESPKKKAKVE

SEQ ID NO: 910 - protein, 2094 aa, synthetic construct
MPAAKRVKLDGGDKKYSIGLDIGTNSVGWAVITDEYKVPSKKFKVLGNTDRHSIKKNLIGALLFDSGETAEATRLKRTARRRYTRRKNRICYLQEIFSNEMAKVDDSFFHRLEESFLVEEDKKHERHPIFGNIVDEVAYHEKYPTIYHLRKKLVDSTDKADLRLIYLALAHMIKFRGHFLIEGDLNPDNSDVDKLFIQLVQTYNQLFEENPINASGVDAKAILSARLSKSRRLENLIAQLPGEKKNGLFGNLIALSLGLTPNFKSNFDLAEDAKLQLSKDTYDDDLDNLLAQIGDQYADLFLAAKNLSDAILLSDILRVNTEITKAPLSASMIKRYDEHHQDLTLLKALVRQQLPEKYKEIFFDQSKNGYAGYIDGGASQEEFYKFIKPILEKMDGTEELLVKLNREDLLRKQRTFDNGSIPHQIHLGELHAILRRQEDFYPFLKDNREKIEKILTFRIPYYVGPLARGNSRFAWMTRKSEETITPWNFEEVVDKGASAQSFIERMTNFDKNLPNEKVLPKHSLLYEYFTVYNELTKVKYVTEGMRKPAFLSGEQKKAIVDLLFKTNRKVTVKQLKEDYFKKIECFDSVEISGVEDRFNASLGTYHDLLKIIKDKDFLDNEENEDILEDIVLTLTLFEDREMIEERLKTYAHLFDDKVMKQLKRRRYTGWGRLSRKLINGIRDKQSGKTILDFLKSDGFANRNFMQLIHDDSLTFKEDIQKAQVSGQGDSLHEHIANLAGSPAIKKGILQTVKVVDELVKVMGRHKPENIVIEMARENQTTQKGQKNSRERMKRIEEGIKELGSQILKEHPVENTQLQNEKLYLYYLQNGRDMYVDQELDINRLSDYDVDHIVPQSFLKDDSIDNKVLTRSDKARGKSDNVPSEEVVKKMKNYWRQLLNAKLITQRKFDNLTKAERGGLSELDKAGFIKRQLVETRQITKHVAQILDSRMNTKYDENDKLIREVKVITLKSKLVSDFRKDFQFYKVREINNYHHAHDAYLNAVVGTALIKKYPKLESEFVYGDYKVYDVRKMIAKSEQEIGKATAKYFFYSNIMNFFKTEITLANGEIRKRPLIETNGETGEIVWDKGRDFATVRKVLSMPQVNIVKKTEVQTGGFSKESILPKRNSDKLIARKKDWDPKKYGGFDSPTVAYSVLVVAKVEKGKSKKLKSVKELLGITIMERSSFEKNPIDFLEAKGYKEVKKDLIIKLPKYSLFELENGRKRMLASAGELQKGNELALPSKYVNFLYLASHYEKLKGSPEDNEQKQLFVEQHKHYLDEIIEQISEFSKRVILADANLDKVLSAYNKHRDKPIREQAENIIHLFTLTNLGAPAAFKYFDTTIDRKRYTSTKEVLDATLIHQSITGLYETRIDLSQLGGDGGGSSEAAAKGGGGGVLNLEEEYRLHEKPVPSSIDPSWLQLFPTVWAERAGMGLANQVPPVVVELRSGASPVAVRQYPMSKEAREGIRPHIQRFLDLGVLVPCQSPWNTPLLPVKKPGTNDYRPVQDLREINKRVQDIHPTVPNPYNLLSSLPPSHTWYSVLDLKDAFFCLKLHPNSQPLFAFEWRDPEKGNTGQLTWTRLPQGFKNSPTLFNEALHRDLAPFRALNPQVVLLQYVDDLLVAAPTYRDCKEGTQKLLQELSKLGYRVSAKKAQLCQKEVTYLGYLLKEGKRWLTPARKATVMKIPPPTTPRQVREFLGKAGFCRLFIPGFASLAAPLYPLTKPSIPFIWTEEHQKAFDRIKEALLSAPALALPDLTKPFTLYVDERAGVARGVLTQTLGPWRRPVAYLSKKLDPVASGWPTCLKAVAAVALLLKDADKLTLGQNVTVIASHSLESIVRQPPDRWMTNARMTHYQSLLLNERVSFAPPAVLNPATLLPVESEATPVHRCSEILAEETGTRRDLKDQPLPGVPAWYTDGSSFIAEGKRRAGAAIVDGKRTVWASSLPEGTSAQKAELVALTQALRLAEGKDINIYTDSRYAFATAHIHGAIYKQRGWLTSAGKDIKNKEEILALLEAIHLPKRVAIIHCPGHQKGNDPVATGNRRADEAAKQAALSTRVLAETTKPAGKRTADGSEFEKRTADGSEFESPKKKAKVE

SEQ ID NO: 911 - protein, 2098 aa, synthetic construct
MPAAKRVKLDGGDKKYSIGLDIGTNSVGWAVITDEYKVPSKKFKVLGNTDRHSIKKNLIGALLFDSGETAEATRLKRTARRRYTRRKNRICYLQEIFSNEMAKVDDSFFHRLEESFLVEEDKKHERHPIFGNIVDEVAYHEKYPTIYHLRKKLVDSTDKADLRLIYLALAHMIKFRGHFLIEGDLNPDNSDVDKLFIQLVQTYNQLFEENPINASGVDAKAILSARLSKSRRLENLIAQLPGEKKNGLFGNLIALSLGLTPNFKSNFDLAEDAKLQLSKDTYDDDLDNLLAQIGDQYADLFLAAKNLSDAILLSDILRVNTEITKAPLSASMIKRYDEHHQDLTLLKALVRQQLPEKYKEIFFDQSKNGYAGYIDGGASQEEFYKFIKPILEKMDGTEELLVKLNREDLLRKQRTFDNGSIPHQIHLGELHAILRRQEDFYPFLKDNREKIEKILTFRIPYYVGPLARGNSRFAWMTRKSEETITPWNFEEVVDKGASAQSFIERMTNFDKNLPNEKVLPKHSLLYEYFTVYNELTKVKYVTEGMRKPAFLSGEQKKAIVDLLFKTNRKVTVKQLKEDYFKKIECFDSVEISGVEDRFNASLGTYHDLLKIIKDKDFLDNEENEDILEDIVLTLTLFEDREMIEERLKTYAHLFDDKVMKQLKRRRYTGWGRLSRKLINGIRDKQSGKTILDFLKSDGFANRNFMQLIHDDSLTFKEDIQKAQVSGQGDSLHEHIANLAGSPAIKKGILQTVKVVDELVKVMGRHKPENIVIEMARENQTTQKGQKNSRERMKRIEEGIKELGSQILKEHPVENTQLQNEKLYLYYLQNGRDMYVDQELDINRLSDYDVDHIVPQSFLKDDSIDNKVLTRSDKARGKSDNVPSEEVVKKMKNYWRQLLNAKLITQRKFDNLTKAERGGLSELDKAGFIKRQLVETRQITKHVAQILDSRMNTKYDENDKLIREVKVITLKSKLVSDFRKDFQFYKVREINNYHHAHDAYLNAVVGTALIKKYPKLESEFVYGDYKVYDVRKMIAKSEQEIGKATAKYFFYSNIMNFFKTEITLANGEIRKRPLIETNGETGEIVWDKGRDFATVRKVLSMPQVNIVKKTEVQTGGFSKESILPKRNSDKLIARKKDWDPKKYGGFDSPTVAYSVLVVAKVEKGKSKKLKSVKELLGITIMERSSFEKNPIDFLEAKGYKEVKKDLIIKLPKYSLFELENGRKRMLASAGELQKGNELALPSKYVNFLYLASHYEKLKGSPEDNEQKQLFVEQHKHYLDEIIEQISEFSKRVILADANLDKVLSAYNKHRDKPIREQAENIIHLFTLTNLGAPAAFKYFDTTIDRKRYTSTKEVLDATLIHQSITGLYETRIDLSQLGGDGGGGGGSEAAAKGGGGSGGVLNLEEEYRLHEKPVPSSIDPSWLQLFPTVWAERAGMGLANQVPPVVVELRSGASPVAVRQYPMSKEAREGIRPHIQRFLDLGVLVPCQSPWNTPLLPVKKPGTNDYRPVQDLREINKRVQDIHPTVPNPYNLLSSLPPSHTWYSVLDLKDAFFCLKLHPNSQPLFAFEWRDPEKGNTGQLTWTRLPQGFKNSPTLFNEALHRDLAPFRALNPQVVLLQYVDDLLVAAPTYRDCKEGTQKLLQELSKLGYRVSAKKAQLCQKEVTYLGYLLKEGKRWLTPARKATVMKIPPPTTPRQVREFLGKAGFCRLFIPGFASLAAPLYPLTKPSIPFIWTEEHQKAFDRIKEALLSAPALALPDLTKPFTLYVDERAGVARGVLTQTLGPWRRPVAYLSKKLDPVASGWPTCLKAVAAVALLLKDADKLTLGQNVTVIASHSLESIVRQPPDRWMTNARMTHYQSLLLNERVSFAPPAVLNPATLLPVESEATPVHRCSEILAEETGTRRDLKDQPLPGVPAWYTDGSSFIAEGKRRAGAAIVDGKRTVWASSLPEGTSAQKAELVALTQALRLAEGKDINIYTDSRYAFATAHIHGAIYKQRGWLTSAGKDIKNKEEILALLEAIHLPKRVAIIHCPGHQKGNDPVATGNRRADEAAKQAALSTRVLAETTKPAGKRTADGSEFEKRTADGSEFESPKKKAKVE

SEQ ID NO: 912 - protein, 2094 aa, synthetic construct
MPAAKRVKLDGGDKKYSIGLDIGTNSVGWAVITDEYKVPSKKFKVLGNTDRHSIKKNLIGALLFDSGETAEATRLKRTARRRYTRRKNRICYLQEIFSNEMAKVDDSFFHRLEESFLVEEDKKHERHPIFGNIVDEVAYHEKYPTIYHLRKKLVDSTDKADLRLIYLALAHMIKFRGHFLIEGDLNPDNSDVDKLFIQLVQTYNQLFEENPINASGVDAKAILSARLSKSRRLENLIAQLPGEKKNGLFGNLIALSLGLTPNFKSNFDLAEDAKLQLSKDTYDDDLDNLLAQIGDQYADLFLAAKNLSDAILLSDILRVNTEITKAPLSASMIKRYDEHHQDLTLLKALVRQQLPEKYKEIFFDQSKNGYAGYIDGGASQEEFYKFIKPILEKMDGTEELLVKLNREDLLRKQRTFDNGSIPHQIHLGELHAILRRQEDFYPFLKDNREKIEKILTFRIPYYVGPLARGNSRFAWMTRKSEETITPWNFEEVVDKGASAQSFIERMTNFDKNLPNEKVLPKHSLLYEYFTVYNELTKVKYVTEGMRKPAFLSGEQKKAIVDLLFKTNRKVTVKQLKEDYFKKIECFDSVEISGVEDRFNASLGTYHDLLKIIKDKDFLDNEENEDILEDIVLTLTLFEDREMIEERLKTYAHLFDDKVMKQLKRRRYTGWGRLSRKLINGIRDKQSGKTILDFLKSDGFANRNFMQLIHDDSLTFKEDIQKAQVSGQGDSLHEHIANLAGSPAIKKGILQTVKVVDELVKVMGRHKPENIVIEMARENQTTQKGQKNSRERMKRIEEGIKELGSQILKEHPVENTQLQNEKLYLYYLQNGRDMYVDQELDINRLSDYDVDHIVPQSFLKDDSIDNKVLTRSDKARGKSDNVPSEEVVKKMKNYWRQLLNAKLITQRKFDNLTKAERGGLSELDKAGFIKRQLVETRQITKHVAQILDSRMNTKYDENDKLIREVKVITLKSKLVSDFRKDFQFYKVREINNYHHAHDAYLNAVVGTALIKKYPKLESEFVYGDYKVYDVRKMIAKSEQEIGKATAKYFFYSNIMNFFKTEITLANGEIRKRPLIETNGETGEIVWDKGRDFATVRKVLSMPQVNIVKKTEVQTGGFSKESILPKRNSDKLIARKKDWDPKKYGGFDSPTVAYSVLVVAKVEKGKSKKLKSVKELLGITIMERSSFEKNPIDFLEAKGYKEVKKDLIIKLPKYSLFELENGRKRMLASAGELQKGNELALPSKYVNFLYLASHYEKLKGSPEDNEQKQLFVEQHKHYLDEIIEQISEFSKRVILADANLDKVLSAYNKHRDKPIREQAENIIHLFTLTNLGAPAAFKYFDTTIDRKRYTSTKEVLDATLIHQSITGLYETRIDLSQLGGDGGGGSEAAAKPAPGGVLNLEEEYRLHEKPVPSSIDPSWLQLFPTVWAERAGMGLANQVPPVVVELRSGASPVAVRQYPMSKEAREGIRPHIQRFLDLGVLVPCQSPWNTPLLPVKKPGTNDYRPVQDLREINKRVQDIHPTVPNPYNLLSSLPPSHTWYSVLDLKDAFFCLKLHPNSQPLFAFEWRDPEKGNTGQLTWTRLPQGFKNSPTLFNEALHRDLAPFRALNPQVVLLQYVDDLLVAAPTYRDCKEGTQKLLQELSKLGYRVSAKKAQLCQKEVTYLGYLLKEGKRWLTPARKATVMKIPPPTTPRQVREFLGKAGFCRLFIPGFASLAAPLYPLTKPSIPFIWTEEHQKAFDRIKEALLSAPALALPDLTKPFTLYVDERAGVARGVLTQTLGPWRRPVAYLSKKLDPVASGWPTCLKAVAAVALLLKDADKLTLGQNVTVIASHSLESIVRQPPDRWMTNARMTHYQSLLLNERVSFAPPAVLNPATLLPVESEATPVHRCSEILAEETGTRRDLKDQPLPGVPAWYTDGSSFIAEGKRRAGAAIVDGKRTVWASSLPEGTSAQKAELVALTQALRLAEGKDINIYTDSRYAFATAHIHGAIYKQRGWLTSAGKDIKNKEEILALLEAIHLPKRVAIIHCPGHQKGNDPVATGNRRADEAAKQAALSTRVLAETTKPAGKRTADGSEFEKRTADGSEFESPKKKAKVE

SEQ ID NO: 913 - protein, 2092 aa, synthetic construct
MPAAKRVKLDGGDKKYSIGLDIGTNSVGWAVITDEYKVPSKKFKVLGNTDRHSIKKNLIGALLFDSGETAEATRLKRTARRRYTRRKNRICYLQEIFSNEMAKVDDSFFHRLEESFLVEEDKKHERHPIFGNIVDEVAYHEKYPTIYHLRKKLVDSTDKADLRLIYLALAHMIKFRGHFLIEGDLNPDNSDVDKLFIQLVQTYNQLFEENPINASGVDAKAILSARLSKSRRLENLIAQLPGEKKNGLFGNLIALSLGLTPNFKSNFDLAEDAKLQLSKDTYDDDLDNLLAQIGDQYADLFLAAKNLSDAILLSDILRVNTEITKAPLSASMIKRYDEHHQDLTLLKALVRQQLPEKYKEIFFDQSKNGYAGYIDGGASQEEFYKFIKPILEKMDGTEELLVKLNREDLLRKQRTFDNGSIPHQIHLGELHAILRRQEDFYPFLKDNREKIEKILTFRIPYYVGPLARGNSRFAWMTRKSEETITPWNFEEVVDKGASAQSFIERMTNFDKNLPNEKVLPKHSLLYEYFTVYNELTKVKYVTEGMRKPAFLSGEQKKAIVDLLFKTNRKVTVKQLKEDYFKKIECFDSVEISGVEDRFNASLGTYHDLLKIIKDKDFLDNEENEDILEDIVLTLTLFEDREMIEERLKTYAHLFDDKVMKQLKRRRYTGWGRLSRKLINGIRDKQSGKTILDFLKSDGFANRNFMQLIHDDSLTFKEDIQKAQVSGQGDSLHEHIANLAGSPAIKKGILQTVKVVDELVKVMGRHKPENIVIEMARENQTTQKGQKNSRERMKRIEEGIKELGSQILKEHPVENTQLQNEKLYLYYLQNGRDMYVDQELDINRLSDYDVDHIVPQSFLKDDSIDNKVLTRSDKARGKSDNVPSEEVVKKMKNYWRQLLNAKLITQRKFDNLTKAERGGLSELDKAGFIKRQLVETRQITKHVAQILDSRMNTKYDENDKLIREVKVITLKSKLVSDFRKDFQFYKVREINNYHHAHDAYLNAVVGTALIKKYPKLESEFVYGDYKVYDVRKMIAKSEQEIGKATAKYFFYSNIMNFFKTEITLANGEIRKRPLIETNGETGEIVWDKGRDFATVRKVLSMPQVNIVKKTEVQTGGFSKESILPKRNSDKLIARKKDWDPKKYGGFDSPTVAYSVLVVAKVEKGKSKKLKSVKELLGITIMERSSFEKNPIDFLEAKGYKEVKKDLIIKLPKYSLFELENGRKRMLASAGELQKGNELALPSKYVNFLYLASHYEKLKGSPEDNEQKQLFVEQHKHYLDEIIEQISEFSKRVILADANLDKVLSAYNKHRDKPIREQAENIIHLFTLTNLGAPAAFKYFDTTIDRKRYTSTKEVLDATLIHQSITGLYETRIDLSQLGGDGGGGGPAPGSSGGVLNLEEEYRLHEKPVPSSIDPSWLQLFPTVWAERAGMGLANQVPPVVVELRSGASPVAVRQYPMSKEAREGIRPHIQRFLDLGVLVPCQSPWNTPLLPVKKPGTNDYRPVQDLREINKRVQDIHPTVPNPYNLLSSLPPSHTWYSVLDLKDAFFCLKLHPNSQPLFAFEWRDPEKGNTGQLTWTRLPQGFKNSPTLFNEALHRDLAPFRALNPQVVLLQYVDDLLVAAPTYRDCKEGTQKLLQELSKLGYRVSAKKAQLCQKEVTYLGYLLKEGKRWLTPARKATVMKIPPPTTPRQVREFLGKAGFCRLFIPGFASLAAPLYPLTKPSIPFIWTEEHQKAFDRIKEALLSAPALALPDLTKPFTLYVDERAGVARGVLTQTLGPWRRPVAYLSKKLDPVASGWPTCLKAVAAVALLLKDADKLTLGQNVTVIASHSLESIVRQPPDRWMTNARMTHYQSLLLNERVSFAPPAVLNPATLLPVESEATPVHRCSEILAEETGTRRDLKDQPLPGVPAWYTDGSSFIAEGKRRAGAAIVDGKRTVWASSLPEGTSAQKAELVALTQALRLAEGKDINIYTDSRYAFATAHIHGAIYKQRGWLTSAGKDIKNKEEILALLEAIHLPKRVAIIHCPGHQKGNDPVATGNRRADEAAKQAALSTRVLAETTKPAGKRTADGSEFEKRTADGSEFESPKKKAKVE

SEQ ID NO: 914 - protein, 2089 aa, synthetic construct
MPAAKRVKLDGGDKKYSIGLDIGTNSVGWAVITDEYKVPSKKFKVLGNTDRHSIKKNLIGALLFDSGETAEATRLKRTARRRYTRRKNRICYLQEIFSNEMAKVDDSFFHRLEESFLVEEDKKHERHPIFGNIVDEVAYHEKYPTIYHLRKKLVDSTDKADLRLIYLALAHMIKFRGHFLIEGDLNPDNSDVDKLFIQLVQTYNQLFEENPINASGVDAKAILSARLSKSRRLENLIAQLPGEKKNGLFGNLIALSLGLTPNFKSNFDLAEDAKLQLSKDTYDDDLDNLLAQIGDQYADLFLAAKNLSDAILLSDILRVNTEITKAPLSASMIKRYDEHHQDLTLLKALVRQQLPEKYKEIFFDQSKNGYAGYIDGGASQEEFYKFIKPILEKMDGTEELLVKLNREDLLRKQRTFDNGSIPHQIHLGELHAILRRQEDFYPFLKDNREKIEKILTFRIPYYVGPLARGNSRFAWMTRKSEETITPWNFEEVVDKGASAQSFIERMTNFDKNLPNEKVLPKHSLLYEYFTVYNELTKVKYVTEGMRKPAFLSGEQKKAIVDLLFKTNRKVTVKQLKEDYFKKIECFDSVEISGVEDRFNASLGTYHDLLKIIKDKDFLDNEENEDILEDIVLTLTLFEDREMIEERLKTYAHLFDDKVMKQLKRRRYTGWGRLSRKLINGIRDKQSGKTILDFLKSDGFANRNFMQLIHDDSLTFKEDIQKAQVSGQGDSLHEHIANLAGSPAIKKGILQTVKVVDELVKVMGRHKPENIVIEMARENQTTQKGQKNSRERMKRIEEGIKELGSQILKEHPVENTQLQNEKLYLYYLQNGRDMYVDQELDINRLSDYDVDHIVPQSFLKDDSIDNKVLTRSDKARGKSDNVPSEEVVKKMKNYWRQLLNAKLITQRKFDNLTKAERGGLSELDKAGFIKRQLVETRQITKHVAQILDSRMNTKYDENDKLIREVKVITLKSKLVSDFRKDFQFYKVREINNYHHAHDAYLNAVVGTALIKKYPKLESEFVYGDYKVYDVRKMIAKSEQEIGKATAKYFFYSNIMNFFKTEITLANGEIRKRPLIETNGETGEIVWDKGRDFATVRKVLSMPQVNIVKKTEVQTGGFSKESILPKRNSDKLIARKKDWDPKKYGGFDSPTVAYSVLVVAKVEKGKSKKLKSVKELLGITIMERSSFEKNPIDFLEAKGYKEVKKDLIIKLPKYSLFELENGRKRMLASAGELQKGNELALPSKYVNFLYLASHYEKLKGSPEDNEQKQLFVEQHKHYLDEIIEQISEFSKRVILADANLDKVLSAYNKHRDKPIREQAENIIHLFTLTNLGAPAAFKYFDTTIDRKRYTSTKEVLDATLIHQSITGLYETRIDLSQLGGDGGPAPGGGGGVLNLEEEYRLHEKPVPSSIDPSWLQLFPTVWAERAGMGLANQVPPVVVELRSGASPVAVRQYPMSKEAREGIRPHIQRFLDLGVLVPCQSPWNTPLLPVKKPGTNDYRPVQDLREINKRVQDIHPTVPNPYNLLSSLPPSHTWYSVLDLKDAFFCLKLHPNSQPLFAFEWRDPEKGNTGQLTWTRLPQGFKNSPTLFNEALHRDLAPFRALNPQVVLLQYVDDLLVAAPTYRDCKEGTQKLLQELSKLGYRVSAKKAQLCQKEVTYLGYLLKEGKRWLTPARKATVMKIPPPTTPRQVREFLGKAGFCRLFIPGFASLAAPLYPLTKPSIPFIWTEEHQKAFDRIKEALLSAPALALPDLTKPFTLYVDERAGVARGVLTQTLGPWRRPVAYLSKKLDPVASGWPTCLKAVAAVALLLKDADKLTLGQNVTVIASHSLESIVRQPPDRWMTNARMTHYQSLLLNERVSFAPPAVLNPATLLPVESEATPVHRCSEILAEETGTRRDLKDQPLPGVPAWYTDGSSFIAEGKRRAGAAIVDGKRTVWASSLPEGTSAQKAELVALTQALRLAEGKDINIYTDSRYAFATAHIHGAIYKQRGWLTSAGKDIKNKEEILALLEAIHLPKRVAIIHCPGHQKGNDPVATGNRRADEAAKQAALSTRVLAETTKPAGKRTADGSEFEKRTADGSEFESPKKKAKVE

SEQ ID NO: 915 - protein, 2094 aa, synthetic construct
MPAAKRVKLDGGDKKYSIGLDIGTNSVGWAVITDEYKVPSKKFKVLGNTDRHSIKKNLIGALLFDSGETAEATRLKRTARRRYTRRKNRICYLQEIFSNEMAKVDDSFFHRLEESFLVEEDKKHERHPIFGNIVDEVAYHEKYPTIYHLRKKLVDSTDKADLRLIYLALAHMIKFRGHFLIEGDLNPDNSDVDKLFIQLVQTYNQLFEENPINASGVDAKAILSARLSKSRRLENLIAQLPGEKKNGLFGNLIALSLGLTPNFKSNFDLAEDAKLQLSKDTYDDDLDNLLAQIGDQYADLFLAAKNLSDAILLSDILRVNTEITKAPLSASMIKRYDEHHQDLTLLKALVRQQLPEKYKEIFFDQSKNGYAGYIDGGASQEEFYKFIKPILEKMDGTEELLVKLNREDLLRKQRTFDNGSIPHQIHLGELHAILRRQEDFYPFLKDNREKIEKILTFRIPYYVGPLARGNSRFAWMTRKSEETITPWNFEEVVDKGASAQSFIERMTNFDKNLPNEKVLPKHSLLYEYFTVYNELTKVKYVTEGMRKPAFLSGEQKKAIVDLLFKTNRKVTVKQLKEDYFKKIECFDSVEISGVEDRFNASLGTYHDLLKIIKDKDFLDNEENEDILEDIVLTLTLFEDREMIEERLKTYAHLFDDKVMKQLKRRRYTGWGRLSRKLINGIRDKQSGKTILDFLKSDGFANRNFMQLIHDDSLTFKEDIQKAQVSGQGDSLHEHIANLAGSPAIKKGILQTVKVVDELVKVMGRHKPENIVIEMARENQTTQKGQKNSRERMKRIEEGIKELGSQILKEHPVENTQLQNEKLYLYYLQNGRDMYVDQELDINRLSDYDVDHIVPQSFLKDDSIDNKVLTRSDKARGKSDNVPSEEVVKKMKNYWRQLLNAKLITQRKFDNLTKAERGGLSELDKAGFIKRQLVETRQITKHVAQILDSRMNTKYDENDKLIREVKVITLKSKLVSDFRKDFQFYKVREINNYHHAHDAYLNAVVGTALIKKYPKLESEFVYGDYKVYDVRKMIAKSEQEIGKATAKYFFYSNIMNFFKTEITLANGEIRKRPLIETNGETGEIVWDKGRDFATVRKVLSMPQVNIVKKTEVQTGGFSKESILPKRNSDKLIARKKDWDPKKYGGFDSPTVAYSVLVVAKVEKGKSKKLKSVKELLGITIMERSSFEKNPIDFLEAKGYKEVKKDLIIKLPKYSLFELENGRKRMLASAGELQKGNELALPSKYVNFLYLASHYEKLKGSPEDNEQKQLFVEQHKHYLDEIIEQISEFSKRVILADANLDKVLSAYNKHRDKPIREQAENIIHLFTLTNLGAPAAFKYFDTTIDRKRYTSTKEVLDATLIHQSITGLYETRIDLSQLGGDGGGSSGGSEAAAKGGVLNLEEEYRLHEKPVPSSIDPSWLQLFPTVWAERAGMGLANQVPPVVVELRSGASPVAVRQYPMSKEAREGIRPHIQRFLDLGVLVPCQSPWNTPLLPVKKPGTNDYRPVQDLREINKRVQDIHPTVPNPYNLLSSLPPSHTWYSVLDLKDAFFCLKLHPNSQPLFAFEWRDPEKGNTGQLTWTRLPQGFKNSPTLFNEALHRDLAPFRALNPQVVLLQYVDDLLVAAPTYRDCKEGTQKLLQELSKLGYRVSAKKAQLCQKEVTYLGYLLKEGKRWLTPARKATVMKIPPPTTPRQVREFLGKAGFCRLFIPGFASLAAPLYPLTKPSIPFIWTEEHQKAFDRIKEALLSAPALALPDLTKPFTLYVDERAGVARGVLTQTLGPWRRPVAYLSKKLDPVASGWPTCLKAVAAVALLLKDADKLTLGQNVTVIASHSLESIVRQPPDRWMTNARMTHYQSLLLNERVSFAPPAVLNPATLLPVESEATPVHRCSEILAEETGTRRDLKDQPLPGVPAWYTDGSSFIAEGKRRAGAAIVDGKRTVWASSLPEGTSAQKAELVALTQALRLAEGKDINIYTDSRYAFATAHIHGAIYKQRGWLTSAGKDIKNKEEILALLEAIHLPKRVAIIHCPGHQKGNDPVATGNRRADEAAKQAALSTRVLAETTKPAGKRTADGSEFEKRTADGSEFESPKKKAKVE

SEQ ID NO: 916 - protein, 2092 aa, synthetic construct
MPAAKRVKLDGGDKKYSIGLDIGTNSVGWAVITDEYKVPSKKFKVLGNTDRHSIKKNLIGALLFDSGETAEATRLKRTARRRYTRRKNRICYLQEIFSNEMAKVDDSFFHRLEESFLVEEDKKHERHPIFGNIVDEVAYHEKYPTIYHLRKKLVDSTDKADLRLIYLALAHMIKFRGHFLIEGDLNPDNSDVDKLFIQLVQTYNQLFEENPINASGVDAKAILSARLSKSRRLENLIAQLPGEKKNGLFGNLIALSLGLTPNFKSNFDLAEDAKLQLSKDTYDDDLDNLLAQIGDQYADLFLAAKNLSDAILLSDILRVNTEITKAPLSASMIKRYDEHHQDLTLLKALVRQQLPEKYKEIFFDQSKNGYAGYIDGGASQEEFYKFIKPILEKMDGTEELLVKLNREDLLRKQRTFDNGSIPHQIHLGELHAILRRQEDFYPFLKDNREKIEKILTFRIPYYVGPLARGNSRFAWMTRKSEETITPWNFEEVVDKGASAQSFIERMTNFDKNLPNEKVLPKHSLLYEYFTVYNELTKVKYVTEGMRKPAFLSGEQKKAIVDLLFKTNRKVTVKQLKEDYFKKIECFDSVEISGVEDRFNASLGTYHDLLKIIKDKDFLDNEENEDILEDIVLTLTLFEDREMIEERLKTYAHLFDDKVMKQLKRRRYTGWGRLSRKLINGIRDKQSGKTILDFLKSDGFANRNFMQLIHDDSLTFKEDIQKAQVSGQGDSLHEHIANLAGSPAIKKGILQTVKVVDELVKVMGRHKPENIVIEMARENQTTQKGQKNSRERMKRIEEGIKELGSQILKEHPVENTQLQNEKLYLYYLQNGRDMYVDQELDINRLSDYDVDHIVPQSFLKDDSIDNKVLTRSDKARGKSDNVPSEEVVKKMKNYWRQLLNAKLITQRKFDNLTKAERGGLSELDKAGFIKRQLVETRQITKHVAQILDSRMNTKYDENDKLIREVKVITLKSKLVSDFRKDFQFYKVREINNYHHAHDAYLNAVVGTALIKKYPKLESEFVYGDYKVYDVRKMIAKSEQEIGKATAKYFFYSNIMNFFKTEITLANGEIRKRPLIETNGETGEIVWDKGRDFATVRKVLSMPQVNIVKKTEVQTGGFSKESILPKRNSDKLIARKKDWDPKKYGGFDSPTVAYSVLVVAKVEKGKSKKLKSVKELLGITIMERSSFEKNPIDFLEAKGYKEVKKDLIIKLPKYSLFELENGRKRMLASAGELQKGNELALPSKYVNFLYLASHYEKLKGSPEDNEQKQLFVEQHKHYLDEIIEQISEFSKRVILADANLDKVLSAYNKHRDKPIREQAENIIHLFTLTNLGAPAAFKYFDTTIDRKRYTSTKEVLDATLIHQSITGLYETRIDLSQLGGDGGPAPAPAPAPGGVLNLEEEYRLHEKPVPSSIDPSWLQLFPTVWAERAGMGLANQVPPVVVELRSGASPVAVRQYPMSKEAREGIRPHIQRFLDLGVLVPCQSPWNTPLLPVKKPGTNDYRPVQDLREINKRVQDIHPTVPNPYNLLSSLPPSHTWYSVLDLKDAFFCLKLHPNSQPLFAFEWRDPEKGNTGQLTWTRLPQGFKNSPTLFNEALHRDLAPFRALNPQVVLLQYVDDLLVAAPTYRDCKEGTQKLLQELSKLGYRVSAKKAQLCQKEVTYLGYLLKEGKRWLTPARKATVMKIPPPTTPRQVREFLGKAGFCRLFIPGFASLAAPLYPLTKPSIPFIWTEEHQKAFDRIKEALLSAPALALPDLTKPFTLYVDERAGVARGVLTQTLGPWRRPVAYLSKKLDPVASGWPTCLKAVAAVALLLKDADKLTLGQNVTVIASHSLESIVRQPPDRWMTNARMTHYQSLLLNERVSFAPPAVLNPATLLPVESEATPVHRCSEILAEETGTRRDLKDQPLPGVPAWYTDGSSFIAEGKRRAGAAIVDGKRTVWASSLPEGTSAQKAELVALTQALRLAEGKDINIYTDSRYAFATAHIHGAIYKQRGWLTSAGKDIKNKEEILALLEAIHLPKRVAIIHCPGHQKGNDPVATGNRRADEAAKQAALSTRVLAETTKPAGKRTADGSEFEKRTADGSEFESPKKKAKVE

SEQ ID NO: 917 - protein, 2093 aa, synthetic construct
MPAAKRVKLDGGDKKYSIGLDIGTNSVGWAVITDEYKVPSKKFKVLGNTDRHSIKKNLIGALLFDSGETAEATRLKRTARRRYTRRKNRICYLQEIFSNEMAKVDDSFFHRLEESFLVEEDKKHERHPIFGNIVDEVAYHEKYPTIYHLRKKLVDSTDKADLRLIYLALAHMIKFRGHFLIEGDLNPDNSDVDKLFIQLVQTYNQLFEENPINASGVDAKAILSARLSKSRRLENLIAQLPGEKKNGLFGNLIALSLGLTPNFKSNFDLAEDAKLQLSKDTYDDDLDNLLAQIGDQYADLFLAAKNLSDAILLSDILRVNTEITKAPLSASMIKRYDEHHQDLTLLKALVRQQLPEKYKEIFFDQSKNGYAGYIDGGASQEEFYKFIKPILEKMDGTEELLVKLNREDLLRKQRTFDNGSIPHQIHLGELHAILRRQEDFYPFLKDNREKIEKILTFRIPYYVGPLARGNSRFAWMTRKSEETITPWNFEEVVDKGASAQSFIERMTNFDKNLPNEKVLPKHSLLYEYFTVYNELTKVKYVTEGMRKPAFLSGEQKKAIVDLLFKTNRKVTVKQLKEDYFKKIECFDSVEISGVEDRFNASLGTYHDLLKIIKDKDFLDNEENEDILEDIVLTLTLFEDREMIEERLKTYAHLFDDKVMKQLKRRRYTGWGRLSRKLINGIRDKQSGKTILDFLKSDGFANRNFMQLIHDDSLTFKEDIQKAQVSGQGDSLHEHIANLAGSPAIKKGILQTVKVVDELVKVMGRHKPENIVIEMARENQTTQKGQKNSRERMKRIEEGIKELGSQILKEHPVENTQLQNEKLYLYYLQNGRDMYVDQELDINRLSDYDVDHIVPQSFLKDDSIDNKVLTRSDKARGKSDNVPSEEVVKKMKNYWRQLLNAKLITQRKFDNLTKAERGGLSELDKAGFIKRQLVETRQITKHVAQILDSRMNTKYDENDKLIREVKVITLKSKLVSDFRKDFQFYKVREINNYHHAHDAYLNAVVGTALIKKYPKLESEFVYGDYKVYDVRKMIAKSEQEIGKATAKYFFYSNIMNFFKTEITLANGEIRKRPLIETNGETGEIVWDKGRDFATVRKVLSMPQVNIVKKTEVQTGGFSKESILPKRNSDKLIARKKDWDPKKYGGFDSPTVAYSVLVVAKVEKGKSKKLKSVKELLGITIMERSSFEKNPIDFLEAKGYKEVKKDLIIKLPKYSLFELENGRKRMLASAGELQKGNELALPSKYVNFLYLASHYEKLKGSPEDNEQKQLFVEQHKHYLDEIIEQISEFSKRVILADANLDKVLSAYNKHRDKPIREQAENIIHLFTLTNLGAPAAFKYFDTTIDRKRYTSTKEVLDATLIHQSITGLYETRIDLSQLGGDGGEAAAKEAAAKGGVLNLEEEYRLHEKPVPSSIDPSWLQLFPTVWAERAGMGLANQVPPVVVELRSGASPVAVRQYPMSKEAREGIRPHIQRFLDLGVLVPCQSPWNTPLLPVKKPGTNDYRPVQDLREINKRVQDIHPTVPNPYNLLSSLPPSHTWYSVLDLKDAFFCLKLHPNSQPLFAFEWRDPEKGNTGQLTWTRLPQGFKNSPTLFNEALHRDLAPFRALNPQVVLLQYVDDLLVAAPTYRDCKEGTQKLLQELSKLGYRVSAKKAQLCQKEVTYLGYLLKEGKRWLTPARKATVMKIPPPTTPRQVREFLGKAGFCRLFIPGFASLAAPLYPLTKPSIPFIWTEEHQKAFDRIKEALLSAPALALPDLTKPFTLYVDERAGVARGVLTQTLGPWRRPVAYLSKKLDPVASGWPTCLKAVAAVALLLKDADKLTLGQNVTVIASHSLESIVRQPPDRWMTNARMTHYQSLLLNERVSFAPPAVLNPATLLPVESEATPVHRCSEILAEETGTRRDLKDQPLPGVPAWYTDGSSFIAEGKRRAGAAIVDGKRTVWASSLPEGTSAQKAELVALTQALRLAEGKDINIYTDSRYAFATAHIHGAIYKQRGWLTSAGKDIKNKEEILALLEAIHLPKRVAIIHCPGHQKGNDPVATGNRRADEAAKQAALSTRVLAETTKPAGKRTADGSEFEKRTADGSEFESPKKKAKVE

SEQ ID NO: 918 - protein, 2092 aa, synthetic construct
MPAAKRVKLDGGDKKYSIGLDIGTNSVGWAVITDEYKVPSKKFKVLGNTDRHSIKKNLIGALLFDSGETAEATRLKRTARRRYTRRKNRICYLQEIFSNEMAKVDDSFFHRLEESFLVEEDKKHERHPIFGNIVDEVAYHEKYPTIYHLRKKLVDSTDKADLRLIYLALAHMIKFRGHFLIEGDLNPDNSDVDKLFIQLVQTYNQLFEENPINASGVDAKAILSARLSKSRRLENLIAQLPGEKKNGLFGNLIALSLGLTPNFKSNFDLAEDAKLQLSKDTYDDDLDNLLAQIGDQYADLFLAAKNLSDAILLSDILRVNTEITKAPLSASMIKRYDEHHQDLTLLKALVRQQLPEKYKEIFFDQSKNGYAGYIDGGASQEEFYKFIKPILEKMDGTEELLVKLNREDLLRKQRTFDNGSIPHQIHLGELHAILRRQEDFYPFLKDNREKIEKILTFRIPYYVGPLARGNSRFAWMTRKSEETITPWNFEEVVDKGASAQSFIERMTNFDKNLPNEKVLPKHSLLYEYFTVYNELTKVKYVTEGMRKPAFLSGEQKKAIVDLLFKTNRKVTVKQLKEDYFKKIECFDSVEISGVEDRFNASLGTYHDLLKIIKDKDFLDNEENEDILEDIVLTLTLFEDREMIEERLKTYAHLFDDKVMKQLKRRRYTGWGRLSRKLINGIRDKQSGKTILDFLKSDGFANRNFMQLIHDDSLTFKEDIQKAQVSGQGDSLHEHIANLAGSPAIKKGILQTVKVVDELVKVMGRHKPENIVIEMARENQTTQKGQKNSRERMKRIEEGIKELGSQILKEHPVENTQLQNEKLYLYYLQNGRDMYVDQELDINRLSDYDVDHIVPQSFLKDDSIDNKVLTRSDKARGKSDNVPSEEVVKKMKNYWRQLLNAKLITQRKFDNLTKAERGGLSELDKAGFIKRQLVETRQITKHVAQILDSRMNTKYDENDKLIREVKVITLKSKLVSDFRKDFQFYKVREINNYHHAHDAYLNAVVGTALIKKYPKLESEFVYGDYKVYDVRKMIAKSEQEIGKATAKYFFYSNIMNFFKTEITLANGEIRKRPLIETNGETGEIVWDKGRDFATVRKVLSMPQVNIVKKTEVQTGGFSKESILPKRNSDKLIARKKDWDPKKYGGFDSPTVAYSVLVVAKVEKGKSKKLKSVKELLGITIMERSSFEKNPIDFLEAKGYKEVKKDLIIKLPKYSLFELENGRKRMLASAGELQKGNELALPSKYVNFLYLASHYEKLKGSPEDNEQKQLFVEQHKHYLDEIIEQISEFSKRVILADANLDKVLSAYNKHRDKPIREQAENIIHLFTLTNLGAPAAFKYFDTTIDRKRYTSTKEVLDATLIHQSITGLYETRIDLSQLGGDGGGSSGGGGGSGGVLNLEEEYRLHEKPVPSSIDPSWLQLFPTVWAERAGMGLANQVPPVVVELRSGASPVAVRQYPMSKEAREGIRPHIQRFLDLGVLVPCQSPWNTPLLPVKKPGTNDYRPVQDLREINKRVQDIHPTVPNPYNLLSSLPPSHTWYSVLDLKDAFFCLKLHPNSQPLFAFEWRDPEKGNTGQLTWTRLPQGFKNSPTLFNEALHRDLAPFRALNPQVVLLQYVDDLLVAAPTYRDCKEGTQKLLQELSKLGYRVSAKKAQLCQKEVTYLGYLLKEGKRWLTPARKATVMKIPPPTTPRQVREFLGKAGFCRLFIPGFASLAAPLYPLTKPSIPFIWTEEHQKAFDRIKEALLSAPALALPDLTKPFTLYVDERAGVARGVLTQTLGPWRRPVAYLSKKLDPVASGWPTCLKAVAAVALLLKDADKLTLGQNVTVIASHSLESIVRQPPDRWMTNARMTHYQSLLLNERVSFAPPAVLNPATLLPVESEATPVHRCSEILAEETGTRRDLKDQPLPGVPAWYTDGSSFIAEGKRRAGAAIVDGKRTVWASSLPEGTSAQKAELVALTQALRLAEGKDINIYTDSRYAFATAHIHGAIYKQRGWLTSAGKDIKNKEEILALLEAIHLPKRVAIIHCPGHQKGNDPVATGNRRADEAAKQAALSTRVLAETTKPAGKRTADGSEFEKRTADGSEFESPKKKAKVE

SEQ ID NO: 919 - protein, 2094 aa, synthetic construct
MPAAKRVKLDGGDKKYSIGLDIGTNSVGWAVITDEYKVPSKKFKVLGNTDRHSIKKNLIGALLFDSGETAEATRLKRTARRRYTRRKNRICYLQEIFSNEMAKVDDSFFHRLEESFLVEEDKKHERHPIFGNIVDEVAYHEKYPTIYHLRKKLVDSTDKADLRLIYLALAHMIKFRGHFLIEGDLNPDNSDVDKLFIQLVQTYNQLFEENPINASGVDAKAILSARLSKSRRLENLIAQLPGEKKNGLFGNLIALSLGLTPNFKSNFDLAEDAKLQLSKDTYDDDLDNLLAQIGDQYADLFLAAKNLSDAILLSDILRVNTEITKAPLSASMIKRYDEHHQDLTLLKALVRQQLPEKYKEIFFDQSKNGYAGYIDGGASQEEFYKFIKPILEKMDGTEELLVKLNREDLLRKQRTFDNGSIPHQIHLGELHAILRRQEDFYPFLKDNREKIEKILTFRIPYYVGPLARGNSRFAWMTRKSEETITPWNFEEVVDKGASAQSFIERMTNFDKNLPNEKVLPKHSLLYEYFTVYNELTKVKYVTEGMRKPAFLSGEQKKAIVDLLFKTNRKVTVKQLKEDYFKKIECFDSVEISGVEDRFNASLGTYHDLLKIIKDKDFLDNEENEDILEDIVLTLTLFEDREMIEERLKTYAHLFDDKVMKQLKRRRYTGWGRLSRKLINGIRDKQSGKTILDFLKSDGFANRNFMQLIHDDSLTFKEDIQKAQVSGQGDSLHEHIANLAGSPAIKKGILQTVKVVDELVKVMGRHKPENIVIEMARENQTTQKGQKNSRERMKRIEEGIKELGSQILKEHPVENTQLQNEKLYLYYLQNGRDMYVDQELDINRLSDYDVDHIVPQSFLKDDSIDNKVLTRSDKARGKSDNVPSEEVVKKMKNYWRQLLNAKLITQRKFDNLTKAERGGLSELDKAGFIKRQLVETRQITKHVAQILDSRMNTKYDENDKLIREVKVITLKSKLVSDFRKDFQFYKVREINNYHHAHDAYLNAVVGTALIKKYPKLESEFVYGDYKVYDVRKMIAKSEQEIGKATAKYFFYSNIMNFFKTEITLANGEIRKRPLIETNGETGEIVWDKGRDFATVRKVLSMPQVNIVKKTEVQTGGFSKESILPKRNSDKLIARKKDWDPKKYGGFDSPTVAYSVLVVAKVEKGKSKKLKSVKELLGITIMERSSFEKNPIDFLEAKGYKEVKKDLIIKLPKYSLFELENGRKRMLASAGELQKGNELALPSKYVNFLYLASHYEKLKGSPEDNEQKQLFVEQHKHYLDEIIEQISEFSKRVILADANLDKVLSAYNKHRDKPIREQAENIIHLFTLTNLGAPAAFKYFDTTIDRKRYTSTKEVLDATLIHQSITGLYETRIDLSQLGGDGGEAAAKGSSPAPGGVLNLEEEYRLHEKPVPSSIDPSWLQLFPTVWAERAGMGLANQVPPVVVELRSGASPVAVRQYPMSKEAREGIRPHIQRFLDLGVLVPCQSPWNTPLLPVKKPGTNDYRPVQDLREINKRVQDIHPTVPNPYNLLSSLPPSHTWYSVLDLKDAFFCLKLHPNSQPLFAFEWRDPEKGNTGQLTWTRLPQGFKNSPTLFNEALHRDLAPFRALNPQVVLLQYVDDLLVAAPTYRDCKEGTQKLLQELSKLGYRVSAKKAQLCQKEVTYLGYLLKEGKRWLTPARKATVMKIPPPTTPRQVREFLGKAGFCRLFIPGFASLAAPLYPLTKPSIPFIWTEEHQKAFDRIKEALLSAPALALPDLTKPFTLYVDERAGVARGVLTQTLGPWRRPVAYLSKKLDPVASGWPTCLKAVAAVALLLKDADKLTLGQNVTVIASHSLESIVRQPPDRWMTNARMTHYQSLLLNERVSFAPPAVLNPATLLPVESEATPVHRCSEILAEETGTRRDLKDQPLPGVPAWYTDGSSFIAEGKRRAGAAIVDGKRTVWASSLPEGTSAQKAELVALTQALRLAEGKDINIYTDSRYAFATAHIHGAIYKQRGWLTSAGKDIKNKEEILALLEAIHLPKRVAIIHCPGHQKGNDPVATGNRRADEAAKQAALSTRVLAETTKPAGKRTADGSEFEKRTADGSEFESPKKKAKVE

SEQ ID NO: 920 - protein, 2094 aa, synthetic construct
MPAAKRVKLDGGDKKYSIGLDIGTNSVGWAVITDEYKVPSKKFKVLGNTDRHSIKKNLIGALLFDSGETAEATRLKRTARRRYTRRKNRICYLQEIFSNEMAKVDDSFFHRLEESFLVEEDKKHERHPIFGNIVDEVAYHEKYPTIYHLRKKLVDSTDKADLRLIYLALAHMIKFRGHFLIEGDLNPDNSDVDKLFIQLVQTYNQLFEENPINASGVDAKAILSARLSKSRRLENLIAQLPGEKKNGLFGNLIALSLGLTPNFKSNFDLAEDAKLQLSKDTYDDDLDNLLAQIGDQYADLFLAAKNLSDAILLSDILRVNTEITKAPLSASMIKRYDEHHQDLTLLKALVRQQLPEKYKEIFFDQSKNGYAGYIDGGASQEEFYKFIKPILEKMDGTEELLVKLNREDLLRKQRTFDNGSIPHQIHLGELHAILRRQEDFYPFLKDNREKIEKILTFRIPYYVGPLARGNSRFAWMTRKSEETITPWNFEEVVDKGASAQSFIERMTNFDKNLPNEKVLPKHSLLYEYFTVYNELTKVKYVTEGMRKPAFLSGEQKKAIVDLLFKTNRKVTVKQLKEDYFKKIECFDSVEISGVEDRFNASLGTYHDLLKIIKDKDFLDNEENEDILEDIVLTLTLFEDREMIEERLKTYAHLFDDKVMKQLKRRRYTGWGRLSRKLINGIRDKQSGKTILDFLKSDGFANRNFMQLIHDDSLTFKEDIQKAQVSGQGDSLHEHIANLAGSPAIKKGILQTVKVVDELVKVMGRHKPENIVIEMARENQTTQKGQKNSRERMKRIEEGIKELGSQILKEHPVENTQLQNEKLYLYYLQNGRDMYVDQELDINRLSDYDVDHIVPQSFLKDDSIDNKVLTRSDKARGKSDNVPSEEVVKKMKNYWRQLLNAKLITQRKFDNLTKAERGGLSELDKAGFIKRQLVETRQITKHVAQILDSRMNTKYDENDKLIREVKVITLKSKLVSDFRKDFQFYKVREINNYHHAHDAYLNAVVGTALIKKYPKLESEFVYGDYKVYDVRKMIAKSEQEIGKATAKYFFYSNIMNFFKTEITLANGEIRKRPLIETNGETGEIVWDKGRDFATVRKVLSMPQVNIVKKTEVQTGGFSKESILPKRNSDKLIARKKDWDPKKYGGFDSPTVAYSVLVVAKVEKGKSKKLKSVKELLGITIMERSSFEKNPIDFLEAKGYKEVKKDLIIKLPKYSLFELENGRKRMLASAGELQKGNELALPSKYVNFLYLASHYEKLKGSPEDNEQKQLFVEQHKHYLDEIIEQISEFSKRVILADANLDKVLSAYNKHRDKPIREQAENIIHLFTLTNLGAPAAFKYFDTTIDRKRYTSTKEVLDATLIHQSITGLYETRIDLSQLGGDGGGSSGGGEAAAKGGVLNLEEEYRLHEKPVPSSIDPSWLQLFPTVWAERAGMGLANQVPPVVVELRSGASPVAVRQYPMSKEAREGIRPHIQRFLDLGVLVPCQSPWNTPLLPVKKPGTNDYRPVQDLREINKRVQDIHPTVPNPYNLLSSLPPSHTWYSVLDLKDAFFCLKLHPNSQPLFAFEWRDPEKGNTGQLTWTRLPQGFKNSPTLFNEALHRDLAPFRALNPQVVLLQYVDDLLVAAPTYRDCKEGTQKLLQELSKLGYRVSAKKAQLCQKEVTYLGYLLKEGKRWLTPARKATVMKIPPPTTPRQVREFLGKAGFCRLFIPGFASLAAPLYPLTKPSIPFIWTEEHQKAFDRIKEALLSAPALALPDLTKPFTLYVDERAGVARGVLTQTLGPWRRPVAYLSKKLDPVASGWPTCLKAVAAVALLLKDADKLTLGQNVTVIASHSLESIVRQPPDRWMTNARMTHYQSLLLNERVSFAPPAVLNPATLLPVESEATPVHRCSEILAEETGTRRDLKDQPLPGVPAWYTDGSSFIAEGKRRAGAAIVDGKRTVWASSLPEGTSAQKAELVALTQALRLAEGKDINIYTDSRYAFATAHIHGAIYKQRGWLTSAGKDIKNKEEILALLEAIHLPKRVAIIHCPGHQKGNDPVATGNRRADEAAKQAALSTRVLAETTKPAGKRTADGSEFEKRTADGSEFESPKKKAKVE

SEQ ID NO: 921 - protein, 2094 aa, synthetic construct
MPAAKRVKLDGGDKKYSIGLDIGTNSVGWAVITDEYKVPSKKFKVLGNTDRHSIKKNLIGALLFDSGETAEATRLKRTARRRYTRRKNRICYLQEIFSNEMAKVDDSFFHRLEESFLVEEDKKHERHPIFGNIVDEVAYHEKYPTIYHLRKKLVDSTDKADLRLIYLALAHMIKFRGHFLIEGDLNPDNSDVDKLFIQLVQTYNQLFEENPINASGVDAKAILSARLSKSRRLENLIAQLPGEKKNGLFGNLIALSLGLTPNFKSNFDLAEDAKLQLSKDTYDDDLDNLLAQIGDQYADLFLAAKNLSDAILLSDILRVNTEITKAPLSASMIKRYDEHHQDLTLLKALVRQQLPEKYKEIFFDQSKNGYAGYIDGGASQEEFYKFIKPILEKMDGTEELLVKLNREDLLRKQRTFDNGSIPHQIHLGELHAILRRQEDFYPFLKDNREKIEKILTFRIPYYVGPLARGNSRFAWMTRKSEETITPWNFEEVVDKGASAQSFIERMTNFDKNLPNEKVLPKHSLLYEYFTVYNELTKVKYVTEGMRKPAFLSGEQKKAIVDLLFKTNRKVTVKQLKEDYFKKIECFDSVEISGVEDRFNASLGTYHDLLKIIKDKDFLDNEENEDILEDIVLTLTLFEDREMIEERLKTYAHLFDDKVMKQLKRRRYTGWGRLSRKLINGIRDKQSGKTILDFLKSDGFANRNFMQLIHDDSLTFKEDIQKAQVSGQGDSLHEHIANLAGSPAIKKGILQTVKVVDELVKVMGRHKPENIVIEMARENQTTQKGQKNSRERMKRIEEGIKELGSQILKEHPVENTQLQNEKLYLYYLQNGRDMYVDQELDINRLSDYDVDHIVPQSFLKDDSIDNKVLTRSDKARGKSDNVPSEEVVKKMKNYWRQLLNAKLITQRKFDNLTKAERGGLSELDKAGFIKRQLVETRQITKHVAQILDSRMNTKYDENDKLIREVKVITLKSKLVSDFRKDFQFYKVREINNYHHAHDAYLNAVVGTALIKKYPKLESEFVYGDYKVYDVRKMIAKSEQEIGKATAKYFFYSNIMNFFKTEITLANGEIRKRPLIETNGETGEIVWDKGRDFATVRKVLSMPQVNIVKKTEVQTGGFSKESILPKRNSDKLIARKKDWDPKKYGGFDSPTVAYSVLVVAKVEKGKSKKLKSVKELLGITIMERSSFEKNPIDFLEAKGYKEVKKDLIIKLPKYSLFELENGRKRMLASAGELQKGNELALPSKYVNFLYLASHYEKLKGSPEDNEQKQLFVEQHKHYLDEIIEQISEFSKRVILADANLDKVLSAYNKHRDKPIREQAENIIHLFTLTNLGAPAAFKYFDTTIDRKRYTSTKEVLDATLIHQSITGLYETRIDLSQLGGDGGEAAAKPAPGGSGGVLNLEEEYRLHEKPVPSSIDPSWLQLFPTVWAERAGMGLANQVPPVVVELRSGASPVAVRQYPMSKEAREGIRPHIQRFLDLGVLVPCQSPWNTPLLPVKKPGTNDYRPVQDLREINKRVQDIHPTVPNPYNLLSSLPPSHTWYSVLDLKDAFFCLKLHPNSQPLFAFEWRDPEKGNTGQLTWTRLPQGFKNSPTLFNEALHRDLAPFRALNPQVVLLQYVDDLLVAAPTYRDCKEGTQKLLQELSKLGYRVSAKKAQLCQKEVTYLGYLLKEGKRWLTPARKATVMKIPPPTTPRQVREFLGKAGFCRLFIPGFASLAAPLYPLTKPSIPFIWTEEHQKAFDRIKEALLSAPALALPDLTKPFTLYVDERAGVARGVLTQTLGPWRRPVAYLSKKLDPVASGWPTCLKAVAAVALLLKDADKLTLGQNVTVIASHSLESIVRQPPDRWMTNARMTHYQSLLLNERVSFAPPAVLNPATLLPVESEATPVHRCSEILAEETGTRRDLKDQPLPGVPAWYTDGSSFIAEGKRRAGAAIVDGKRTVWASSLPEGTSAQKAELVALTQALRLAEGKDINIYTDSRYAFATAHIHGAIYKQRGWLTSAGKDIKNKEEILALLEAIHLPKRVAIIHCPGHQKGNDPVATGNRRADEAAKQAALSTRVLAETTKPAGKRTADGSEFEKRTADGSEFESPKKKAKVE

SEQ ID NO: 922 - protein, 2092 aa, synthetic construct
MPAAKRVKLDGGDKKYSIGLDIGTNSVGWAVITDEYKVPSKKFKVLGNTDRHSIKKNLIGALLFDSGETAEATRLKRTARRRYTRRKNRICYLQEIFSNEMAKVDDSFFHRLEESFLVEEDKKHERHPIFGNIVDEVAYHEKYPTIYHLRKKLVDSTDKADLRLIYLALAHMIKFRGHFLIEGDLNPDNSDVDKLFIQLVQTYNQLFEENPINASGVDAKAILSARLSKSRRLENLIAQLPGEKKNGLFGNLIALSLGLTPNFKSNFDLAEDAKLQLSKDTYDDDLDNLLAQIGDQYADLFLAAKNLSDAILLSDILRVNTEITKAPLSASMIKRYDEHHQDLTLLKALVRQQLPEKYKEIFFDQSKNGYAGYIDGGASQEEFYKFIKPILEKMDGTEELLVKLNREDLLRKQRTFDNGSIPHQIHLGELHAILRRQEDFYPFLKDNREKIEKILTFRIPYYVGPLARGNSRFAWMTRKSEETITPWNFEEVVDKGASAQSFIERMTNFDKNLPNEKVLPKHSLLYEYFTVYNELTKVKYVTEGMRKPAFLSGEQKKAIVDLLFKTNRKVTVKQLKEDYFKKIECFDSVEISGVEDRFNASLGTYHDLLKIIKDKDFLDNEENEDILEDIVLTLTLFEDREMIEERLKTYAHLFDDKVMKQLKRRRYTGWGRLSRKLINGIRDKQSGKTILDFLKSDGFANRNFMQLIHDDSLTFKEDIQKAQVSGQGDSLHEHIANLAGSPAIKKGILQTVKVVDELVKVMGRHKPENIVIEMARENQTTQKGQKNSRERMKRIEEGIKELGSQILKEHPVENTQLQNEKLYLYYLQNGRDMYVDQELDINRLSDYDVDHIVPQSFLKDDSIDNKVLTRSDKARGKSDNVPSEEVVKKMKNYWRQLLNAKLITQRKFDNLTKAERGGLSELDKAGFIKRQLVETRQITKHVAQILDSRMNTKYDENDKLIREVKVITLKSKLVSDFRKDFQFYKVREINNYHHAHDAYLNAVVGTALIKKYPKLESEFVYGDYKVYDVRKMIAKSEQEIGKATAKYFFYSNIMNFFKTEITLANGEIRKRPLIETNGETGEIVWDKGRDFATVRKVLSMPQVNIVKKTEVQTGGFSKESILPKRNSDKLIARKKDWDPKKYGGFDSPTVAYSVLVVAKVEKGKSKKLKSVKELLGITIMERSSFEKNPIDFLEAKGYKEVKKDLIIKLPKYSLFELENGRKRMLASAGELQKGNELALPSKYVNFLYLASHYEKLKGSPEDNEQKQLFVEQHKHYLDEIIEQISEFSKRVILADANLDKVLSAYNKHRDKPIREQAENIIHLFTLTNLGAPAAFKYFDTTIDRKRYTSTKEVLDATLIHQSITGLYETRIDLSQLGGDGGGSSPAPGGGGGVLNLEEEYRLHEKPVPSSIDPSWLQLFPTVWAERAGMGLANQVPPVVVELRSGASPVAVRQYPMSKEAREGIRPHIQRFLDLGVLVPCQSPWNTPLLPVKKPGTNDYRPVQDLREINKRVQDIHPTVPNPYNLLSSLPPSHTWYSVLDLKDAFFCLKLHPNSQPLFAFEWRDPEKGNTGQLTWTRLPQGFKNSPTLFNEALHRDLAPFRALNPQVVLLQYVDDLLVAAPTYRDCKEGTQKLLQELSKLGYRVSAKKAQLCQKEVTYLGYLLKEGKRWLTPARKATVMKIPPPTTPRQVREFLGKAGFCRLFIPGFASLAAPLYPLTKPSIPFIWTEEHQKAFDRIKEALLSAPALALPDLTKPFTLYVDERAGVARGVLTQTLGPWRRPVAYLSKKLDPVASGWPTCLKAVAAVALLLKDADKLTLGQNVTVIASHSLESIVRQPPDRWMTNARMTHYQSLLLNERVSFAPPAVLNPATLLPVESEATPVHRCSEILAEETGTRRDLKDQPLPGVPAWYTDGSSFIAEGKRRAGAAIVDGKRTVWASSLPEGTSAQKAELVALTQALRLAEGKDINIYTDSRYAFATAHIHGAIYKQRGWLTSAGKDIKNKEEILALLEAIHLPKRVAIIHCPGHQKGNDPVATGNRRADEAAKQAALSTRVLAETTKPAGKRTADGSEFEKRTADGSEFESPKKKAKVE

SEQ ID NO: 923 - protein, 2101 aa, synthetic construct
MPAAKRVKLDGGDKKYSIGLDIGTNSVGWAVITDEYKVPSKKFKVLGNTDRHSIKKNLIGALLFDSGETAEATRLKRTARRRYTRRKNRICYLQEIFSNEMAKVDDSFFHRLEESFLVEEDKKHERHPIFGNIVDEVAYHEKYPTIYHLRKKLVDSTDKADLRLIYLALAHMIKFRGHFLIEGDLNPDNSDVDKLFIQLVQTYNQLFEENPINASGVDAKAILSARLSKSRRLENLIAQLPGEKKNGLFGNLIALSLGLTPNFKSNFDLAEDAKLQLSKDTYDDDLDNLLAQIGDQYADLFLAAKNLSDAILLSDILRVNTEITKAPLSASMIKRYDEHHQDLTLLKALVRQQLPEKYKEIFFDQSKNGYAGYIDGGASQEEFYKFIKPILEKMDGTEELLVKLNREDLLRKQRTFDNGSIPHQIHLGELHAILRRQEDFYPFLKDNREKIEKILTFRIPYYVGPLARGNSRFAWMTRKSEETITPWNFEEVVDKGASAQSFIERMTNFDKNLPNEKVLPKHSLLYEYFTVYNELTKVKYVTEGMRKPAFLSGEQKKAIVDLLFKTNRKVTVKQLKEDYFKKIECFDSVEISGVEDRFNASLGTYHDLLKIIKDKDFLDNEENEDILEDIVLTLTLFEDREMIEERLKTYAHLFDDKVMKQLKRRRYTGWGRLSRKLINGIRDKQSGKTILDFLKSDGFANRNFMQLIHDDSLTFKEDIQKAQVSGQGDSLHEHIANLAGSPAIKKGILQTVKVVDELVKVMGRHKPENIVIEMARENQTTQKGQKNSRERMKRIEEGIKELGSQILKEHPVENTQLQNEKLYLYYLQNGRDMYVDQELDINRLSDYDVDHIVPQSFLKDDSIDNKVLTRSDKARGKSDNVPSEEVVKKMKNYWRQLLNAKLITQRKFDNLTKAERGGLSELDKAGFIKRQLVETRQITKHVAQILDSRMNTKYDENDKLIREVKVITLKSKLVSDFRKDFQFYKVREINNYHHAHDAYLNAVVGTALIKKYPKLESEFVYGDYKVYDVRKMIAKSEQEIGKATAKYFFYSNIMNFFKTEITLANGEIRKRPLIETNGETGEIVWDKGRDFATVRKVLSMPQVNIVKKTEVQTGGFSKESILPKRNSDKLIARKKDWDPKKYGGFDSPTVAYSVLVVAKVEKGKSKKLKSVKELLGITIMERSSFEKNPIDFLEAKGYKEVKKDLIIKLPKYSLFELENGRKRMLASAGELQKGNELALPSKYVNFLYLASHYEKLKGSPEDNEQKQLFVEQHKHYLDEIIEQISEFSKRVILADANLDKVLSAYNKHRDKPIREQAENIIHLFTLTNLGAPAAFKYFDTTIDRKRYTSTKEVLDATLIHQSITGLYETRIDLSQLGGDGGGSSGSSGSSGSSGSSGSSGGVLNLEEEYRLHEKPVPSSIDPSWLQLFPTVWAERAGMGLANQVPPVVVELRSGASPVAVRQYPMSKEAREGIRPHIQRFLDLGVLVPCQSPWNTPLLPVKKPGTNDYRPVQDLREINKRVQDIHPTVPNPYNLLSSLPPSHTWYSVLDLKDAFFCLKLHPNSQPLFAFEWRDPEKGNTGQLTWTRLPQGFKNSPTLFNEALHRDLAPFRALNPQVVLLQYVDDLLVAAPTYRDCKEGTQKLLQELSKLGYRVSAKKAQLCQKEVTYLGYLLKEGKRWLTPARKATVMKIPPPTTPRQVREFLGKAGFCRLFIPGFASLAAPLYPLTKPSIPFIWTEEHQKAFDRIKEALLSAPALALPDLTKPFTLYVDERAGVARGVLTQTLGPWRRPVAYLSKKLDPVASGWPTCLKAVAAVALLLKDADKLTLGQNVTVIASHSLESIVRQPPDRWMTNARMTHYQSLLLNERVSFAPPAVLNPATLLPVESEATPVHRCSEILAEETGTRRDLKDQPLPGVPAWYTDGSSFIAEGKRRAGAAIVDGKRTVWASSLPEGTSAQKAELVALTQALRLAEGKDINIYTDSRYAFATAHIHGAIYKQRGWLTSAGKDIKNKEEILALLEAIHLPKRVAIIHCPGHQKGNDPVATGNRRADEAAKQAALSTRVLAETTKPAGKRTADGSEFEKRTADGSEFESPKKKAKVE

SEQ ID NO: 924 - protein, 2092 aa, synthetic construct
MPAAKRVKLDGGDKKYSIGLDIGTNSVGWAVITDEYKVPSKKFKVLGNTDRHSIKKNLIGALLFDSGETAEATRLKRTARRRYTRRKNRICYLQEIFSNEMAKVDDSFFHRLEESFLVEEDKKHERHPIFGNIVDEVAYHEKYPTIYHLRKKLVDSTDKADLRLIYLALAHMIKFRGHFLIEGDLNPDNSDVDKLFIQLVQTYNQLFEENPINASGVDAKAILSARLSKSRRLENLIAQLPGEKKNGLFGNLIALSLGLTPNFKSNFDLAEDAKLQLSKDTYDDDLDNLLAQIGDQYADLFLAAKNLSDAILLSDILRVNTEITKAPLSASMIKRYDEHHQDLTLLKALVRQQLPEKYKEIFFDQSKNGYAGYIDGGASQEEFYKFIKPILEKMDGTEELLVKLNREDLLRKQRTFDNGSIPHQIHLGELHAILRRQEDFYPFLKDNREKIEKILTFRIPYYVGPLARGNSRFAWMTRKSEETITPWNFEEVVDKGASAQSFIERMTNFDKNLPNEKVLPKHSLLYEYFTVYNELTKVKYVTEGMRKPAFLSGEQKKAIVDLLFKTNRKVTVKQLKEDYFKKIECFDSVEISGVEDRFNASLGTYHDLLKIIKDKDFLDNEENEDILEDIVLTLTLFEDREMIEERLKTYAHLFDDKVMKQLKRRRYTGWGRLSRKLINGIRDKQSGKTILDFLKSDGFANRNFMQLIHDDSLTFKEDIQKAQVSGQGDSLHEHIANLAGSPAIKKGILQTVKVVDELVKVMGRHKPENIVIEMARENQTTQKGQKNSRERMKRIEEGIKELGSQILKEHPVENTQLQNEKLYLYYLQNGRDMYVDQELDINRLSDYDVDHIVPQSFLKDDSIDNKVLTRSDKARGKSDNVPSEEVVKKMKNYWRQLLNAKLITQRKFDNLTKAERGGLSELDKAGFIKRQLVETRQITKHVAQILDSRMNTKYDENDKLIREVKVITLKSKLVSDFRKDFQFYKVREINNYHHAHDAYLNAVVGTALIKKYPKLESEFVYGDYKVYDVRKMIAKSEQEIGKATAKYFFYSNIMNFFKTEITLANGEIRKRPLIETNGETGEIVWDKGRDFATVRKVLSMPQVNIVKKTEVQTGGFSKESILPKRNSDKLIARKKDWDPKKYGGFDSPTVAYSVLVVAKVEKGKSKKLKSVKELLGITIMERSSFEKNPIDFLEAKGYKEVKKDLIIKLPKYSLFELENGRKRMLASAGELQKGNELALPSKYVNFLYLASHYEKLKGSPEDNEQKQLFVEQHKHYLDEIIEQISEFSKRVILADANLDKVLSAYNKHRDKPIREQAENIIHLFTLTNLGAPAAFKYFDTTIDRKRYTSTKEVLDATLIHQSITGLYETRIDLSQLGGDGGGGSGSSPAPGGVLNLEEEYRLHEKPVPSSIDPSWLQLFPTVWAERAGMGLANQVPPVVVELRSGASPVAVRQYPMSKEAREGIRPHIQRFLDLGVLVPCQSPWNTPLLPVKKPGTNDYRPVQDLREINKRVQDIHPTVPNPYNLLSSLPPSHTWYSVLDLKDAFFCLKLHPNSQPLFAFEWRDPEKGNTGQLTWTRLPQGFKNSPTLFNEALHRDLAPFRALNPQVVLLQYVDDLLVAAPTYRDCKEGTQKLLQELSKLGYRVSAKKAQLCQKEVTYLGYLLKEGKRWLTPARKATVMKIPPPTTPRQVREFLGKAGFCRLFIPGFASLAAPLYPLTKPSIPFIWTEEHQKAFDRIKEALLSAPALALPDLTKPFTLYVDERAGVARGVLTQTLGPWRRPVAYLSKKLDPVASGWPTCLKAVAAVALLLKDADKLTLGQNVTVIASHSLESIVRQPPDRWMTNARMTHYQSLLLNERVSFAPPAVLNPATLLPVESEATPVHRCSEILAEETGTRRDLKDQPLPGVPAWYTDGSSFIAEGKRRAGAAIVDGKRTVWASSLPEGTSAQKAELVALTQALRLAEGKDINIYTDSRYAFATAHIHGAIYKQRGWLTSAGKDIKNKEEILALLEAIHLPKRVAIIHCPGHQKGNDPVATGNRRADEAAKQAALSTRVLAETTKPAGKRTADGSEFEKRTADGSEFESPKKKAKVE

SEQ ID NO: 925 - protein, 2094 aa, synthetic construct
MPAAKRVKLDGGDKKYSIGLDIGTNSVGWAVITDEYKVPSKKFKVLGNTDRHSIKKNLIGALLFDSGETAEATRLKRTARRRYTRRKNRICYLQEIFSNEMAKVDDSFFHRLEESFLVEEDKKHERHPIFGNIVDEVAYHEKYPTIYHLRKKLVDSTDKADLRLIYLALAHMIKFRGHFLIEGDLNPDNSDVDKLFIQLVQTYNQLFEENPINASGVDAKAILSARLSKSRRLENLIAQLPGEKKNGLFGNLIALSLGLTPNFKSNFDLAEDAKLQLSKDTYDDDLDNLLAQIGDQYADLFLAAKNLSDAILLSDILRVNTEITKAPLSASMIKRYDEHHQDLTLLKALVRQQLPEKYKEIFFDQSKNGYAGYIDGGASQEEFYKFIKPILEKMDGTEELLVKLNREDLLRKQRTFDNGSIPHQIHLGELHAILRRQEDFYPFLKDNREKIEKILTFRIPYYVGPLARGNSRFAWMTRKSEETITPWNFEEVVDKGASAQSFIERMTNFDKNLPNEKVLPKHSLLYEYFTVYNELTKVKYVTEGMRKPAFLSGEQKKAIVDLLFKTNRKVTVKQLKEDYFKKIECFDSVEISGVEDRFNASLGTYHDLLKIIKDKDFLDNEENEDILEDIVLTLTLFEDREMIEERLKTYAHLFDDKVMKQLKRRRYTGWGRLSRKLINGIRDKQSGKTILDFLKSDGFANRNFMQLIHDDSLTFKEDIQKAQVSGQGDSLHEHIANLAGSPAIKKGILQTVKVVDELVKVMGRHKPENIVIEMARENQTTQKGQKNSRERMKRIEEGIKELGSQILKEHPVENTQLQNEKLYLYYLQNGRDMYVDQELDINRLSDYDVDHIVPQSFLKDDSIDNKVLTRSDKARGKSDNVPSEEVVKKMKNYWRQLLNAKLITQRKFDNLTKAERGGLSELDKAGFIKRQLVETRQITKHVAQILDSRMNTKYDENDKLIREVKVITLKSKLVSDFRKDFQFYKVREINNYHHAHDAYLNAVVGTALIKKYPKLESEFVYGDYKVYDVRKMIAKSEQEIGKATAKYFFYSNIMNFFKTEITLANGEIRKRPLIETNGETGEIVWDKGRDFATVRKVLSMPQVNIVKKTEVQTGGFSKESILPKRNSDKLIARKKDWDPKKYGGFDSPTVAYSVLVVAKVEKGKSKKLKSVKELLGITIMERSSFEKNPIDFLEAKGYKEVKKDLIIKLPKYSLFELENGRKRMLASAGELQKGNELALPSKYVNFLYLASHYEKLKGSPEDNEQKQLFVEQHKHYLDEIIEQISEFSKRVILADANLDKVLSAYNKHRDKPIREQAENIIHLFTLTNLGAPAAFKYFDTTIDRKRYTSTKEVLDATLIHQSITGLYETRIDLSQLGGDGGGGGEAAAKGSSGGVLNLEEEYRLHEKPVPSSIDPSWLQLFPTVWAERAGMGLANQVPPVVVELRSGASPVAVRQYPMSKEAREGIRPHIQRFLDLGVLVPCQSPWNTPLLPVKKPGTNDYRPVQDLREINKRVQDIHPTVPNPYNLLSSLPPSHTWYSVLDLKDAFFCLKLHPNSQPLFAFEWRDPEKGNTGQLTWTRLPQGFKNSPTLFNEALHRDLAPFRALNPQVVLLQYVDDLLVAAPTYRDCKEGTQKLLQELSKLGYRVSAKKAQLCQKEVTYLGYLLKEGKRWLTPARKATVMKIPPPTTPRQVREFLGKAGFCRLFIPGFASLAAPLYPLTKPSIPFIWTEEHQKAFDRIKEALLSAPALALPDLTKPFTLYVDERAGVARGVLTQTLGPWRRPVAYLSKKLDPVASGWPTCLKAVAAVALLLKDADKLTLGQNVTVIASHSLESIVRQPPDRWMTNARMTHYQSLLLNERVSFAPPAVLNPATLLPVESEATPVHRCSEILAEETGTRRDLKDQPLPGVPAWYTDGSSFIAEGKRRAGAAIVDGKRTVWASSLPEGTSAQKAELVALTQALRLAEGKDINIYTDSRYAFATAHIHGAIYKQRGWLTSAGKDIKNKEEILALLEAIHLPKRVAIIHCPGHQKGNDPVATGNRRADEAAKQAALSTRVLAETTKPAGKRTADGSEFEKRTADGSEFESPKKKAKVE

SEQ ID NO: 926 - protein, 2087 aa, synthetic construct
MPAAKRVKLDGGDKKYSIGLDIGTNSVGWAVITDEYKVPSKKFKVLGNTDRHSIKKNLIGALLFDSGETAEATRLKRTARRRYTRRKNRICYLQEIFSNEMAKVDDSFFHRLEESFLVEEDKKHERHPIFGNIVDEVAYHEKYPTIYHLRKKLVDSTDKADLRLIYLALAHMIKFRGHFLIEGDLNPDNSDVDKLFIQLVQTYNQLFEENPINASGVDAKAILSARLSKSRRLENLIAQLPGEKKNGLFGNLIALSLGLTPNFKSNFDLAEDAKLQLSKDTYDDDLDNLLAQIGDQYADLFLAAKNLSDAILLSDILRVNTEITKAPLSASMIKRYDEHHQDLTLLKALVRQQLPEKYKEIFFDQSKNGYAGYIDGGASQEEFYKFIKPILEKMDGTEELLVKLNREDLLRKQRTFDNGSIPHQIHLGELHAILRRQEDFYPFLKDNREKIEKILTFRIPYYVGPLARGNSRFAWMTRKSEETITPWNFEEVVDKGASAQSFIERMTNFDKNLPNEKVLPKHSLLYEYFTVYNELTKVKYVTEGMRKPAFLSGEQKKAIVDLLFKTNRKVTVKQLKEDYFKKIECFDSVEISGVEDRFNASLGTYHDLLKIIKDKDFLDNEENEDILEDIVLTLTLFEDREMIEERLKTYAHLFDDKVMKQLKRRRYTGWGRLSRKLINGIRDKQSGKTILDFLKSDGFANRNFMQLIHDDSLTFKEDIQKAQVSGQGDSLHEHIANLAGSPAIKKGILQTVKVVDELVKVMGRHKPENIVIEMARENQTTQKGQKNSRERMKRIEEGIKELGSQILKEHPVENTQLQNEKLYLYYLQNGRDMYVDQELDINRLSDYDVDHIVPQSFLKDDSIDNKVLTRSDKARGKSDNVPSEEVVKKMKNYWRQLLNAKLITQRKFDNLTKAERGGLSELDKAGFIKRQLVETRQITKHVAQILDSRMNTKYDENDKLIREVKVITLKSKLVSDFRKDFQFYKVREINNYHHAHDAYLNAVVGTALIKKYPKLESEFVYGDYKVYDVRKMIAKSEQEIGKATAKYFFYSNIMNFFKTEITLANGEIRKRPLIETNGETGEIVWDKGRDFATVRKVLSMPQVNIVKKTEVQTGGFSKESILPKRNSDKLIARKKDWDPKKYGGFDSPTVAYSVLVVAKVEKGKSKKLKSVKELLGITIMERSSFEKNPIDFLEAKGYKEVKKDLIIKLPKYSLFELENGRKRMLASAGELQKGNELALPSKYVNFLYLASHYEKLKGSPEDNEQKQLFVEQHKHYLDEIIEQISEFSKRVILADANLDKVLSAYNKHRDKPIREQAENIIHLFTLTNLGAPAAFKYFDTTIDRKRYTSTKEVLDATLIHQSITGLYETRIDLSQLGGDGGGGGGGGVLNLEEEYRLHEKPVPSSIDPSWLQLFPTVWAERAGMGLANQVPPVVVELRSGASPVAVRQYPMSKEAREGIRPHIQRFLDLGVLVPCQSPWNTPLLPVKKPGTNDYRPVQDLREINKRVQDIHPTVPNPYNLLSSLPPSHTWYSVLDLKDAFFCLKLHPNSQPLFAFEWRDPEKGNTGQLTWTRLPQGFKNSPTLFNEALHRDLAPFRALNPQVVLLQYVDDLLVAAPTYRDCKEGTQKLLQELSKLGYRVSAKKAQLCQKEVTYLGYLLKEGKRWLTPARKATVMKIPPPTTPRQVREFLGKAGFCRLFIPGFASLAAPLYPLTKPSIPFIWTEEHQKAFDRIKEALLSAPALALPDLTKPFTLYVDERAGVARGVLTQTLGPWRRPVAYLSKKLDPVASGWPTCLKAVAAVALLLKDADKLTLGQNVTVIASHSLESIVRQPPDRWMTNARMTHYQSLLLNERVSFAPPAVLNPATLLPVESEATPVHRCSEILAEETGTRRDLKDQPLPGVPAWYTDGSSFIAEGKRRAGAAIVDGKRTVWASSLPEGTSAQKAELVALTQALRLAEGKDINIYTDSRYAFATAHIHGAIYKQRGWLTSAGKDIKNKEEILALLEAIHLPKRVAIIHCPGHQKGNDPVATGNRRADEAAKQAALSTRVLAETTKPAGKRTADGSEFEKRTADGSEFESPKKKAKVE

SEQ ID NO: 927 - protein, 2092 aa, synthetic construct
MPAAKRVKLDGGDKKYSIGLDIGTNSVGWAVITDEYKVPSKKFKVLGNTDRHSIKKNLIGALLFDSGETAEATRLKRTARRRYTRRKNRICYLQEIFSNEMAKVDDSFFHRLEESFLVEEDKKHERHPIFGNIVDEVAYHEKYPTIYHLRKKLVDSTDKADLRLIYLALAHMIKFRGHFLIEGDLNPDNSDVDKLFIQLVQTYNQLFEENPINASGVDAKAILSARLSKSRRLENLIAQLPGEKKNGLFGNLIALSLGLTPNFKSNFDLAEDAKLQLSKDTYDDDLDNLLAQIGDQYADLFLAAKNLSDAILLSDILRVNTEITKAPLSASMIKRYDEHHQDLTLLKALVRQQLPEKYKEIFFDQSKNGYAGYIDGGASQEEFYKFIKPILEKMDGTEELLVKLNREDLLRKQRTFDNGSIPHQIHLGELHAILRRQEDFYPFLKDNREKIEKILTFRIPYYVGPLARGNSRFAWMTRKSEETITPWNFEEVVDKGASAQSFIERMTNFDKNLPNEKVLPKHSLLYEYFTVYNELTKVKYVTEGMRKPAFLSGEQKKAIVDLLFKTNRKVTVKQLKEDYFKKIECFDSVEISGVEDRFNASLGTYHDLLKIIKDKDFLDNEENEDILEDIVLTLTLFEDREMIEERLKTYAHLFDDKVMKQLKRRRYTGWGRLSRKLINGIRDKQSGKTILDFLKSDGFANRNFMQLIHDDSLTFKEDIQKAQVSGQGDSLHEHIANLAGSPAIKKGILQTVKVVDELVKVMGRHKPENIVIEMARENQTTQKGQKNSRERMKRIEEGIKELGSQILKEHPVENTQLQNEKLYLYYLQNGRDMYVDQELDINRLSDYDVDHIVPQSFLKDDSIDNKVLTRSDKARGKSDNVPSEEVVKKMKNYWRQLLNAKLITQRKFDNLTKAERGGLSELDKAGFIKRQLVETRQITKHVAQILDSRMNTKYDENDKLIREVKVITLKSKLVSDFRKDFQFYKVREINNYHHAHDAYLNAVVGTALIKKYPKLESEFVYGDYKVYDVRKMIAKSEQEIGKATAKYFFYSNIMNFFKTEITLANGEIRKRPLIETNGETGEIVWDKGRDFATVRKVLSMPQVNIVKKTEVQTGGFSKESILPKRNSDKLIARKKDWDPKKYGGFDSPTVAYSVLVVAKVEKGKSKKLKSVKELLGITIMERSSFEKNPIDFLEAKGYKEVKKDLIIKLPKYSLFELENGRKRMLASAGELQKGNELALPSKYVNFLYLASHYEKLKGSPEDNEQKQLFVEQHKHYLDEIIEQISEFSKRVILADANLDKVLSAYNKHRDKPIREQAENIIHLFTLTNLGAPAAFKYFDTTIDRKRYTSTKEVLDATLIHQSITGLYETRIDLSQLGGDGGPAPGSSGGGGGVLNLEEEYRLHEKPVPSSIDPSWLQLFPTVWAERAGMGLANQVPPVVVELRSGASPVAVRQYPMSKEAREGIRPHIQRFLDLGVLVPCQSPWNTPLLPVKKPGTNDYRPVQDLREINKRVQDIHPTVPNPYNLLSSLPPSHTWYSVLDLKDAFFCLKLHPNSQPLFAFEWRDPEKGNTGQLTWTRLPQGFKNSPTLFNEALHRDLAPFRALNPQVVLLQYVDDLLVAAPTYRDCKEGTQKLLQELSKLGYRVSAKKAQLCQKEVTYLGYLLKEGKRWLTPARKATVMKIPPPTTPRQVREFLGKAGFCRLFIPGFASLAAPLYPLTKPSIPFIWTEEHQKAFDRIKEALLSAPALALPDLTKPFTLYVDERAGVARGVLTQTLGPWRRPVAYLSKKLDPVASGWPTCLKAVAAVALLLKDADKLTLGQNVTVIASHSLESIVRQPPDRWMTNARMTHYQSLLLNERVSFAPPAVLNPATLLPVESEATPVHRCSEILAEETGTRRDLKDQPLPGVPAWYTDGSSFIAEGKRRAGAAIVDGKRTVWASSLPEGTSAQKAELVALTQALRLAEGKDINIYTDSRYAFATAHIHGAIYKQRGWLTSAGKDIKNKEEILALLEAIHLPKRVAIIHCPGHQKGNDPVATGNRRADEAAKQAALSTRVLAETTKPAGKRTADGSEFEKRTADGSEFESPKKKAKVE

SEQ ID NO: 928 - protein, 2094 aa, synthetic construct
MPAAKRVKLDGGDKKYSIGLDIGTNSVGWAVITDEYKVPSKKFKVLGNTDRHSIKKNLIGALLFDSGETAEATRLKRTARRRYTRRKNRICYLQEIFSNEMAKVDDSFFHRLEESFLVEEDKKHERHPIFGNIVDEVAYHEKYPTIYHLRKKLVDSTDKADLRLIYLALAHMIKFRGHFLIEGDLNPDNSDVDKLFIQLVQTYNQLFEENPINASGVDAKAILSARLSKSRRLENLIAQLPGEKKNGLFGNLIALSLGLTPNFKSNFDLAEDAKLQLSKDTYDDDLDNLLAQIGDQYADLFLAAKNLSDAILLSDILRVNTEITKAPLSASMIKRYDEHHQDLTLLKALVRQQLPEKYKEIFFDQSKNGYAGYIDGGASQEEFYKFIKPILEKMDGTEELLVKLNREDLLRKQRTFDNGSIPHQIHLGELHAILRRQEDFYPFLKDNREKIEKILTFRIPYYVGPLARGNSRFAWMTRKSEETITPWNFEEVVDKGASAQSFIERMTNFDKNLPNEKVLPKHSLLYEYFTVYNELTKVKYVTEGMRKPAFLSGEQKKAIVDLLFKTNRKVTVKQLKEDYFKKIECFDSVEISGVEDRFNASLGTYHDLLKIIKDKDFLDNEENEDILEDIVLTLTLFEDREMIEERLKTYAHLFDDKVMKQLKRRRYTGWGRLSRKLINGIRDKQSGKTILDFLKSDGFANRNFMQLIHDDSLTFKEDIQKAQVSGQGDSLHEHIANLAGSPAIKKGILQTVKVVDELVKVMGRHKPENIVIEMARENQTTQKGQKNSRERMKRIEEGIKELGSQILKEHPVENTQLQNEKLYLYYLQNGRDMYVDQELDINRLSDYDVDHIVPQSFLKDDSIDNKVLTRSDKARGKSDNVPSEEVVKKMKNYWRQLLNAKLITQRKFDNLTKAERGGLSELDKAGFIKRQLVETRQITKHVAQILDSRMNTKYDENDKLIREVKVITLKSKLVSDFRKDFQFYKVREINNYHHAHDAYLNAVVGTALIKKYPKLESEFVYGDYKVYDVRKMIAKSEQEIGKATAKYFFYSNIMNFFKTEITLANGEIRKRPLIETNGETGEIVWDKGRDFATVRKVLSMPQVNIVKKTEVQTGGFSKESILPKRNSDKLIARKKDWDPKKYGGFDSPTVAYSVLVVAKVEKGKSKKLKSVKELLGITIMERSSFEKNPIDFLEAKGYKEVKKDLIIKLPKYSLFELENGRKRMLASAGELQKGNELALPSKYVNFLYLASHYEKLKGSPEDNEQKQLFVEQHKHYLDEIIEQISEFSKRVILADANLDKVLSAYNKHRDKPIREQAENIIHLFTLTNLGAPAAFKYFDTTIDRKRYTSTKEVLDATLIHQSITGLYETRIDLSQLGGDGGGGGEAAAKPAPGGVLNLEEEYRLHEKPVPSSIDPSWLQLFPTVWAERAGMGLANQVPPVVVELRSGASPVAVRQYPMSKEAREGIRPHIQRFLDLGVLVPCQSPWNTPLLPVKKPGTNDYRPVQDLREINKRVQDIHPTVPNPYNLLSSLPPSHTWYSVLDLKDAFFCLKLHPNSQPLFAFEWRDPEKGNTGQLTWTRLPQGFKNSPTLFNEALHRDLAPFRALNPQVVLLQYVDDLLVAAPTYRDCKEGTQKLLQELSKLGYRVSAKKAQLCQKEVTYLGYLLKEGKRWLTPARKATVMKIPPPTTPRQVREFLGKAGFCRLFIPGFASLAAPLYPLTKPSIPFIWTEEHQKAFDRIKEALLSAPALALPDLTKPFTLYVDERAGVARGVLTQTLGPWRRPVAYLSKKLDPVASGWPTCLKAVAAVALLLKDADKLTLGQNVTVIASHSLESIVRQPPDRWMTNARMTHYQSLLLNERVSFAPPAVLNPATLLPVESEATPVHRCSEILAEETGTRRDLKDQPLPGVPAWYTDGSSFIAEGKRRAGAAIVDGKRTVWASSLPEGTSAQKAELVALTQALRLAEGKDINIYTDSRYAFATAHIHGAIYKQRGWLTSAGKDIKNKEEILALLEAIHLPKRVAIIHCPGHQKGNDPVATGNRRADEAAKQAALSTRVLAETTKPAGKRTADGSEFEKRTADGSEFESPKKKAKVE

SEQ ID NO: 929 - protein, 2092 aa, synthetic construct
MPAAKRVKLDGGDKKYSIGLDIGTNSVGWAVITDEYKVPSKKFKVLGNTDRHSIKKNLIGALLFDSGETAEATRLKRTARRRYTRRKNRICYLQEIFSNEMAKVDDSFFHRLEESFLVEEDKKHERHPIFGNIVDEVAYHEKYPTIYHLRKKLVDSTDKADLRLIYLALAHMIKFRGHFLIEGDLNPDNSDVDKLFIQLVQTYNQLFEENPINASGVDAKAILSARLSKSRRLENLIAQLPGEKKNGLFGNLIALSLGLTPNFKSNFDLAEDAKLQLSKDTYDDDLDNLLAQIGDQYADLFLAAKNLSDAILLSDILRVNTEITKAPLSASMIKRYDEHHQDLTLLKALVRQQLPEKYKEIFFDQSKNGYAGYIDGGASQEEFYKFIKPILEKMDGTEELLVKLNREDLLRKQRTFDNGSIPHQIHLGELHAILRRQEDFYPFLKDNREKIEKILTFRIPYYVGPLARGNSRFAWMTRKSEETITPWNFEEVVDKGASAQSFIERMTNFDKNLPNEKVLPKHSLLYEYFTVYNELTKVKYVTEGMRKPAFLSGEQKKAIVDLLFKTNRKVTVKQLKEDYFKKIECFDSVEISGVEDRFNASLGTYHDLLKIIKDKDFLDNEENEDILEDIVLTLTLFEDREMIEERLKTYAHLFDDKVMKQLKRRRYTGWGRLSRKLINGIRDKQSGKTILDFLKSDGFANRNFMQLIHDDSLTFKEDIQKAQVSGQGDSLHEHIANLAGSPAIKKGILQTVKVVDELVKVMGRHKPENIVIEMARENQTTQKGQKNSRERMKRIEEGIKELGSQILKEHPVENTQLQNEKLYLYYLQNGRDMYVDQELDINRLSDYDVDHIVPQSFLKDDSIDNKVLTRSDKARGKSDNVPSEEVVKKMKNYWRQLLNAKLITQRKFDNLTKAERGGLSELDKAGFIKRQLVETRQITKHVAQILDSRMNTKYDENDKLIREVKVITLKSKLVSDFRKDFQFYKVREINNYHHAHDAYLNAVVGTALIKKYPKLESEFVYGDYKVYDVRKMIAKSEQEIGKATAKYFFYSNIMNFFKTEITLANGEIRKRPLIETNGETGEIVWDKGRDFATVRKVLSMPQVNIVKKTEVQTGGFSKESILPKRNSDKLIARKKDWDPKKYGGFDSPTVAYSVLVVAKVEKGKSKKLKSVKELLGITIMERSSFEKNPIDFLEAKGYKEVKKDLIIKLPKYSLFELENGRKRMLASAGELQKGNELALPSKYVNFLYLASHYEKLKGSPEDNEQKQLFVEQHKHYLDEIIEQISEFSKRVILADANLDKVLSAYNKHRDKPIREQAENIIHLFTLTNLGAPAAFKYFDTTIDRKRYTSTKEVLDATLIHQSITGLYETRIDLSQLGGDGGGSSGSSGSSGGVLNLEEEYRLHEKPVPSSIDPSWLQLFPTVWAERAGMGLANQVPPVVVELRSGASPVAVRQYPMSKEAREGIRPHIQRFLDLGVLVPCQSPWNTPLLPVKKPGTNDYRPVQDLREINKRVQDIHPTVPNPYNLLSSLPPSHTWYSVLDLKDAFFCLKLHPNSQPLFAFEWRDPEKGNTGQLTWTRLPQGFKNSPTLFNEALHRDLAPFRALNPQVVLLQYVDDLLVAAPTYRDCKEGTQKLLQELSKLGYRVSAKKAQLCQKEVTYLGYLLKEGKRWLTPARKATVMKIPPPTTPRQVREFLGKAGFCRLFIPGFASLAAPLYPLTKPSIPFIWTEEHQKAFDRIKEALLSAPALALPDLTKPFTLYVDERAGVARGVLTQTLGPWRRPVAYLSKKLDPVASGWPTCLKAVAAVALLLKDADKLTLGQNVTVIASHSLESIVRQPPDRWMTNARMTHYQSLLLNERVSFAPPAVLNPATLLPVESEATPVHRCSEILAEETGTRRDLKDQPLPGVPAWYTDGSSFIAEGKRRAGAAIVDGKRTVWASSLPEGTSAQKAELVALTQALRLAEGKDINIYTDSRYAFATAHIHGAIYKQRGWLTSAGKDIKNKEEILALLEAIHLPKRVAIIHCPGHQKGNDPVATGNRRADEAAKQAALSTRVLAETTKPAGKRTADGSEFEKRTADGSEFESPKKKAKVE

SEQ ID NO: 930 - protein, 2092 aa, synthetic construct
MPAAKRVKLDGGDKKYSIGLDIGTNSVGWAVITDEYKVPSKKFKVLGNTDRHSIKKNLIGALLFDSGETAEATRLKRTARRRYTRRKNRICYLQEIFSNEMAKVDDSFFHRLEESFLVEEDKKHERHPIFGNIVDEVAYHEKYPTIYHLRKKLVDSTDKADLRLIYLALAHMIKFRGHFLIEGDLNPDNSDVDKLFIQLVQTYNQLFEENPINASGVDAKAILSARLSKSRRLENLIAQLPGEKKNGLFGNLIALSLGLTPNFKSNFDLAEDAKLQLSKDTYDDDLDNLLAQIGDQYADLFLAAKNLSDAILLSDILRVNTEITKAPLSASMIKRYDEHHQDLTLLKALVRQQLPEKYKEIFFDQSKNGYAGYIDGGASQEEFYKFIKPILEKMDGTEELLVKLNREDLLRKQRTFDNGSIPHQIHLGELHAILRRQEDFYPFLKDNREKIEKILTFRIPYYVGPLARGNSRFAWMTRKSEETITPWNFEEVVDKGASAQSFIERMTNFDKNLPNEKVLPKHSLLYEYFTVYNELTKVKYVTEGMRKPAFLSGEQKKAIVDLLFKTNRKVTVKQLKEDYFKKIECFDSVEISGVEDRFNASLGTYHDLLKIIKDKDFLDNEENEDILEDIVLTLTLFEDREMIEERLKTYAHLFDDKVMKQLKRRRYTGWGRLSRKLINGIRDKQSGKTILDFLKSDGFANRNFMQLIHDDSLTFKEDIQKAQVSGQGDSLHEHIANLAGSPAIKKGILQTVKVVDELVKVMGRHKPENIVIEMARENQTTQKGQKNSRERMKRIEEGIKELGSQILKEHPVENTQLQNEKLYLYYLQNGRDMYVDQELDINRLSDYDVDHIVPQSFLKDDSIDNKVLTRSDKARGKSDNVPSEEVVKKMKNYWRQLLNAKLITQRKFDNLTKAERGGLSELDKAGFIKRQLVETRQITKHVAQILDSRMNTKYDENDKLIREVKVITLKSKLVSDFRKDFQFYKVREINNYHHAHDAYLNAVVGTALIKKYPKLESEFVYGDYKVYDVRKMIAKSEQEIGKATAKYFFYSNIMNFFKTEITLANGEIRKRPLIETNGETGEIVWDKGRDFATVRKVLSMPQVNIVKKTEVQTGGFSKESILPKRNSDKLIARKKDWDPKKYGGFDSPTVAYSVLVVAKVEKGKSKKLKSVKELLGITIMERSSFEKNPIDFLEAKGYKEVKKDLIIKLPKYSLFELENGRKRMLASAGELQKGNELALPSKYVNFLYLASHYEKLKGSPEDNEQKQLFVEQHKHYLDEIIEQISEFSKRVILADANLDKVLSAYNKHRDKPIREQAENIIHLFTLTNLGAPAAFKYFDTTIDRKRYTSTKEVLDATLIHQSITGLYETRIDLSQLGGDGGGGSPAPGGGGGVLNLEEEYRLHEKPVPSSIDPSWLQLFPTVWAERAGMGLANQVPPVVVELRSGASPVAVRQYPMSKEAREGIRPHIQRFLDLGVLVPCQSPWNTPLLPVKKPGTNDYRPVQDLREINKRVQDIHPTVPNPYNLLSSLPPSHTWYSVLDLKDAFFCLKLHPNSQPLFAFEWRDPEKGNTGQLTWTRLPQGFKNSPTLFNEALHRDLAPFRALNPQVVLLQYVDDLLVAAPTYRDCKEGTQKLLQELSKLGYRVSAKKAQLCQKEVTYLGYLLKEGKRWLTPARKATVMKIPPPTTPRQVREFLGKAGFCRLFIPGFASLAAPLYPLTKPSIPFIWTEEHQKAFDRIKEALLSAPALALPDLTKPFTLYVDERAGVARGVLTQTLGPWRRPVAYLSKKLDPVASGWPTCLKAVAAVALLLKDADKLTLGQNVTVIASHSLESIVRQPPDRWMTNARMTHYQSLLLNERVSFAPPAVLNPATLLPVESEATPVHRCSEILAEETGTRRDLKDQPLPGVPAWYTDGSSFIAEGKRRAGAAIVDGKRTVWASSLPEGTSAQKAELVALTQALRLAEGKDINIYTDSRYAFATAHIHGAIYKQRGWLTSAGKDIKNKEEILALLEAIHLPKRVAIIHCPGHQKGNDPVATGNRRADEAAKQAALSTRVLAETTKPAGKRTADGSEFEKRTADGSEFESPKKKAKVE

SEQ ID NO: 931 - protein, 2091 aa, synthetic construct
MPAAKRVKLDGGDKKYSIGLDIGTNSVGWAVITDEYKVPSKKFKVLGNTDRHSIKKNLIGALLFDSGETAEATRLKRTARRRYTRRKNRICYLQEIFSNEMAKVDDSFFHRLEESFLVEEDKKHERHPIFGNIVDEVAYHEKYPTIYHLRKKLVDSTDKADLRLIYLALAHMIKFRGHFLIEGDLNPDNSDVDKLFIQLVQTYNQLFEENPINASGVDAKAILSARLSKSRRLENLIAQLPGEKKNGLFGNLIALSLGLTPNFKSNFDLAEDAKLQLSKDTYDDDLDNLLAQIGDQYADLFLAAKNLSDAILLSDILRVNTEITKAPLSASMIKRYDEHHQDLTLLKALVRQQLPEKYKEIFFDQSKNGYAGYIDGGASQEEFYKFIKPILEKMDGTEELLVKLNREDLLRKQRTFDNGSIPHQIHLGELHAILRRQEDFYPFLKDNREKIEKILTFRIPYYVGPLARGNSRFAWMTRKSEETITPWNFEEVVDKGASAQSFIERMTNFDKNLPNEKVLPKHSLLYEYFTVYNELTKVKYVTEGMRKPAFLSGEQKKAIVDLLFKTNRKVTVKQLKEDYFKKIECFDSVEISGVEDRFNASLGTYHDLLKIIKDKDFLDNEENEDILEDIVLTLTLFEDREMIEERLKTYAHLFDDKVMKQLKRRRYTGWGRLSRKLINGIRDKQSGKTILDFLKSDGFANRNFMQLIHDDSLTFKEDIQKAQVSGQGDSLHEHIANLAGSPAIKKGILQTVKVVDELVKVMGRHKPENIVIEMARENQTTQKGQKNSRERMKRIEEGIKELGSQILKEHPVENTQLQNEKLYLYYLQNGRDMYVDQELDINRLSDYDVDHIVPQSFLKDDSIDNKVLTRSDKARGKSDNVPSEEVVKKMKNYWRQLLNAKLITQRKFDNLTKAERGGLSELDKAGFIKRQLVETRQITKHVAQILDSRMNTKYDENDKLIREVKVITLKSKLVSDFRKDFQFYKVREINNYHHAHDAYLNAVVGTALIKKYPKLESEFVYGDYKVYDVRKMIAKSEQEIGKATAKYFFYSNIMNFFKTEITLANGEIRKRPLIETNGETGEIVWDKGRDFATVRKVLSMPQVNIVKKTEVQTGGFSKESILPKRNSDKLIARKKDWDPKKYGGFDSPTVAYSVLVVAKVEKGKSKKLKSVKELLGITIMERSSFEKNPIDFLEAKGYKEVKKDLIIKLPKYSLFELENGRKRMLASAGELQKGNELALPSKYVNFLYLASHYEKLKGSPEDNEQKQLFVEQHKHYLDEIIEQISEFSKRVILADANLDKVLSAYNKHRDKPIREQAENIIHLFTLTNLGAPAAFKYFDTTIDRKRYTSTKEVLDATLIHQSITGLYETRIDLSQLGGDGGEAAAKGGGGGVLNLEEEYRLHEKPVPSSIDPSWLQLFPTVWAERAGMGLANQVPPVVVELRSGASPVAVRQYPMSKEAREGIRPHIQRFLDLGVLVPCQSPWNTPLLPVKKPGTNDYRPVQDLREINKRVQDIHPTVPNPYNLLSSLPPSHTWYSVLDLKDAFFCLKLHPNSQPLFAFEWRDPEKGNTGQLTWTRLPQGFKNSPTLFNEALHRDLAPFRALNPQVVLLQYVDDLLVAAPTYRDCKEGTQKLLQELSKLGYRVSAKKAQLCQKEVTYLGYLLKEGKRWLTPARKATVMKIPPPTTPRQVREFLGKAGFCRLFIPGFASLAAPLYPLTKPSIPFIWTEEHQKAFDRIKEALLSAPALALPDLTKPFTLYVDERAGVARGVLTQTLGPWRRPVAYLSKKLDPVASGWPTCLKAVAAVALLLKDADKLTLGQNVTVIASHSLESIVRQPPDRWMTNARMTHYQSLLLNERVSFAPPAVLNPATLLPVESEATPVHRCSEILAEETGTRRDLKDQPLPGVPAWYTDGSSFIAEGKRRAGAAIVDGKRTVWASSLPEGTSAQKAELVALTQALRLAEGKDINIYTDSRYAFATAHIHGAIYKQRGWLTSAGKDIKNKEEILALLEAIHLPKRVAIIHCPGHQKGNDPVATGNRRADEAAKQAALSTRVLAETTKPAGKRTADGSEFEKRTADGSEFESPKKKAKVE

SEQ ID NO: 932 - protein, 2089 aa, synthetic construct
MPAAKRVKLDGGDKKYSIGLDIGTNSVGWAVITDEYKVPSKKFKVLGNTDRHSIKKNLIGALLFDSGETAEATRLKRTARRRYTRRKNRICYLQEIFSNEMAKVDDSFFHRLEESFLVEEDKKHERHPIFGNIVDEVAYHEKYPTIYHLRKKLVDSTDKADLRLIYLALAHMIKFRGHFLIEGDLNPDNSDVDKLFIQLVQTYNQLFEENPINASGVDAKAILSARLSKSRRLENLIAQLPGEKKNGLFGNLIALSLGLTPNFKSNFDLAEDAKLQLSKDTYDDDLDNLLAQIGDQYADLFLAAKNLSDAILLSDILRVNTEITKAPLSASMIKRYDEHHQDLTLLKALVRQQLPEKYKEIFFDQSKNGYAGYIDGGASQEEFYKFIKPILEKMDGTEELLVKLNREDLLRKQRTFDNGSIPHQIHLGELHAILRRQEDFYPFLKDNREKIEKILTFRIPYYVGPLARGNSRFAWMTRKSEETITPWNFEEVVDKGASAQSFIERMTNFDKNLPNEKVLPKHSLLYEYFTVYNELTKVKYVTEGMRKPAFLSGEQKKAIVDLLFKTNRKVTVKQLKEDYFKKIECFDSVEISGVEDRFNASLGTYHDLLKIIKDKDFLDNEENEDILEDIVLTLTLFEDREMIEERLKTYAHLFDDKVMKQLKRRRYTGWGRLSRKLINGIRDKQSGKTILDFLKSDGFANRNFMQLIHDDSLTFKEDIQKAQVSGQGDSLHEHIANLAGSPAIKKGILQTVKVVDELVKVMGRHKPENIVIEMARENQTTQKGQKNSRERMKRIEEGIKELGSQILKEHPVENTQLQNEKLYLYYLQNGRDMYVDQELDINRLSDYDVDHIVPQSFLKDDSIDNKVLTRSDKARGKSDNVPSEEVVKKMKNYWRQLLNAKLITQRKFDNLTKAERGGLSELDKAGFIKRQLVETRQITKHVAQILDSRMNTKYDENDKLIREVKVITLKSKLVSDFRKDFQFYKVREINNYHHAHDAYLNAVVGTALIKKYPKLESEFVYGDYKVYDVRKMIAKSEQEIGKATAKYFFYSNIMNFFKTEITLANGEIRKRPLIETNGETGEIVWDKGRDFATVRKVLSMPQVNIVKKTEVQTGGFSKESILPKRNSDKLIARKKDWDPKKYGGFDSPTVAYSVLVVAKVEKGKSKKLKSVKELLGITIMERSSFEKNPIDFLEAKGYKEVKKDLIIKLPKYSLFELENGRKRMLASAGELQKGNELALPSKYVNFLYLASHYEKLKGSPEDNEQKQLFVEQHKHYLDEIIEQISEFSKRVILADANLDKVLSAYNKHRDKPIREQAENIIHLFTLTNLGAPAAFKYFDTTIDRKRYTSTKEVLDATLIHQSITGLYETRIDLSQLGGDGGGSSGSSGGVLNLEEEYRLHEKPVPSSIDPSWLQLFPTVWAERAGMGLANQVPPVVVELRSGASPVAVRQYPMSKEAREGIRPHIQRFLDLGVLVPCQSPWNTPLLPVKKPGTNDYRPVQDLREINKRVQDIHPTVPNPYNLLSSLPPSHTWYSVLDLKDAFFCLKLHPNSQPLFAFEWRDPEKGNTGQLTWTRLPQGFKNSPTLFNEALHRDLAPFRALNPQVVLLQYVDDLLVAAPTYRDCKEGTQKLLQELSKLGYRVSAKKAQLCQKEVTYLGYLLKEGKRWLTPARKATVMKIPPPTTPRQVREFLGKAGFCRLFIPGFASLAAPLYPLTKPSIPFIWTEEHQKAFDRIKEALLSAPALALPDLTKPFTLYVDERAGVARGVLTQTLGPWRRPVAYLSKKLDPVASGWPTCLKAVAAVALLLKDADKLTLGQNVTVIASHSLESIVRQPPDRWMTNARMTHYQSLLLNERVSFAPPAVLNPATLLPVESEATPVHRCSEILAEETGTRRDLKDQPLPGVPAWYTDGSSFIAEGKRRAGAAIVDGKRTVWASSLPEGTSAQKAELVALTQALRLAEGKDINIYTDSRYAFATAHIHGAIYKQRGWLTSAGKDIKNKEEILALLEAIHLPKRVAIIHCPGHQKGNDPVATGNRRADEAAKQAALSTRVLAETTKPAGKRTADGSEFEKRTADGSEFESPKKKAKVE

SEQ ID NO: 933 - protein, 2098 aa, synthetic construct
MPAAKRVKLDGGDKKYSIGLDIGTNSVGWAVITDEYKVPSKKFKVLGNTDRHSIKKNLIGALLFDSGETAEATRLKRTARRRYTRRKNRICYLQEIFSNEMAKVDDSFFHRLEESFLVEEDKKHERHPIFGNIVDEVAYHEKYPTIYHLRKKLVDSTDKADLRLIYLALAHMIKFRGHFLIEGDLNPDNSDVDKLFIQLVQTYNQLFEENPINASGVDAKAILSARLSKSRRLENLIAQLPGEKKNGLFGNLIALSLGLTPNFKSNFDLAEDAKLQLSKDTYDDDLDNLLAQIGDQYADLFLAAKNLSDAILLSDILRVNTEITKAPLSASMIKRYDEHHQDLTLLKALVRQQLPEKYKEIFFDQSKNGYAGYIDGGASQEEFYKFIKPILEKMDGTEELLVKLNREDLLRKQRTFDNGSIPHQIHLGELHAILRRQEDFYPFLKDNREKIEKILTFRIPYYVGPLARGNSRFAWMTRKSEETITPWNFEEVVDKGASAQSFIERMTNFDKNLPNEKVLPKHSLLYEYFTVYNELTKVKYVTEGMRKPAFLSGEQKKAIVDLLFKTNRKVTVKQLKEDYFKKIECFDSVEISGVEDRFNASLGTYHDLLKIIKDKDFLDNEENEDILEDIVLTLTLFEDREMIEERLKTYAHLFDDKVMKQLKRRRYTGWGRLSRKLINGIRDKQSGKTILDFLKSDGFANRNFMQLIHDDSLTFKEDIQKAQVSGQGDSLHEHIANLAGSPAIKKGILQTVKVVDELVKVMGRHKPENIVIEMARENQTTQKGQKNSRERMKRIEEGIKELGSQILKEHPVENTQLQNEKLYLYYLQNGRDMYVDQELDINRLSDYDVDHIVPQSFLKDDSIDNKVLTRSDKARGKSDNVPSEEVVKKMKNYWRQLLNAKLITQRKFDNLTKAERGGLSELDKAGFIKRQLVETRQITKHVAQILDSRMNTKYDENDKLIREVKVITLKSKLVSDFRKDFQFYKVREINNYHHAHDAYLNAVVGTALIKKYPKLESEFVYGDYKVYDVRKMIAKSEQEIGKATAKYFFYSNIMNFFKTEITLANGEIRKRPLIETNGETGEIVWDKGRDFATVRKVLSMPQVNIVKKTEVQTGGFSKESILPKRNSDKLIARKKDWDPKKYGGFDSPTVAYSVLVVAKVEKGKSKKLKSVKELLGITIMERSSFEKNPIDFLEAKGYKEVKKDLIIKLPKYSLFELENGRKRMLASAGELQKGNELALPSKYVNFLYLASHYEKLKGSPEDNEQKQLFVEQHKHYLDEIIEQISEFSKRVILADANLDKVLSAYNKHRDKPIREQAENIIHLFTLTNLGAPAAFKYFDTTIDRKRYTSTKEVLDATLIHQSITGLYETRIDLSQLGGDGGEAAAKEAAAKEAAAKGGVLNLEEEYRLHEKPVPSSIDPSWLQLFPTVWAERAGMGLANQVPPVVVELRSGASPVAVRQYPMSKEAREGIRPHIQRFLDLGVLVPCQSPWNTPLLPVKKPGTNDYRPVQDLREINKRVQDIHPTVPNPYNLLSSLPPSHTWYSVLDLKDAFFCLKLHPNSQPLFAFEWRDPEKGNTGQLTWTRLPQGFKNSPTLFNEALHRDLAPFRALNPQVVLLQYVDDLLVAAPTYRDCKEGTQKLLQELSKLGYRVSAKKAQLCQKEVTYLGYLLKEGKRWLTPARKATVMKIPPPTTPRQVREFLGKAGFCRLFIPGFASLAAPLYPLTKPSIPFIWTEEHQKAFDRIKEALLSAPALALPDLTKPFTLYVDERAGVARGVLTQTLGPWRRPVAYLSKKLDPVASGWPTCLKAVAAVALLLKDADKLTLGQNVTVIASHSLESIVRQPPDRWMTNARMTHYQSLLLNERVSFAPPAVLNPATLLPVESEATPVHRCSEILAEETGTRRDLKDQPLPGVPAWYTDGSSFIAEGKRRAGAAIVDGKRTVWASSLPEGTSAQKAELVALTQALRLAEGKDINIYTDSRYAFATAHIHGAIYKQRGWLTSAGKDIKNKEEILALLEAIHLPKRVAIIHCPGHQKGNDPVATGNRRADEAAKQAALSTRVLAETTKPAGKRTADGSEFEKRTADGSEFESPKKKAKVE

SEQ ID NO: 934 - protein, 2091 aa, synthetic construct
MPAAKRVKLDGGDKKYSIGLDIGTNSVGWAVITDEYKVPSKKFKVLGNTDRHSIKKNLIGALLFDSGETAEATRLKRTARRRYTRRKNRICYLQEIFSNEMAKVDDSFFHRLEESFLVEEDKKHERHPIFGNIVDEVAYHEKYPTIYHLRKKLVDSTDKADLRLIYLALAHMIKFRGHFLIEGDLNPDNSDVDKLFIQLVQTYNQLFEENPINASGVDAKAILSARLSKSRRLENLIAQLPGEKKNGLFGNLIALSLGLTPNFKSNFDLAEDAKLQLSKDTYDDDLDNLLAQIGDQYADLFLAAKNLSDAILLSDILRVNTEITKAPLSASMIKRYDEHHQDLTLLKALVRQQLPEKYKEIFFDQSKNGYAGYIDGGASQEEFYKFIKPILEKMDGTEELLVKLNREDLLRKQRTFDNGSIPHQIHLGELHAILRRQEDFYPFLKDNREKIEKILTFRIPYYVGPLARGNSRFAWMTRKSEETITPWNFEEVVDKGASAQSFIERMTNFDKNLPNEKVLPKHSLLYEYFTVYNELTKVKYVTEGMRKPAFLSGEQKKAIVDLLFKTNRKVTVKQLKEDYFKKIECFDSVEISGVEDRFNASLGTYHDLLKIIKDKDFLDNEENEDILEDIVLTLTLFEDREMIEERLKTYAHLFDDKVMKQLKRRRYTGWGRLSRKLINGIRDKQSGKTILDFLKSDGFANRNFMQLIHDDSLTFKEDIQKAQVSGQGDSLHEHIANLAGSPAIKKGILQTVKVVDELVKVMGRHKPENIVIEMARENQTTQKGQKNSRERMKRIEEGIKELGSQILKEHPVENTQLQNEKLYLYYLQNGRDMYVDQELDINRLSDYDVDHIVPQSFLKDDSIDNKVLTRSDKARGKSDNVPSEEVVKKMKNYWRQLLNAKLITQRKFDNLTKAERGGLSELDKAGFIKRQLVETRQITKHVAQILDSRMNTKYDENDKLIREVKVITLKSKLVSDFRKDFQFYKVREINNYHHAHDAYLNAVVGTALIKKYPKLESEFVYGDYKVYDVRKMIAKSEQEIGKATAKYFFYSNIMNFFKTEITLANGEIRKRPLIETNGETGEIVWDKGRDFATVRKVLSMPQVNIVKKTEVQTGGFSKESILPKRNSDKLIARKKDWDPKKYGGFDSPTVAYSVLVVAKVEKGKSKKLKSVKELLGITIMERSSFEKNPIDFLEAKGYKEVKKDLIIKLPKYSLFELENGRKRMLASAGELQKGNELALPSKYVNFLYLASHYEKLKGSPEDNEQKQLFVEQHKHYLDEIIEQISEFSKRVILADANLDKVLSAYNKHRDKPIREQAENIIHLFTLTNLGAPAAFKYFDTTIDRKRYTSTKEVLDATLIHQSITGLYETRIDLSQLGGDGGGGGEAAAKGGVLNLEEEYRLHEKPVPSSIDPSWLQLFPTVWAERAGMGLANQVPPVVVELRSGASPVAVRQYPMSKEAREGIRPHIQRFLDLGVLVPCQSPWNTPLLPVKKPGTNDYRPVQDLREINKRVQDIHPTVPNPYNLLSSLPPSHTWYSVLDLKDAFFCLKLHPNSQPLFAFEWRDPEKGNTGQLTWTRLPQGFKNSPTLFNEALHRDLAPFRALNPQVVLLQYVDDLLVAAPTYRDCKEGTQKLLQELSKLGYRVSAKKAQLCQKEVTYLGYLLKEGKRWLTPARKATVMKIPPPTTPRQVREFLGKAGFCRLFIPGFASLAAPLYPLTKPSIPFIWTEEHQKAFDRIKEALLSAPALALPDLTKPFTLYVDERAGVARGVLTQTLGPWRRPVAYLSKKLDPVASGWPTCLKAVAAVALLLKDADKLTLGQNVTVIASHSLESIVRQPPDRWMTNARMTHYQSLLLNERVSFAPPAVLNPATLLPVESEATPVHRCSEILAEETGTRRDLKDQPLPGVPAWYTDGSSFIAEGKRRAGAAIVDGKRTVWASSLPEGTSAQKAELVALTQALRLAEGKDINIYTDSRYAFATAHIHGAIYKQRGWLTSAGKDIKNKEEILALLEAIHLPKRVAIIHCPGHQKGNDPVATGNRRADEAAKQAALSTRVLAETTKPAGKRTADGSEFEKRTADGSEFESPKKKAKVE

SEQ ID NO: 935 - protein, 2103 aa, synthetic construct
MPAAKRVKLDGGDKKYSIGLDIGTNSVGWAVITDEYKVPSKKFKVLGNTDRHSIKKNLIGALLFDSGETAEATRLKRTARRRYTRRKNRICYLQEIFSNEMAKVDDSFFHRLEESFLVEEDKKHERHPIFGNIVDEVAYHEKYPTIYHLRKKLVDSTDKADLRLIYLALAHMIKFRGHFLIEGDLNPDNSDVDKLFIQLVQTYNQLFEENPINASGVDAKAILSARLSKSRRLENLIAQLPGEKKNGLFGNLIALSLGLTPNFKSNFDLAEDAKLQLSKDTYDDDLDNLLAQIGDQYADLFLAAKNLSDAILLSDILRVNTEITKAPLSASMIKRYDEHHQDLTLLKALVRQQLPEKYKEIFFDQSKNGYAGYIDGGASQEEFYKFIKPILEKMDGTEELLVKLNREDLLRKQRTFDNGSIPHQIHLGELHAILRRQEDFYPFLKDNREKIEKILTFRIPYYVGPLARGNSRFAWMTRKSEETITPWNFEEVVDKGASAQSFIERMTNFDKNLPNEKVLPKHSLLYEYFTVYNELTKVKYVTEGMRKPAFLSGEQKKAIVDLLFKTNRKVTVKQLKEDYFKKIECFDSVEISGVEDRFNASLGTYHDLLKIIKDKDFLDNEENEDILEDIVLTLTLFEDREMIEERLKTYAHLFDDKVMKQLKRRRYTGWGRLSRKLINGIRDKQSGKTILDFLKSDGFANRNFMQLIHDDSLTFKEDIQKAQVSGQGDSLHEHIANLAGSPAIKKGILQTVKVVDELVKVMGRHKPENIVIEMARENQTTQKGQKNSRERMKRIEEGIKELGSQILKEHPVENTQLQNEKLYLYYLQNGRDMYVDQELDINRLSDYDVDHIVPQSFLKDDSIDNKVLTRSDKARGKSDNVPSEEVVKKMKNYWRQLLNAKLITQRKFDNLTKAERGGLSELDKAGFIKRQLVETRQITKHVAQILDSRMNTKYDENDKLIREVKVITLKSKLVSDFRKDFQFYKVREINNYHHAHDAYLNAVVGTALIKKYPKLESEFVYGDYKVYDVRKMIAKSEQEIGKATAKYFFYSNIMNFFKTEITLANGEIRKRPLIETNGETGEIVWDKGRDFATVRKVLSMPQVNIVKKTEVQTGGFSKESILPKRNSDKLIARKKDWDPKKYGGFDSPTVAYSVLVVAKVEKGKSKKLKSVKELLGITIMERSSFEKNPIDFLEAKGYKEVKKDLIIKLPKYSLFELENGRKRMLASAGELQKGNELALPSKYVNFLYLASHYEKLKGSPEDNEQKQLFVEQHKHYLDEIIEQISEFSKRVILADANLDKVLSAYNKHRDKPIREQAENIIHLFTLTNLGAPAAFKYFDTTIDRKRYTSTKEVLDATLIHQSITGLYETRIDLSQLGGDGGEAAAKEAAAKEAAAKEAAAKGGVLNLEEEYRLHEKPVPSSIDPSWLQLFPTVWAERAGMGLANQVPPVVVELRSGASPVAVRQYPMSKEAREGIRPHIQRFLDLGVLVPCQSPWNTPLLPVKKPGTNDYRPVQDLREINKRVQDIHPTVPNPYNLLSSLPPSHTWYSVLDLKDAFFCLKLHPNSQPLFAFEWRDPEKGNTGQLTWTRLPQGFKNSPTLFNEALHRDLAPFRALNPQVVLLQYVDDLLVAAPTYRDCKEGTQKLLQELSKLGYRVSAKKAQLCQKEVTYLGYLLKEGKRWLTPARKATVMKIPPPTTPRQVREFLGKAGFCRLFIPGFASLAAPLYPLTKPSIPFIWTEEHQKAFDRIKEALLSAPALALPDLTKPFTLYVDERAGVARGVLTQTLGPWRRPVAYLSKKLDPVASGWPTCLKAVAAVALLLKDADKLTLGQNVTVIASHSLESIVRQPPDRWMTNARMTHYQSLLLNERVSFAPPAVLNPATLLPVESEATPVHRCSEILAEETGTRRDLKDQPLPGVPAWYTDGSSFIAEGKRRAGAAIVDGKRTVWASSLPEGTSAQKAELVALTQALRLAEGKDINIYTDSRYAFATAHIHGAIYKQRGWLTSAGKDIKNKEEILALLEAIHLPKRVAIIHCPGHQKGNDPVATGNRRADEAAKQAALSTRVLAETTKPAGKRTADGSEFEKRTADGSEFESPKKKAKVE

SEQ ID NO: 936 - protein, 2094 aa, synthetic construct
MPAAKRVKLDGGDKKYSIGLDIGTNSVGWAVITDEYKVPSKKFKVLGNTDRHSIKKNLIGALLFDSGETAEATRLKRTARRRYTRRKNRICYLQEIFSNEMAKVDDSFFHRLEESFLVEEDKKHERHPIFGNIVDEVAYHEKYPTIYHLRKKLVDSTDKADLRLIYLALAHMIKFRGHFLIEGDLNPDNSDVDKLFIQLVQTYNQLFEENPINASGVDAKAILSARLSKSRRLENLIAQLPGEKKNGLFGNLIALSLGLTPNFKSNFDLAEDAKLQLSKDTYDDDLDNLLAQIGDQYADLFLAAKNLSDAILLSDILRVNTEITKAPLSASMIKRYDEHHQDLTLLKALVRQQLPEKYKEIFFDQSKNGYAGYIDGGASQEEFYKFIKPILEKMDGTEELLVKLNREDLLRKQRTFDNGSIPHQIHLGELHAILRRQEDFYPFLKDNREKIEKILTFRIPYYVGPLARGNSRFAWMTRKSEETITPWNFEEVVDKGASAQSFIERMTNFDKNLPNEKVLPKHSLLYEYFTVYNELTKVKYVTEGMRKPAFLSGEQKKAIVDLLFKTNRKVTVKQLKEDYFKKIECFDSVEISGVEDRFNASLGTYHDLLKIIKDKDFLDNEENEDILEDIVLTLTLFEDREMIEERLKTYAHLFDDKVMKQLKRRRYTGWGRLSRKLINGIRDKQSGKTILDFLKSDGFANRNFMQLIHDDSLTFKEDIQKAQVSGQGDSLHEHIANLAGSPAIKKGILQTVKVVDELVKVMGRHKPENIVIEMARENQTTQKGQKNSRERMKRIEEGIKELGSQILKEHPVENTQLQNEKLYLYYLQNGRDMYVDQELDINRLSDYDVDHIVPQSFLKDDSIDNKVLTRSDKARGKSDNVPSEEVVKKMKNYWRQLLNAKLITQRKFDNLTKAERGGLSELDKAGFIKRQLVETRQITKHVAQILDSRMNTKYDENDKLIREVKVITLKSKLVSDFRKDFQFYKVREINNYHHAHDAYLNAVVGTALIKKYPKLESEFVYGDYKVYDVRKMIAKSEQEIGKATAKYFFYSNIMNFFKTEITLANGEIRKRPLIETNGETGEIVWDKGRDFATVRKVLSMPQVNIVKKTEVQTGGFSKESILPKRNSDKLIARKKDWDPKKYGGFDSPTVAYSVLVVAKVEKGKSKKLKSVKELLGITIMERSSFEKNPIDFLEAKGYKEVKKDLIIKLPKYSLFELENGRKRMLASAGELQKGNELALPSKYVNFLYLASHYEKLKGSPEDNEQKQLFVEQHKHYLDEIIEQISEFSKRVILADANLDKVLSAYNKHRDKPIREQAENIIHLFTLTNLGAPAAFKYFDTTIDRKRYTSTKEVLDATLIHQSITGLYETRIDLSQLGGDGGGGSGSSEAAAKGGVLNLEEEYRLHEKPVPSSIDPSWLQLFPTVWAERAGMGLANQVPPVVVELRSGASPVAVRQYPMSKEAREGIRPHIQRFLDLGVLVPCQSPWNTPLLPVKKPGTNDYRPVQDLREINKRVQDIHPTVPNPYNLLSSLPPSHTWYSVLDLKDAFFCLKLHPNSQPLFAFEWRDPEKGNTGQLTWTRLPQGFKNSPTLFNEALHRDLAPFRALNPQVVLLQYVDDLLVAAPTYRDCKEGTQKLLQELSKLGYRVSAKKAQLCQKEVTYLGYLLKEGKRWLTPARKATVMKIPPPTTPRQVREFLGKAGFCRLFIPGFASLAAPLYPLTKPSIPFIWTEEHQKAFDRIKEALLSAPALALPDLTKPFTLYVDERAGVARGVLTQTLGPWRRPVAYLSKKLDPVASGWPTCLKAVAAVALLLKDADKLTLGQNVTVIASHSLESIVRQPPDRWMTNARMTHYQSLLLNERVSFAPPAVLNPATLLPVESEATPVHRCSEILAEETGTRRDLKDQPLPGVPAWYTDGSSFIAEGKRRAGAAIVDGKRTVWASSLPEGTSAQKAELVALTQALRLAEGKDINIYTDSRYAFATAHIHGAIYKQRGWLTSAGKDIKNKEEILALLEAIHLPKRVAIIHCPGHQKGNDPVATGNRRADEAAKQAALSTRVLAETTKPAGKRTADGSEFEKRTADGSEFESPKKKAKVE

SEQ ID NO: 937 - protein, 2092 aa, synthetic construct
MPAAKRVKLDGGDKKYSIGLDIGTNSVGWAVITDEYKVPSKKFKVLGNTDRHSIKKNLIGALLFDSGETAEATRLKRTARRRYTRRKNRICYLQEIFSNEMAKVDDSFFHRLEESFLVEEDKKHERHPIFGNIVDEVAYHEKYPTIYHLRKKLVDSTDKADLRLIYLALAHMIKFRGHFLIEGDLNPDNSDVDKLFIQLVQTYNQLFEENPINASGVDAKAILSARLSKSRRLENLIAQLPGEKKNGLFGNLIALSLGLTPNFKSNFDLAEDAKLQLSKDTYDDDLDNLLAQIGDQYADLFLAAKNLSDAILLSDILRVNTEITKAPLSASMIKRYDEHHQDLTLLKALVRQQLPEKYKEIFFDQSKNGYAGYIDGGASQEEFYKFIKPILEKMDGTEELLVKLNREDLLRKQRTFDNGSIPHQIHLGELHAILRRQEDFYPFLKDNREKIEKILTFRIPYYVGPLARGNSRFAWMTRKSEETITPWNFEEVVDKGASAQSFIERMTNFDKNLPNEKVLPKHSLLYEYFTVYNELTKVKYVTEGMRKPAFLSGEQKKAIVDLLFKTNRKVTVKQLKEDYFKKIECFDSVEISGVEDRFNASLGTYHDLLKIIKDKDFLDNEENEDILEDIVLTLTLFEDREMIEERLKTYAHLFDDKVMKQLKRRRYTGWGRLSRKLINGIRDKQSGKTILDFLKSDGFANRNFMQLIHDDSLTFKEDIQKAQVSGQGDSLHEHIANLAGSPAIKKGILQTVKVVDELVKVMGRHKPENIVIEMARENQTTQKGQKNSRERMKRIEEGIKELGSQILKEHPVENTQLQNEKLYLYYLQNGRDMYVDQELDINRLSDYDVDHIVPQSFLKDDSIDNKVLTRSDKARGKSDNVPSEEVVKKMKNYWRQLLNAKLITQRKFDNLTKAERGGLSELDKAGFIKRQLVETRQITKHVAQILDSRMNTKYDENDKLIREVKVITLKSKLVSDFRKDFQFYKVREINNYHHAHDAYLNAVVGTALIKKYPKLESEFVYGDYKVYDVRKMIAKSEQEIGKATAKYFFYSNIMNFFKTEITLANGEIRKRPLIETNGETGEIVWDKGRDFATVRKVLSMPQVNIVKKTEVQTGGFSKESILPKRNSDKLIARKKDWDPKKYGGFDSPTVAYSVLVVAKVEKGKSKKLKSVKELLGITIMERSSFEKNPIDFLEAKGYKEVKKDLIIKLPKYSLFELENGRKRMLASAGELQKGNELALPSKYVNFLYLASHYEKLKGSPEDNEQKQLFVEQHKHYLDEIIEQISEFSKRVILADANLDKVLSAYNKHRDKPIREQAENIIHLFTLTNLGAPAAFKYFDTTIDRKRYTSTKEVLDATLIHQSITGLYETRIDLSQLGGDGGGGGGGSGSSGGVLNLEEEYRLHEKPVPSSIDPSWLQLFPTVWAERAGMGLANQVPPVVVELRSGASPVAVRQYPMSKEAREGIRPHIQRFLDLGVLVPCQSPWNTPLLPVKKPGTNDYRPVQDLREINKRVQDIHPTVPNPYNLLSSLPPSHTWYSVLDLKDAFFCLKLHPNSQPLFAFEWRDPEKGNTGQLTWTRLPQGFKNSPTLFNEALHRDLAPFRALNPQVVLLQYVDDLLVAAPTYRDCKEGTQKLLQELSKLGYRVSAKKAQLCQKEVTYLGYLLKEGKRWLTPARKATVMKIPPPTTPRQVREFLGKAGFCRLFIPGFASLAAPLYPLTKPSIPFIWTEEHQKAFDRIKEALLSAPALALPDLTKPFTLYVDERAGVARGVLTQTLGPWRRPVAYLSKKLDPVASGWPTCLKAVAAVALLLKDADKLTLGQNVTVIASHSLESIVRQPPDRWMTNARMTHYQSLLLNERVSFAPPAVLNPATLLPVESEATPVHRCSEILAEETGTRRDLKDQPLPGVPAWYTDGSSFIAEGKRRAGAAIVDGKRTVWASSLPEGTSAQKAELVALTQALRLAEGKDINIYTDSRYAFATAHIHGAIYKQRGWLTSAGKDIKNKEEILALLEAIHLPKRVAIIHCPGHQKGNDPVATGNRRADEAAKQAALSTRVLAETTKPAGKRTADGSEFEKRTADGSEFESPKKKAKVE

SEQ ID NO: 938 - protein, 2098 aa, synthetic construct
MPAAKRVKLDGGDKKYSIGLDIGTNSVGWAVITDEYKVPSKKFKVLGNTDRHSIKKNLIGALLFDSGETAEATRLKRTARRRYTRRKNRICYLQEIFSNEMAKVDDSFFHRLEESFLVEEDKKHERHPIFGNIVDEVAYHEKYPTIYHLRKKLVDSTDKADLRLIYLALAHMIKFRGHFLIEGDLNPDNSDVDKLFIQLVQTYNQLFEENPINASGVDAKAILSARLSKSRRLENLIAQLPGEKKNGLFGNLIALSLGLTPNFKSNFDLAEDAKLQLSKDTYDDDLDNLLAQIGDQYADLFLAAKNLSDAILLSDILRVNTEITKAPLSASMIKRYDEHHQDLTLLKALVRQQLPEKYKEIFFDQSKNGYAGYIDGGASQEEFYKFIKPILEKMDGTEELLVKLNREDLLRKQRTFDNGSIPHQIHLGELHAILRRQEDFYPFLKDNREKIEKILTFRIPYYVGPLARGNSRFAWMTRKSEETITPWNFEEVVDKGASAQSFIERMTNFDKNLPNEKVLPKHSLLYEYFTVYNELTKVKYVTEGMRKPAFLSGEQKKAIVDLLFKTNRKVTVKQLKEDYFKKIECFDSVEISGVEDRFNASLGTYHDLLKIIKDKDFLDNEENEDILEDIVLTLTLFEDREMIEERLKTYAHLFDDKVMKQLKRRRYTGWGRLSRKLINGIRDKQSGKTILDFLKSDGFANRNFMQLIHDDSLTFKEDIQKAQVSGQGDSLHEHIANLAGSPAIKKGILQTVKVVDELVKVMGRHKPENIVIEMARENQTTQKGQKNSRERMKRIEEGIKELGSQILKEHPVENTQLQNEKLYLYYLQNGRDMYVDQELDINRLSDYDVDHIVPQSFLKDDSIDNKVLTRSDKARGKSDNVPSEEVVKKMKNYWRQLLNAKLITQRKFDNLTKAERGGLSELDKAGFIKRQLVETRQITKHVAQILDSRMNTKYDENDKLIREVKVITLKSKLVSDFRKDFQFYKVREINNYHHAHDAYLNAVVGTALIKKYPKLESEFVYGDYKVYDVRKMIAKSEQEIGKATAKYFFYSNIMNFFKTEITLANGEIRKRPLIETNGETGEIVWDKGRDFATVRKVLSMPQVNIVKKTEVQTGGFSKESILPKRNSDKLIARKKDWDPKKYGGFDSPTVAYSVLVVAKVEKGKSKKLKSVKELLGITIMERSSFEKNPIDFLEAKGYKEVKKDLIIKLPKYSLFELENGRKRMLASAGELQKGNELALPSKYVNFLYLASHYEKLKGSPEDNEQKQLFVEQHKHYLDEIIEQISEFSKRVILADANLDKVLSAYNKHRDKPIREQAENIIHLFTLTNLGAPAAFKYFDTTIDRKRYTSTKEVLDATLIHQSITGLYETRIDLSQLGGDGGGSSGSSGSSGSSGSSGGVLNLEEEYRLHEKPVPSSIDPSWLQLFPTVWAERAGMGLANQVPPVVVELRSGASPVAVRQYPMSKEAREGIRPHIQRFLDLGVLVPCQSPWNTPLLPVKKPGTNDYRPVQDLREINKRVQDIHPTVPNPYNLLSSLPPSHTWYSVLDLKDAFFCLKLHPNSQPLFAFEWRDPEKGNTGQLTWTRLPQGFKNSPTLFNEALHRDLAPFRALNPQVVLLQYVDDLLVAAPTYRDCKEGTQKLLQELSKLGYRVSAKKAQLCQKEVTYLGYLLKEGKRWLTPARKATVMKIPPPTTPRQVREFLGKAGFCRLFIPGFASLAAPLYPLTKPSIPFIWTEEHQKAFDRIKEALLSAPALALPDLTKPFTLYVDERAGVARGVLTQTLGPWRRPVAYLSKKLDPVASGWPTCLKAVAAVALLLKDADKLTLGQNVTVIASHSLESIVRQPPDRWMTNARMTHYQSLLLNERVSFAPPAVLNPATLLPVESEATPVHRCSEILAEETGTRRDLKDQPLPGVPAWYTDGSSFIAEGKRRAGAAIVDGKRTVWASSLPEGTSAQKAELVALTQALRLAEGKDINIYTDSRYAFATAHIHGAIYKQRGWLTSAGKDIKNKEEILALLEAIHLPKRVAIIHCPGHQKGNDPVATGNRRADEAAKQAALSTRVLAETTKPAGKRTADGSEFEKRTADGSEFESPKKKAKVE

SEQ ID NO: 939 - protein, 2094 aa, synthetic construct
MPAAKRVKLDGGDKKYSIGLDIGTNSVGWAVITDEYKVPSKKFKVLGNTDRHSIKKNLIGALLFDSGETAEATRLKRTARRRYTRRKNRICYLQEIFSNEMAKVDDSFFHRLEESFLVEEDKKHERHPIFGNIVDEVAYHEKYPTIYHLRKKLVDSTDKADLRLIYLALAHMIKFRGHFLIEGDLNPDNSDVDKLFIQLVQTYNQLFEENPINASGVDAKAILSARLSKSRRLENLIAQLPGEKKNGLFGNLIALSLGLTPNFKSNFDLAEDAKLQLSKDTYDDDLDNLLAQIGDQYADLFLAAKNLSDAILLSDILRVNTEITKAPLSASMIKRYDEHHQDLTLLKALVRQQLPEKYKEIFFDQSKNGYAGYIDGGASQEEFYKFIKPILEKMDGTEELLVKLNREDLLRKQRTFDNGSIPHQIHLGELHAILRRQEDFYPFLKDNREKIEKILTFRIPYYVGPLARGNSRFAWMTRKSEETITPWNFEEVVDKGASAQSFIERMTNFDKNLPNEKVLPKHSLLYEYFTVYNELTKVKYVTEGMRKPAFLSGEQKKAIVDLLFKTNRKVTVKQLKEDYFKKIECFDSVEISGVEDRFNASLGTYHDLLKIIKDKDFLDNEENEDILEDIVLTLTLFEDREMIEERLKTYAHLFDDKVMKQLKRRRYTGWGRLSRKLINGIRDKQSGKTILDFLKSDGFANRNFMQLIHDDSLTFKEDIQKAQVSGQGDSLHEHIANLAGSPAIKKGILQTVKVVDELVKVMGRHKPENIVIEMARENQTTQKGQKNSRERMKRIEEGIKELGSQILKEHPVENTQLQNEKLYLYYLQNGRDMYVDQELDINRLSDYDVDHIVPQSFLKDDSIDNKVLTRSDKARGKSDNVPSEEVVKKMKNYWRQLLNAKLITQRKFDNLTKAERGGLSELDKAGFIKRQLVETRQITKHVAQILDSRMNTKYDENDKLIREVKVITLKSKLVSDFRKDFQFYKVREINNYHHAHDAYLNAVVGTALIKKYPKLESEFVYGDYKVYDVRKMIAKSEQEIGKATAKYFFYSNIMNFFKTEITLANGEIRKRPLIETNGETGEIVWDKGRDFATVRKVLSMPQVNIVKKTEVQTGGFSKESILPKRNSDKLIARKKDWDPKKYGGFDSPTVAYSVLVVAKVEKGKSKKLKSVKELLGITIMERSSFEKNPIDFLEAKGYKEVKKDLIIKLPKYSLFELENGRKRMLASAGELQKGNELALPSKYVNFLYLASHYEKLKGSPEDNEQKQLFVEQHKHYLDEIIEQISEFSKRVILADANLDKVLSAYNKHRDKPIREQAENIIHLFTLTNLGAPAAFKYFDTTIDRKRYTSTKEVLDATLIHQSITGLYETRIDLSQLGGDGGPAPEAAAKGGSGGVLNLEEEYRLHEKPVPSSIDPSWLQLFPTVWAERAGMGLANQVPPVVVELRSGASPVAVRQYPMSKEAREGIRPHIQRFLDLGVLVPCQSPWNTPLLPVKKPGTNDYRPVQDLREINKRVQDIHPTVPNPYNLLSSLPPSHTWYSVLDLKDAFFCLKLHPNSQPLFAFEWRDPEKGNTGQLTWTRLPQGFKNSPTLFNEALHRDLAPFRALNPQVVLLQYVDDLLVAAPTYRDCKEGTQKLLQELSKLGYRVSAKKAQLCQKEVTYLGYLLKEGKRWLTPARKATVMKIPPPTTPRQVREFLGKAGFCRLFIPGFASLAAPLYPLTKPSIPFIWTEEHQKAFDRIKEALLSAPALALPDLTKPFTLYVDERAGVARGVLTQTLGPWRRPVAYLSKKLDPVASGWPTCLKAVAAVALLLKDADKLTLGQNVTVIASHSLESIVRQPPDRWMTNARMTHYQSLLLNERVSFAPPAVLNPATLLPVESEATPVHRCSEILAEETGTRRDLKDQPLPGVPAWYTDGSSFIAEGKRRAGAAIVDGKRTVWASSLPEGTSAQKAELVALTQALRLAEGKDINIYTDSRYAFATAHIHGAIYKQRGWLTSAGKDIKNKEEILALLEAIHLPKRVAIIHCPGHQKGNDPVATGNRRADEAAKQAALSTRVLAETTKPAGKRTADGSEFEKRTADGSEFESPKKKAKVE

SEQ ID NO: 940 - protein, 2089 aa, synthetic construct
MPAAKRVKLDGGDKKYSIGLDIGTNSVGWAVITDEYKVPSKKFKVLGNTDRHSIKKNLIGALLFDSGETAEATRLKRTARRRYTRRKNRICYLQEIFSNEMAKVDDSFFHRLEESFLVEEDKKHERHPIFGNIVDEVAYHEKYPTIYHLRKKLVDSTDKADLRLIYLALAHMIKFRGHFLIEGDLNPDNSDVDKLFIQLVQTYNQLFEENPINASGVDAKAILSARLSKSRRLENLIAQLPGEKKNGLFGNLIALSLGLTPNFKSNFDLAEDAKLQLSKDTYDDDLDNLLAQIGDQYADLFLAAKNLSDAILLSDILRVNTEITKAPLSASMIKRYDEHHQDLTLLKALVRQQLPEKYKEIFFDQSKNGYAGYIDGGASQEEFYKFIKPILEKMDGTEELLVKLNREDLLRKQRTFDNGSIPHQIHLGELHAILRRQEDFYPFLKDNREKIEKILTFRIPYYVGPLARGNSRFAWMTRKSEETITPWNFEEVVDKGASAQSFIERMTNFDKNLPNEKVLPKHSLLYEYFTVYNELTKVKYVTEGMRKPAFLSGEQKKAIVDLLFKTNRKVTVKQLKEDYFKKIECFDSVEISGVEDRFNASLGTYHDLLKIIKDKDFLDNEENEDILEDIVLTLTLFEDREMIEERLKTYAHLFDDKVMKQLKRRRYTGWGRLSRKLINGIRDKQSGKTILDFLKSDGFANRNFMQLIHDDSLTFKEDIQKAQVSGQGDSLHEHIANLAGSPAIKKGILQTVKVVDELVKVMGRHKPENIVIEMARENQTTQKGQKNSRERMKRIEEGIKELGSQILKEHPVENTQLQNEKLYLYYLQNGRDMYVDQELDINRLSDYDVDHIVPQSFLKDDSIDNKVLTRSDKARGKSDNVPSEEVVKKMKNYWRQLLNAKLITQRKFDNLTKAERGGLSELDKAGFIKRQLVETRQITKHVAQILDSRMNTKYDENDKLIREVKVITLKSKLVSDFRKDFQFYKVREINNYHHAHDAYLNAVVGTALIKKYPKLESEFVYGDYKVYDVRKMIAKSEQEIGKATAKYFFYSNIMNFFKTEITLANGEIRKRPLIETNGETGEIVWDKGRDFATVRKVLSMPQVNIVKKTEVQTGGFSKESILPKRNSDKLIARKKDWDPKKYGGFDSPTVAYSVLVVAKVEKGKSKKLKSVKELLGITIMERSSFEKNPIDFLEAKGYKEVKKDLIIKLPKYSLFELENGRKRMLASAGELQKGNELALPSKYVNFLYLASHYEKLKGSPEDNEQKQLFVEQHKHYLDEIIEQISEFSKRVILADANLDKVLSAYNKHRDKPIREQAENIIHLFTLTNLGAPAAFKYFDTTIDRKRYTSTKEVLDATLIHQSITGLYETRIDLSQLGGDGGGGGPAPGGVLNLEEEYRLHEKPVPSSIDPSWLQLFPTVWAERAGMGLANQVPPVVVELRSGASPVAVRQYPMSKEAREGIRPHIQRFLDLGVLVPCQSPWNTPLLPVKKPGTNDYRPVQDLREINKRVQDIHPTVPNPYNLLSSLPPSHTWYSVLDLKDAFFCLKLHPNSQPLFAFEWRDPEKGNTGQLTWTRLPQGFKNSPTLFNEALHRDLAPFRALNPQVVLLQYVDDLLVAAPTYRDCKEGTQKLLQELSKLGYRVSAKKAQLCQKEVTYLGYLLKEGKRWLTPARKATVMKIPPPTTPRQVREFLGKAGFCRLFIPGFASLAAPLYPLTKPSIPFIWTEEHQKAFDRIKEALLSAPALALPDLTKPFTLYVDERAGVARGVLTQTLGPWRRPVAYLSKKLDPVASGWPTCLKAVAAVALLLKDADKLTLGQNVTVIASHSLESIVRQPPDRWMTNARMTHYQSLLLNERVSFAPPAVLNPATLLPVESEATPVHRCSEILAEETGTRRDLKDQPLPGVPAWYTDGSSFIAEGKRRAGAAIVDGKRTVWASSLPEGTSAQKAELVALTQALRLAEGKDINIYTDSRYAFATAHIHGAIYKQRGWLTSAGKDIKNKEEILALLEAIHLPKRVAIIHCPGHQKGNDPVATGNRRADEAAKQAALSTRVLAETTKPAGKRTADGSEFEKRTADGSEFESPKKKAKVE

SEQ ID NO: 941 - protein, 2089 aa, synthetic construct
MPAAKRVKLDGGDKKYSIGLDIGTNSVGWAVITDEYKVPSKKFKVLGNTDRHSIKKNLIGALLFDSGETAEATRLKRTARRRYTRRKNRICYLQEIFSNEMAKVDDSFFHRLEESFLVEEDKKHERHPIFGNIVDEVAYHEKYPTIYHLRKKLVDSTDKADLRLIYLALAHMIKFRGHFLIEGDLNPDNSDVDKLFIQLVQTYNQLFEENPINASGVDAKAILSARLSKSRRLENLIAQLPGEKKNGLFGNLIALSLGLTPNFKSNFDLAEDAKLQLSKDTYDDDLDNLLAQIGDQYADLFLAAKNLSDAILLSDILRVNTEITKAPLSASMIKRYDEHHQDLTLLKALVRQQLPEKYKEIFFDQSKNGYAGYIDGGASQEEFYKFIKPILEKMDGTEELLVKLNREDLLRKQRTFDNGSIPHQIHLGELHAILRRQEDFYPFLKDNREKIEKILTFRIPYYVGPLARGNSRFAWMTRKSEETITPWNFEEVVDKGASAQSFIERMTNFDKNLPNEKVLPKHSLLYEYFTVYNELTKVKYVTEGMRKPAFLSGEQKKAIVDLLFKTNRKVTVKQLKEDYFKKIECFDSVEISGVEDRFNASLGTYHDLLKIIKDKDFLDNEENEDILEDIVLTLTLFEDREMIEERLKTYAHLFDDKVMKQLKRRRYTGWGRLSRKLINGIRDKQSGKTILDFLKSDGFANRNFMQLIHDDSLTFKEDIQKAQVSGQGDSLHEHIANLAGSPAIKKGILQTVKVVDELVKVMGRHKPENIVIEMARENQTTQKGQKNSRERMKRIEEGIKELGSQILKEHPVENTQLQNEKLYLYYLQNGRDMYVDQELDINRLSDYDVDHIVPQSFLKDDSIDNKVLTRSDKARGKSDNVPSEEVVKKMKNYWRQLLNAKLITQRKFDNLTKAERGGLSELDKAGFIKRQLVETRQITKHVAQILDSRMNTKYDENDKLIREVKVITLKSKLVSDFRKDFQFYKVREINNYHHAHDAYLNAVVGTALIKKYPKLESEFVYGDYKVYDVRKMIAKSEQEIGKATAKYFFYSNIMNFFKTEITLANGEIRKRPLIETNGETGEIVWDKGRDFATVRKVLSMPQVNIVKKTEVQTGGFSKESILPKRNSDKLIARKKDWDPKKYGGFDSPTVAYSVLVVAKVEKGKSKKLKSVKELLGITIMERSSFEKNPIDFLEAKGYKEVKKDLIIKLPKYSLFELENGRKRMLASAGELQKGNELALPSKYVNFLYLASHYEKLKGSPEDNEQKQLFVEQHKHYLDEIIEQISEFSKRVILADANLDKVLSAYNKHRDKPIREQAENIIHLFTLTNLGAPAAFKYFDTTIDRKRYTSTKEVLDATLIHQSITGLYETRIDLSQLGGDGGPAPGSSGGVLNLEEEYRLHEKPVPSSIDPSWLQLFPTVWAERAGMGLANQVPPVVVELRSGASPVAVRQYPMSKEAREGIRPHIQRFLDLGVLVPCQSPWNTPLLPVKKPGTNDYRPVQDLREINKRVQDIHPTVPNPYNLLSSLPPSHTWYSVLDLKDAFFCLKLHPNSQPLFAFEWRDPEKGNTGQLTWTRLPQGFKNSPTLFNEALHRDLAPFRALNPQVVLLQYVDDLLVAAPTYRDCKEGTQKLLQELSKLGYRVSAKKAQLCQKEVTYLGYLLKEGKRWLTPARKATVMKIPPPTTPRQVREFLGKAGFCRLFIPGFASLAAPLYPLTKPSIPFIWTEEHQKAFDRIKEALLSAPALALPDLTKPFTLYVDERAGVARGVLTQTLGPWRRPVAYLSKKLDPVASGWPTCLKAVAAVALLLKDADKLTLGQNVTVIASHSLESIVRQPPDRWMTNARMTHYQSLLLNERVSFAPPAVLNPATLLPVESEATPVHRCSEILAEETGTRRDLKDQPLPGVPAWYTDGSSFIAEGKRRAGAAIVDGKRTVWASSLPEGTSAQKAELVALTQALRLAEGKDINIYTDSRYAFATAHIHGAIYKQRGWLTSAGKDIKNKEEILALLEAIHLPKRVAIIHCPGHQKGNDPVATGNRRADEAAKQAALSTRVLAETTKPAGKRTADGSEFEKRTADGSEFESPKKKAKVE

SEQ ID NO: 942 - protein, 2091 aa, synthetic construct
MPAAKRVKLDGGDKKYSIGLDIGTNSVGWAVITDEYKVPSKKFKVLGNTDRHSIKKNLIGALLFDSGETAEATRLKRTARRRYTRRKNRICYLQEIFSNEMAKVDDSFFHRLEESFLVEEDKKHERHPIFGNIVDEVAYHEKYPTIYHLRKKLVDSTDKADLRLIYLALAHMIKFRGHFLIEGDLNPDNSDVDKLFIQLVQTYNQLFEENPINASGVDAKAILSARLSKSRRLENLIAQLPGEKKNGLFGNLIALSLGLTPNFKSNFDLAEDAKLQLSKDTYDDDLDNLLAQIGDQYADLFLAAKNLSDAILLSDILRVNTEITKAPLSASMIKRYDEHHQDLTLLKALVRQQLPEKYKEIFFDQSKNGYAGYIDGGASQEEFYKFIKPILEKMDGTEELLVKLNREDLLRKQRTFDNGSIPHQIHLGELHAILRRQEDFYPFLKDNREKIEKILTFRIPYYVGPLARGNSRFAWMTRKSEETITPWNFEEVVDKGASAQSFIERMTNFDKNLPNEKVLPKHSLLYEYFTVYNELTKVKYVTEGMRKPAFLSGEQKKAIVDLLFKTNRKVTVKQLKEDYFKKIECFDSVEISGVEDRFNASLGTYHDLLKIIKDKDFLDNEENEDILEDIVLTLTLFEDREMIEERLKTYAHLFDDKVMKQLKRRRYTGWGRLSRKLINGIRDKQSGKTILDFLKSDGFANRNFMQLIHDDSLTFKEDIQKAQVSGQGDSLHEHIANLAGSPAIKKGILQTVKVVDELVKVMGRHKPENIVIEMARENQTTQKGQKNSRERMKRIEEGIKELGSQILKEHPVENTQLQNEKLYLYYLQNGRDMYVDQELDINRLSDYDVDHIVPQSFLKDDSIDNKVLTRSDKARGKSDNVPSEEVVKKMKNYWRQLLNAKLITQRKFDNLTKAERGGLSELDKAGFIKRQLVETRQITKHVAQILDSRMNTKYDENDKLIREVKVITLKSKLVSDFRKDFQFYKVREINNYHHAHDAYLNAVVGTALIKKYPKLESEFVYGDYKVYDVRKMIAKSEQEIGKATAKYFFYSNIMNFFKTEITLANGEIRKRPLIETNGETGEIVWDKGRDFATVRKVLSMPQVNIVKKTEVQTGGFSKESILPKRNSDKLIARKKDWDPKKYGGFDSPTVAYSVLVVAKVEKGKSKKLKSVKELLGITIMERSSFEKNPIDFLEAKGYKEVKKDLIIKLPKYSLFELENGRKRMLASAGELQKGNELALPSKYVNFLYLASHYEKLKGSPEDNEQKQLFVEQHKHYLDEIIEQISEFSKRVILADANLDKVLSAYNKHRDKPIREQAENIIHLFTLTNLGAPAAFKYFDTTIDRKRYTSTKEVLDATLIHQSITGLYETRIDLSQLGGDGGEAAAKGSSGGVLNLEEEYRLHEKPVPSSIDPSWLQLFPTVWAERAGMGLANQVPPVVVELRSGASPVAVRQYPMSKEAREGIRPHIQRFLDLGVLVPCQSPWNTPLLPVKKPGTNDYRPVQDLREINKRVQDIHPTVPNPYNLLSSLPPSHTWYSVLDLKDAFFCLKLHPNSQPLFAFEWRDPEKGNTGQLTWTRLPQGFKNSPTLFNEALHRDLAPFRALNPQVVLLQYVDDLLVAAPTYRDCKEGTQKLLQELSKLGYRVSAKKAQLCQKEVTYLGYLLKEGKRWLTPARKATVMKIPPPTTPRQVREFLGKAGFCRLFIPGFASLAAPLYPLTKPSIPFIWTEEHQKAFDRIKEALLSAPALALPDLTKPFTLYVDERAGVARGVLTQTLGPWRRPVAYLSKKLDPVASGWPTCLKAVAAVALLLKDADKLTLGQNVTVIASHSLESIVRQPPDRWMTNARMTHYQSLLLNERVSFAPPAVLNPATLLPVESEATPVHRCSEILAEETGTRRDLKDQPLPGVPAWYTDGSSFIAEGKRRAGAAIVDGKRTVWASSLPEGTSAQKAELVALTQALRLAEGKDINIYTDSRYAFATAHIHGAIYKQRGWLTSAGKDIKNKEEILALLEAIHLPKRVAIIHCPGHQKGNDPVATGNRRADEAAKQAALSTRVLAETTKPAGKRTADGSEFEKRTADGSEFESPKKKAKVE

SEQ ID NO: 943 - protein, 2089 aa, synthetic construct
MPAAKRVKLDGGDKKYSIGLDIGTNSVGWAVITDEYKVPSKKFKVLGNTDRHSIKKNLIGALLFDSGETAEATRLKRTARRRYTRRKNRICYLQEIFSNEMAKVDDSFFHRLEESFLVEEDKKHERHPIFGNIVDEVAYHEKYPTIYHLRKKLVDSTDKADLRLIYLALAHMIKFRGHFLIEGDLNPDNSDVDKLFIQLVQTYNQLFEENPINASGVDAKAILSARLSKSRRLENLIAQLPGEKKNGLFGNLIALSLGLTPNFKSNFDLAEDAKLQLSKDTYDDDLDNLLAQIGDQYADLFLAAKNLSDAILLSDILRVNTEITKAPLSASMIKRYDEHHQDLTLLKALVRQQLPEKYKEIFFDQSKNGYAGYIDGGASQEEFYKFIKPILEKMDGTEELLVKLNREDLLRKQRTFDNGSIPHQIHLGELHAILRRQEDFYPFLKDNREKIEKILTFRIPYYVGPLARGNSRFAWMTRKSEETITPWNFEEVVDKGASAQSFIERMTNFDKNLPNEKVLPKHSLLYEYFTVYNELTKVKYVTEGMRKPAFLSGEQKKAIVDLLFKTNRKVTVKQLKEDYFKKIECFDSVEISGVEDRFNASLGTYHDLLKIIKDKDFLDNEENEDILEDIVLTLTLFEDREMIEERLKTYAHLFDDKVMKQLKRRRYTGWGRLSRKLINGIRDKQSGKTILDFLKSDGFANRNFMQLIHDDSLTFKEDIQKAQVSGQGDSLHEHIANLAGSPAIKKGILQTVKVVDELVKVMGRHKPENIVIEMARENQTTQKGQKNSRERMKRIEEGIKELGSQILKEHPVENTQLQNEKLYLYYLQNGRDMYVDQELDINRLSDYDVDHIVPQSFLKDDSIDNKVLTRSDKARGKSDNVPSEEVVKKMKNYWRQLLNAKLITQRKFDNLTKAERGGLSELDKAGFIKRQLVETRQITKHVAQILDSRMNTKYDENDKLIREVKVITLKSKLVSDFRKDFQFYKVREINNYHHAHDAYLNAVVGTALIKKYPKLESEFVYGDYKVYDVRKMIAKSEQEIGKATAKYFFYSNIMNFFKTEITLANGEIRKRPLIETNGETGEIVWDKGRDFATVRKVLSMPQVNIVKKTEVQTGGFSKESILPKRNSDKLIARKKDWDPKKYGGFDSPTVAYSVLVVAKVEKGKSKKLKSVKELLGITIMERSSFEKNPIDFLEAKGYKEVKKDLIIKLPKYSLFELENGRKRMLASAGELQKGNELALPSKYVNFLYLASHYEKLKGSPEDNEQKQLFVEQHKHYLDEIIEQISEFSKRVILADANLDKVLSAYNKHRDKPIREQAENIIHLFTLTNLGAPAAFKYFDTTIDRKRYTSTKEVLDATLIHQSITGLYETRIDLSQLGGDGGPAPGGSGGVLNLEEEYRLHEKPVPSSIDPSWLQLFPTVWAERAGMGLANQVPPVVVELRSGASPVAVRQYPMSKEAREGIRPHIQRFLDLGVLVPCQSPWNTPLLPVKKPGTNDYRPVQDLREINKRVQDIHPTVPNPYNLLSSLPPSHTWYSVLDLKDAFFCLKLHPNSQPLFAFEWRDPEKGNTGQLTWTRLPQGFKNSPTLFNEALHRDLAPFRALNPQVVLLQYVDDLLVAAPTYRDCKEGTQKLLQELSKLGYRVSAKKAQLCQKEVTYLGYLLKEGKRWLTPARKATVMKIPPPTTPRQVREFLGKAGFCRLFIPGFASLAAPLYPLTKPSIPFIWTEEHQKAFDRIKEALLSAPALALPDLTKPFTLYVDERAGVARGVLTQTLGPWRRPVAYLSKKLDPVASGWPTCLKAVAAVALLLKDADKLTLGQNVTVIASHSLESIVRQPPDRWMTNARMTHYQSLLLNERVSFAPPAVLNPATLLPVESEATPVHRCSEILAEETGTRRDLKDQPLPGVPAWYTDGSSFIAEGKRRAGAAIVDGKRTVWASSLPEGTSAQKAELVALTQALRLAEGKDINIYTDSRYAFATAHIHGAIYKQRGWLTSAGKDIKNKEEILALLEAIHLPKRVAIIHCPGHQKGNDPVATGNRRADEAAKQAALSTRVLAETTKPAGKRTADGSEFEKRTADGSEFESPKKKAKVE

SEQ ID NO: 944 - protein, 2094 aa, synthetic construct
MPAAKRVKLDGGDKKYSIGLDIGTNSVGWAVITDEYKVPSKKFKVLGNTDRHSIKKNLIGALLFDSGETAEATRLKRTARRRYTRRKNRICYLQEIFSNEMAKVDDSFFHRLEESFLVEEDKKHERHPIFGNIVDEVAYHEKYPTIYHLRKKLVDSTDKADLRLIYLALAHMIKFRGHFLIEGDLNPDNSDVDKLFIQLVQTYNQLFEENPINASGVDAKAILSARLSKSRRLENLIAQLPGEKKNGLFGNLIALSLGLTPNFKSNFDLAEDAKLQLSKDTYDDDLDNLLAQIGDQYADLFLAAKNLSDAILLSDILRVNTEITKAPLSASMIKRYDEHHQDLTLLKALVRQQLPEKYKEIFFDQSKNGYAGYIDGGASQEEFYKFIKPILEKMDGTEELLVKLNREDLLRKQRTFDNGSIPHQIHLGELHAILRRQEDFYPFLKDNREKIEKILTFRIPYYVGPLARGNSRFAWMTRKSEETITPWNFEEVVDKGASAQSFIERMTNFDKNLPNEKVLPKHSLLYEYFTVYNELTKVKYVTEGMRKPAFLSGEQKKAIVDLLFKTNRKVTVKQLKEDYFKKIECFDSVEISGVEDRFNASLGTYHDLLKIIKDKDFLDNEENEDILEDIVLTLTLFEDREMIEERLKTYAHLFDDKVMKQLKRRRYTGWGRLSRKLINGIRDKQSGKTILDFLKSDGFANRNFMQLIHDDSLTFKEDIQKAQVSGQGDSLHEHIANLAGSPAIKKGILQTVKVVDELVKVMGRHKPENIVIEMARENQTTQKGQKNSRERMKRIEEGIKELGSQILKEHPVENTQLQNEKLYLYYLQNGRDMYVDQELDINRLSDYDVDHIVPQSFLKDDSIDNKVLTRSDKARGKSDNVPSEEVVKKMKNYWRQLLNAKLITQRKFDNLTKAERGGLSELDKAGFIKRQLVETRQITKHVAQILDSRMNTKYDENDKLIREVKVITLKSKLVSDFRKDFQFYKVREINNYHHAHDAYLNAVVGTALIKKYPKLESEFVYGDYKVYDVRKMIAKSEQEIGKATAKYFFYSNIMNFFKTEITLANGEIRKRPLIETNGETGEIVWDKGRDFATVRKVLSMPQVNIVKKTEVQTGGFSKESILPKRNSDKLIARKKDWDPKKYGGFDSPTVAYSVLVVAKVEKGKSKKLKSVKELLGITIMERSSFEKNPIDFLEAKGYKEVKKDLIIKLPKYSLFELENGRKRMLASAGELQKGNELALPSKYVNFLYLASHYEKLKGSPEDNEQKQLFVEQHKHYLDEIIEQISEFSKRVILADANLDKVLSAYNKHRDKPIREQAENIIHLFTLTNLGAPAAFKYFDTTIDRKRYTSTKEVLDATLIHQSITGLYETRIDLSQLGGDGGGSSPAPEAAAKGGVLNLEEEYRLHEKPVPSSIDPSWLQLFPTVWAERAGMGLANQVPPVVVELRSGASPVAVRQYPMSKEAREGIRPHIQRFLDLGVLVPCQSPWNTPLLPVKKPGTNDYRPVQDLREINKRVQDIHPTVPNPYNLLSSLPPSHTWYSVLDLKDAFFCLKLHPNSQPLFAFEWRDPEKGNTGQLTWTRLPQGFKNSPTLFNEALHRDLAPFRALNPQVVLLQYVDDLLVAAPTYRDCKEGTQKLLQELSKLGYRVSAKKAQLCQKEVTYLGYLLKEGKRWLTPARKATVMKIPPPTTPRQVREFLGKAGFCRLFIPGFASLAAPLYPLTKPSIPFIWTEEHQKAFDRIKEALLSAPALALPDLTKPFTLYVDERAGVARGVLTQTLGPWRRPVAYLSKKLDPVASGWPTCLKAVAAVALLLKDADKLTLGQNVTVIASHSLESIVRQPPDRWMTNARMTHYQSLLLNERVSFAPPAVLNPATLLPVESEATPVHRCSEILAEETGTRRDLKDQPLPGVPAWYTDGSSFIAEGKRRAGAAIVDGKRTVWASSLPEGTSAQKAELVALTQALRLAEGKDINIYTDSRYAFATAHIHGAIYKQRGWLTSAGKDIKNKEEILALLEAIHLPKRVAIIHCPGHQKGNDPVATGNRRADEAAKQAALSTRVLAETTKPAGKRTADGSEFEKRTADGSEFESPKKKAKVE

SEQ ID NO: 945 - protein, 2093 aa, synthetic construct
MPAAKRVKLDGGDKKYSIGLDIGTNSVGWAVITDEYKVPSKKFKVLGNTDRHSIKKNLIGALLFDSGETAEATRLKRTARRRYTRRKNRICYLQEIFSNEMAKVDDSFFHRLEESFLVEEDKKHERHPIFGNIVDEVAYHEKYPTIYHLRKKLVDSTDKADLRLIYLALAHMIKFRGHFLIEGDLNPDNSDVDKLFIQLVQTYNQLFEENPINASGVDAKAILSARLSKSRRLENLIAQLPGEKKNGLFGNLIALSLGLTPNFKSNFDLAEDAKLQLSKDTYDDDLDNLLAQIGDQYADLFLAAKNLSDAILLSDILRVNTEITKAPLSASMIKRYDEHHQDLTLLKALVRQQLPEKYKEIFFDQSKNGYAGYIDGGASQEEFYKFIKPILEKMDGTEELLVKLNREDLLRKQRTFDNGSIPHQIHLGELHAILRRQEDFYPFLKDNREKIEKILTFRIPYYVGPLARGNSRFAWMTRKSEETITPWNFEEVVDKGASAQSFIERMTNFDKNLPNEKVLPKHSLLYEYFTVYNELTKVKYVTEGMRKPAFLSGEQKKAIVDLLFKTNRKVTVKQLKEDYFKKIECFDSVEISGVEDRFNASLGTYHDLLKIIKDKDFLDNEENEDILEDIVLTLTLFEDREMIEERLKTYAHLFDDKVMKQLKRRRYTGWGRLSRKLINGIRDKQSGKTILDFLKSDGFANRNFMQLIHDDSLTFKEDIQKAQVSGQGDSLHEHIANLAGSPAIKKGILQTVKVVDELVKVMGRHKPENIVIEMARENQTTQKGQKNSRERMKRIEEGIKELGSQILKEHPVENTQLQNEKLYLYYLQNGRDMYVDQELDINRLSDYDVDHIVPQSFLKDDSIDNKVLTRSDKARGKSDNVPSEEVVKKMKNYWRQLLNAKLITQRKFDNLTKAERGGLSELDKAGFIKRQLVETRQITKHVAQILDSRMNTKYDENDKLIREVKVITLKSKLVSDFRKDFQFYKVREINNYHHAHDAYLNAVVGTALIKKYPKLESEFVYGDYKVYDVRKMIAKSEQEIGKATAKYFFYSNIMNFFKTEITLANGEIRKRPLIETNGETGEIVWDKGRDFATVRKVLSMPQVNIVKKTEVQTGGFSKESILPKRNSDKLIARKKDWDPKKYGGFDSPTVAYSVLVVAKVEKGKSKKLKSVKELLGITIMERSSFEKNPIDFLEAKGYKEVKKDLIIKLPKYSLFELENGRKRMLASAGELQKGNELALPSKYVNFLYLASHYEKLKGSPEDNEQKQLFVEQHKHYLDEIIEQISEFSKRVILADANLDKVLSAYNKHRDKPIREQAENIIHLFTLTNLGAPAAFKYFDTTIDRKRYTSTKEVLDATLIHQSITGLYETRIDLSQLGGDGGGGGGSGGGGSGGVLNLEEEYRLHEKPVPSSIDPSWLQLFPTVWAERAGMGLANQVPPVVVELRSGASPVAVRQYPMSKEAREGIRPHIQRFLDLGVLVPCQSPWNTPLLPVKKPGTNDYRPVQDLREINKRVQDIHPTVPNPYNLLSSLPPSHTWYSVLDLKDAFFCLKLHPNSQPLFAFEWRDPEKGNTGQLTWTRLPQGFKNSPTLFNEALHRDLAPFRALNPQVVLLQYVDDLLVAAPTYRDCKEGTQKLLQELSKLGYRVSAKKAQLCQKEVTYLGYLLKEGKRWLTPARKATVMKIPPPTTPRQVREFLGKAGFCRLFIPGFASLAAPLYPLTKPSIPFIWTEEHQKAFDRIKEALLSAPALALPDLTKPFTLYVDERAGVARGVLTQTLGPWRRPVAYLSKKLDPVASGWPTCLKAVAAVALLLKDADKLTLGQNVTVIASHSLESIVRQPPDRWMTNARMTHYQSLLLNERVSFAPPAVLNPATLLPVESEATPVHRCSEILAEETGTRRDLKDQPLPGVPAWYTDGSSFIAEGKRRAGAAIVDGKRTVWASSLPEGTSAQKAELVALTQALRLAEGKDINIYTDSRYAFATAHIHGAIYKQRGWLTSAGKDIKNKEEILALLEAIHLPKRVAIIHCPGHQKGNDPVATGNRRADEAAKQAALSTRVLAETTKPAGKRTADGSEFEKRTADGSEFESPKKKAKVE

SEQ ID NO: 946 - protein, 2092 aa, synthetic construct
MPAAKRVKLDGGDKKYSIGLDIGTNSVGWAVITDEYKVPSKKFKVLGNTDRHSIKKNLIGALLFDSGETAEATRLKRTARRRYTRRKNRICYLQEIFSNEMAKVDDSFFHRLEESFLVEEDKKHERHPIFGNIVDEVAYHEKYPTIYHLRKKLVDSTDKADLRLIYLALAHMIKFRGHFLIEGDLNPDNSDVDKLFIQLVQTYNQLFEENPINASGVDAKAILSARLSKSRRLENLIAQLPGEKKNGLFGNLIALSLGLTPNFKSNFDLAEDAKLQLSKDTYDDDLDNLLAQIGDQYADLFLAAKNLSDAILLSDILRVNTEITKAPLSASMIKRYDEHHQDLTLLKALVRQQLPEKYKEIFFDQSKNGYAGYIDGGASQEEFYKFIKPILEKMDGTEELLVKLNREDLLRKQRTFDNGSIPHQIHLGELHAILRRQEDFYPFLKDNREKIEKILTFRIPYYVGPLARGNSRFAWMTRKSEETITPWNFEEVVDKGASAQSFIERMTNFDKNLPNEKVLPKHSLLYEYFTVYNELTKVKYVTEGMRKPAFLSGEQKKAIVDLLFKTNRKVTVKQLKEDYFKKIECFDSVEISGVEDRFNASLGTYHDLLKIIKDKDFLDNEENEDILEDIVLTLTLFEDREMIEERLKTYAHLFDDKVMKQLKRRRYTGWGRLSRKLINGIRDKQSGKTILDFLKSDGFANRNFMQLIHDDSLTFKEDIQKAQVSGQGDSLHEHIANLAGSPAIKKGILQTVKVVDELVKVMGRHKPENIVIEMARENQTTQKGQKNSRERMKRIEEGIKELGSQILKEHPVENTQLQNEKLYLYYLQNGRDMYVDQELDINRLSDYDVDHIVPQSFLKDDSIDNKVLTRSDKARGKSDNVPSEEVVKKMKNYWRQLLNAKLITQRKFDNLTKAERGGLSELDKAGFIKRQLVETRQITKHVAQILDSRMNTKYDENDKLIREVKVITLKSKLVSDFRKDFQFYKVREINNYHHAHDAYLNAVVGTALIKKYPKLESEFVYGDYKVYDVRKMIAKSEQEIGKATAKYFFYSNIMNFFKTEITLANGEIRKRPLIETNGETGEIVWDKGRDFATVRKVLSMPQVNIVKKTEVQTGGFSKESILPKRNSDKLIARKKDWDPKKYGGFDSPTVAYSVLVVAKVEKGKSKKLKSVKELLGITIMERSSFEKNPIDFLEAKGYKEVKKDLIIKLPKYSLFELENGRKRMLASAGELQKGNELALPSKYVNFLYLASHYEKLKGSPEDNEQKQLFVEQHKHYLDEIIEQISEFSKRVILADANLDKVLSAYNKHRDKPIREQAENIIHLFTLTNLGAPAAFKYFDTTIDRKRYTSTKEVLDATLIHQSITGLYETRIDLSQLGGDGGGGGGSSGGSGGVLNLEEEYRLHEKPVPSSIDPSWLQLFPTVWAERAGMGLANQVPPVVVELRSGASPVAVRQYPMSKEAREGIRPHIQRFLDLGVLVPCQSPWNTPLLPVKKPGTNDYRPVQDLREINKRVQDIHPTVPNPYNLLSSLPPSHTWYSVLDLKDAFFCLKLHPNSQPLFAFEWRDPEKGNTGQLTWTRLPQGFKNSPTLFNEALHRDLAPFRALNPQVVLLQYVDDLLVAAPTYRDCKEGTQKLLQELSKLGYRVSAKKAQLCQKEVTYLGYLLKEGKRWLTPARKATVMKIPPPTTPRQVREFLGKAGFCRLFIPGFASLAAPLYPLTKPSIPFIWTEEHQKAFDRIKEALLSAPALALPDLTKPFTLYVDERAGVARGVLTQTLGPWRRPVAYLSKKLDPVASGWPTCLKAVAAVALLLKDADKLTLGQNVTVIASHSLESIVRQPPDRWMTNARMTHYQSLLLNERVSFAPPAVLNPATLLPVESEATPVHRCSEILAEETGTRRDLKDQPLPGVPAWYTDGSSFIAEGKRRAGAAIVDGKRTVWASSLPEGTSAQKAELVALTQALRLAEGKDINIYTDSRYAFATAHIHGAIYKQRGWLTSAGKDIKNKEEILALLEAIHLPKRVAIIHCPGHQKGNDPVATGNRRADEAAKQAALSTRVLAETTKPAGKRTADGSEFEKRTADGSEFESPKKKAKVE

SEQ ID NO: 947 - protein, 2091 aa, synthetic construct
MPAAKRVKLDGGDKKYSIGLDIGTNSVGWAVITDEYKVPSKKFKVLGNTDRHSIKKNLIGALLFDSGETAEATRLKRTARRRYTRRKNRICYLQEIFSNEMAKVDDSFFHRLEESFLVEEDKKHERHPIFGNIVDEVAYHEKYPTIYHLRKKLVDSTDKADLRLIYLALAHMIKFRGHFLIEGDLNPDNSDVDKLFIQLVQTYNQLFEENPINASGVDAKAILSARLSKSRRLENLIAQLPGEKKNGLFGNLIALSLGLTPNFKSNFDLAEDAKLQLSKDTYDDDLDNLLAQIGDQYADLFLAAKNLSDAILLSDILRVNTEITKAPLSASMIKRYDEHHQDLTLLKALVRQQLPEKYKEIFFDQSKNGYAGYIDGGASQEEFYKFIKPILEKMDGTEELLVKLNREDLLRKQRTFDNGSIPHQIHLGELHAILRRQEDFYPFLKDNREKIEKILTFRIPYYVGPLARGNSRFAWMTRKSEETITPWNFEEVVDKGASAQSFIERMTNFDKNLPNEKVLPKHSLLYEYFTVYNELTKVKYVTEGMRKPAFLSGEQKKAIVDLLFKTNRKVTVKQLKEDYFKKIECFDSVEISGVEDRFNASLGTYHDLLKIIKDKDFLDNEENEDILEDIVLTLTLFEDREMIEERLKTYAHLFDDKVMKQLKRRRYTGWGRLSRKLINGIRDKQSGKTILDFLKSDGFANRNFMQLIHDDSLTFKEDIQKAQVSGQGDSLHEHIANLAGSPAIKKGILQTVKVVDELVKVMGRHKPENIVIEMARENQTTQKGQKNSRERMKRIEEGIKELGSQILKEHPVENTQLQNEKLYLYYLQNGRDMYVDQELDINRLSDYDVDHIVPQSFLKDDSIDNKVLTRSDKARGKSDNVPSEEVVKKMKNYWRQLLNAKLITQRKFDNLTKAERGGLSELDKAGFIKRQLVETRQITKHVAQILDSRMNTKYDENDKLIREVKVITLKSKLVSDFRKDFQFYKVREINNYHHAHDAYLNAVVGTALIKKYPKLESEFVYGDYKVYDVRKMIAKSEQEIGKATAKYFFYSNIMNFFKTEITLANGEIRKRPLIETNGETGEIVWDKGRDFATVRKVLSMPQVNIVKKTEVQTGGFSKESILPKRNSDKLIARKKDWDPKKYGGFDSPTVAYSVLVVAKVEKGKSKKLKSVKELLGITIMERSSFEKNPIDFLEAKGYKEVKKDLIIKLPKYSLFELENGRKRMLASAGELQKGNELALPSKYVNFLYLASHYEKLKGSPEDNEQKQLFVEQHKHYLDEIIEQISEFSKRVILADANLDKVLSAYNKHRDKPIREQAENIIHLFTLTNLGAPAAFKYFDTTIDRKRYTSTKEVLDATLIHQSITGLYETRIDLSQLGGDGGPAPEAAAKGGVLNLEEEYRLHEKPVPSSIDPSWLQLFPTVWAERAGMGLANQVPPVVVELRSGASPVAVRQYPMSKEAREGIRPHIQRFLDLGVLVPCQSPWNTPLLPVKKPGTNDYRPVQDLREINKRVQDIHPTVPNPYNLLSSLPPSHTWYSVLDLKDAFFCLKLHPNSQPLFAFEWRDPEKGNTGQLTWTRLPQGFKNSPTLFNEALHRDLAPFRALNPQVVLLQYVDDLLVAAPTYRDCKEGTQKLLQELSKLGYRVSAKKAQLCQKEVTYLGYLLKEGKRWLTPARKATVMKIPPPTTPRQVREFLGKAGFCRLFIPGFASLAAPLYPLTKPSIPFIWTEEHQKAFDRIKEALLSAPALALPDLTKPFTLYVDERAGVARGVLTQTLGPWRRPVAYLSKKLDPVASGWPTCLKAVAAVALLLKDADKLTLGQNVTVIASHSLESIVRQPPDRWMTNARMTHYQSLLLNERVSFAPPAVLNPATLLPVESEATPVHRCSEILAEETGTRRDLKDQPLPGVPAWYTDGSSFIAEGKRRAGAAIVDGKRTVWASSLPEGTSAQKAELVALTQALRLAEGKDINIYTDSRYAFATAHIHGAIYKQRGWLTSAGKDIKNKEEILALLEAIHLPKRVAIIHCPGHQKGNDPVATGNRRADEAAKQAALSTRVLAETTKPAGKRTADGSEFEKRTADGSEFESPKKKAKVE

SEQ ID NO: 948 - protein, 2094 aa, synthetic construct
MPAAKRVKLDGGDKKYSIGLDIGTNSVGWAVITDEYKVPSKKFKVLGNTDRHSIKKNLIGALLFDSGETAEATRLKRTARRRYTRRKNRICYLQEIFSNEMAKVDDSFFHRLEESFLVEEDKKHERHPIFGNIVDEVAYHEKYPTIYHLRKKLVDSTDKADLRLIYLALAHMIKFRGHFLIEGDLNPDNSDVDKLFIQLVQTYNQLFEENPINASGVDAKAILSARLSKSRRLENLIAQLPGEKKNGLFGNLIALSLGLTPNFKSNFDLAEDAKLQLSKDTYDDDLDNLLAQIGDQYADLFLAAKNLSDAILLSDILRVNTEITKAPLSASMIKRYDEHHQDLTLLKALVRQQLPEKYKEIFFDQSKNGYAGYIDGGASQEEFYKFIKPILEKMDGTEELLVKLNREDLLRKQRTFDNGSIPHQIHLGELHAILRRQEDFYPFLKDNREKIEKILTFRIPYYVGPLARGNSRFAWMTRKSEETITPWNFEEVVDKGASAQSFIERMTNFDKNLPNEKVLPKHSLLYEYFTVYNELTKVKYVTEGMRKPAFLSGEQKKAIVDLLFKTNRKVTVKQLKEDYFKKIECFDSVEISGVEDRFNASLGTYHDLLKIIKDKDFLDNEENEDILEDIVLTLTLFEDREMIEERLKTYAHLFDDKVMKQLKRRRYTGWGRLSRKLINGIRDKQSGKTILDFLKSDGFANRNFMQLIHDDSLTFKEDIQKAQVSGQGDSLHEHIANLAGSPAIKKGILQTVKVVDELVKVMGRHKPENIVIEMARENQTTQKGQKNSRERMKRIEEGIKELGSQILKEHPVENTQLQNEKLYLYYLQNGRDMYVDQELDINRLSDYDVDHIVPQSFLKDDSIDNKVLTRSDKARGKSDNVPSEEVVKKMKNYWRQLLNAKLITQRKFDNLTKAERGGLSELDKAGFIKRQLVETRQITKHVAQILDSRMNTKYDENDKLIREVKVITLKSKLVSDFRKDFQFYKVREINNYHHAHDAYLNAVVGTALIKKYPKLESEFVYGDYKVYDVRKMIAKSEQEIGKATAKYFFYSNIMNFFKTEITLANGEIRKRPLIETNGETGEIVWDKGRDFATVRKVLSMPQVNIVKKTEVQTGGFSKESILPKRNSDKLIARKKDWDPKKYGGFDSPTVAYSVLVVAKVEKGKSKKLKSVKELLGITIMERSSFEKNPIDFLEAKGYKEVKKDLIIKLPKYSLFELENGRKRMLASAGELQKGNELALPSKYVNFLYLASHYEKLKGSPEDNEQKQLFVEQHKHYLDEIIEQISEFSKRVILADANLDKVLSAYNKHRDKPIREQAENIIHLFTLTNLGAPAAFKYFDTTIDRKRYTSTKEVLDATLIHQSITGLYETRIDLSQLGGDGGEAAAKGSSGGSGGVLNLEEEYRLHEKPVPSSIDPSWLQLFPTVWAERAGMGLANQVPPVVVELRSGASPVAVRQYPMSKEAREGIRPHIQRFLDLGVLVPCQSPWNTPLLPVKKPGTNDYRPVQDLREINKRVQDIHPTVPNPYNLLSSLPPSHTWYSVLDLKDAFFCLKLHPNSQPLFAFEWRDPEKGNTGQLTWTRLPQGFKNSPTLFNEALHRDLAPFRALNPQVVLLQYVDDLLVAAPTYRDCKEGTQKLLQELSKLGYRVSAKKAQLCQKEVTYLGYLLKEGKRWLTPARKATVMKIPPPTTPRQVREFLGKAGFCRLFIPGFASLAAPLYPLTKPSIPFIWTEEHQKAFDRIKEALLSAPALALPDLTKPFTLYVDERAGVARGVLTQTLGPWRRPVAYLSKKLDPVASGWPTCLKAVAAVALLLKDADKLTLGQNVTVIASHSLESIVRQPPDRWMTNARMTHYQSLLLNERVSFAPPAVLNPATLLPVESEATPVHRCSEILAEETGTRRDLKDQPLPGVPAWYTDGSSFIAEGKRRAGAAIVDGKRTVWASSLPEGTSAQKAELVALTQALRLAEGKDINIYTDSRYAFATAHIHGAIYKQRGWLTSAGKDIKNKEEILALLEAIHLPKRVAIIHCPGHQKGNDPVATGNRRADEAAKQAALSTRVLAETTKPAGKRTADGSEFEKRTADGSEFESPKKKAKVE

SEQ ID NO: 949 - protein, 2090 aa, synthetic construct
MPAAKRVKLDGGDKKYSIGLDIGTNSVGWAVITDEYKVPSKKFKVLGNTDRHSIKKNLIGALLFDSGETAEATRLKRTARRRYTRRKNRICYLQEIFSNEMAKVDDSFFHRLEESFLVEEDKKHERHPIFGNIVDEVAYHEKYPTIYHLRKKLVDSTDKADLRLIYLALAHMIKFRGHFLIEGDLNPDNSDVDKLFIQLVQTYNQLFEENPINASGVDAKAILSARLSKSRRLENLIAQLPGEKKNGLFGNLIALSLGLTPNFKSNFDLAEDAKLQLSKDTYDDDLDNLLAQIGDQYADLFLAAKNLSDAILLSDILRVNTEITKAPLSASMIKRYDEHHQDLTLLKALVRQQLPEKYKEIFFDQSKNGYAGYIDGGASQEEFYKFIKPILEKMDGTEELLVKLNREDLLRKQRTFDNGSIPHQIHLGELHAILRRQEDFYPFLKDNREKIEKILTFRIPYYVGPLARGNSRFAWMTRKSEETITPWNFEEVVDKGASAQSFIERMTNFDKNLPNEKVLPKHSLLYEYFTVYNELTKVKYVTEGMRKPAFLSGEQKKAIVDLLFKTNRKVTVKQLKEDYFKKIECFDSVEISGVEDRFNASLGTYHDLLKIIKDKDFLDNEENEDILEDIVLTLTLFEDREMIEERLKTYAHLFDDKVMKQLKRRRYTGWGRLSRKLINGIRDKQSGKTILDFLKSDGFANRNFMQLIHDDSLTFKEDIQKAQVSGQGDSLHEHIANLAGSPAIKKGILQTVKVVDELVKVMGRHKPENIVIEMARENQTTQKGQKNSRERMKRIEEGIKELGSQILKEHPVENTQLQNEKLYLYYLQNGRDMYVDQELDINRLSDYDVDHIVPQSFLKDDSIDNKVLTRSDKARGKSDNVPSEEVVKKMKNYWRQLLNAKLITQRKFDNLTKAERGGLSELDKAGFIKRQLVETRQITKHVAQILDSRMNTKYDENDKLIREVKVITLKSKLVSDFRKDFQFYKVREINNYHHAHDAYLNAVVGTALIKKYPKLESEFVYGDYKVYDVRKMIAKSEQEIGKATAKYFFYSNIMNFFKTEITLANGEIRKRPLIETNGETGEIVWDKGRDFATVRKVLSMPQVNIVKKTEVQTGGFSKESILPKRNSDKLIARKKDWDPKKYGGFDSPTVAYSVLVVAKVEKGKSKKLKSVKELLGITIMERSSFEKNPIDFLEAKGYKEVKKDLIIKLPKYSLFELENGRKRMLASAGELQKGNELALPSKYVNFLYLASHYEKLKGSPEDNEQKQLFVEQHKHYLDEIIEQISEFSKRVILADANLDKVLSAYNKHRDKPIREQAENIIHLFTLTNLGAPAAFKYFDTTIDRKRYTSTKEVLDATLIHQSITGLYETRIDLSQLGGDGGPAPAPAPGGVLNLEEEYRLHEKPVPSSIDPSWLQLFPTVWAERAGMGLANQVPPVVVELRSGASPVAVRQYPMSKEAREGIRPHIQRFLDLGVLVPCQSPWNTPLLPVKKPGTNDYRPVQDLREINKRVQDIHPTVPNPYNLLSSLPPSHTWYSVLDLKDAFFCLKLHPNSQPLFAFEWRDPEKGNTGQLTWTRLPQGFKNSPTLFNEALHRDLAPFRALNPQVVLLQYVDDLLVAAPTYRDCKEGTQKLLQELSKLGYRVSAKKAQLCQKEVTYLGYLLKEGKRWLTPARKATVMKIPPPTTPRQVREFLGKAGFCRLFIPGFASLAAPLYPLTKPSIPFIWTEEHQKAFDRIKEALLSAPALALPDLTKPFTLYVDERAGVARGVLTQTLGPWRRPVAYLSKKLDPVASGWPTCLKAVAAVALLLKDADKLTLGQNVTVIASHSLESIVRQPPDRWMTNARMTHYQSLLLNERVSFAPPAVLNPATLLPVESEATPVHRCSEILAEETGTRRDLKDQPLPGVPAWYTDGSSFIAEGKRRAGAAIVDGKRTVWASSLPEGTSAQKAELVALTQALRLAEGKDINIYTDSRYAFATAHIHGAIYKQRGWLTSAGKDIKNKEEILALLEAIHLPKRVAIIHCPGHQKGNDPVATGNRRADEAAKQAALSTRVLAETTKPAGKRTADGSEFEKRTADGSEFESPKKKAKVE

SEQ ID NO: 950 - protein, 2089 aa, synthetic construct
MPAAKRVKLDGGDKKYSIGLDIGTNSVGWAVITDEYKVPSKKFKVLGNTDRHSIKKNLIGALLFDSGETAEATRLKRTARRRYTRRKNRICYLQEIFSNEMAKVDDSFFHRLEESFLVEEDKKHERHPIFGNIVDEVAYHEKYPTIYHLRKKLVDSTDKADLRLIYLALAHMIKFRGHFLIEGDLNPDNSDVDKLFIQLVQTYNQLFEENPINASGVDAKAILSARLSKSRRLENLIAQLPGEKKNGLFGNLIALSLGLTPNFKSNFDLAEDAKLQLSKDTYDDDLDNLLAQIGDQYADLFLAAKNLSDAILLSDILRVNTEITKAPLSASMIKRYDEHHQDLTLLKALVRQQLPEKYKEIFFDQSKNGYAGYIDGGASQEEFYKFIKPILEKMDGTEELLVKLNREDLLRKQRTFDNGSIPHQIHLGELHAILRRQEDFYPFLKDNREKIEKILTFRIPYYVGPLARGNSRFAWMTRKSEETITPWNFEEVVDKGASAQSFIERMTNFDKNLPNEKVLPKHSLLYEYFTVYNELTKVKYVTEGMRKPAFLSGEQKKAIVDLLFKTNRKVTVKQLKEDYFKKIECFDSVEISGVEDRFNASLGTYHDLLKIIKDKDFLDNEENEDILEDIVLTLTLFEDREMIEERLKTYAHLFDDKVMKQLKRRRYTGWGRLSRKLINGIRDKQSGKTILDFLKSDGFANRNFMQLIHDDSLTFKEDIQKAQVSGQGDSLHEHIANLAGSPAIKKGILQTVKVVDELVKVMGRHKPENIVIEMARENQTTQKGQKNSRERMKRIEEGIKELGSQILKEHPVENTQLQNEKLYLYYLQNGRDMYVDQELDINRLSDYDVDHIVPQSFLKDDSIDNKVLTRSDKARGKSDNVPSEEVVKKMKNYWRQLLNAKLITQRKFDNLTKAERGGLSELDKAGFIKRQLVETRQITKHVAQILDSRMNTKYDENDKLIREVKVITLKSKLVSDFRKDFQFYKVREINNYHHAHDAYLNAVVGTALIKKYPKLESEFVYGDYKVYDVRKMIAKSEQEIGKATAKYFFYSNIMNFFKTEITLANGEIRKRPLIETNGETGEIVWDKGRDFATVRKVLSMPQVNIVKKTEVQTGGFSKESILPKRNSDKLIARKKDWDPKKYGGFDSPTVAYSVLVVAKVEKGKSKKLKSVKELLGITIMERSSFEKNPIDFLEAKGYKEVKKDLIIKLPKYSLFELENGRKRMLASAGELQKGNELALPSKYVNFLYLASHYEKLKGSPEDNEQKQLFVEQHKHYLDEIIEQISEFSKRVILADANLDKVLSAYNKHRDKPIREQAENIIHLFTLTNLGAPAAFKYFDTTIDRKRYTSTKEVLDATLIHQSITGLYETRIDLSQLGGDGGGSSGGSGGVLNLEEEYRLHEKPVPSSIDPSWLQLFPTVWAERAGMGLANQVPPVVVELRSGASPVAVRQYPMSKEAREGIRPHIQRFLDLGVLVPCQSPWNTPLLPVKKPGTNDYRPVQDLREINKRVQDIHPTVPNPYNLLSSLPPSHTWYSVLDLKDAFFCLKLHPNSQPLFAFEWRDPEKGNTGQLTWTRLPQGFKNSPTLFNEALHRDLAPFRALNPQVVLLQYVDDLLVAAPTYRDCKEGTQKLLQELSKLGYRVSAKKAQLCQKEVTYLGYLLKEGKRWLTPARKATVMKIPPPTTPRQVREFLGKAGFCRLFIPGFASLAAPLYPLTKPSIPFIWTEEHQKAFDRIKEALLSAPALALPDLTKPFTLYVDERAGVARGVLTQTLGPWRRPVAYLSKKLDPVASGWPTCLKAVAAVALLLKDADKLTLGQNVTVIASHSLESIVRQPPDRWMTNARMTHYQSLLLNERVSFAPPAVLNPATLLPVESEATPVHRCSEILAEETGTRRDLKDQPLPGVPAWYTDGSSFIAEGKRRAGAAIVDGKRTVWASSLPEGTSAQKAELVALTQALRLAEGKDINIYTDSRYAFATAHIHGAIYKQRGWLTSAGKDIKNKEEILALLEAIHLPKRVAIIHCPGHQKGNDPVATGNRRADEAAKQAALSTRVLAETTKPAGKRTADGSEFEKRTADGSEFESPKKKAKVE

SEQ ID NO: 951 - protein, 2131 aa, synthetic construct
MPAAKRVKLDGGDKKYSIGLDIGTNSVGWAVITDEYKVPSKKFKVLGNTDRHSIKKNLIGALLFDSGETAEATRLKRTARRRYTRRKNRICYLQEIFSNEMAKVDDSFFHRLEESFLVEEDKKHERHPIFGNIVDEVAYHEKYPTIYHLRKKLVDSTDKADLRLIYLALAHMIKFRGHFLIEGDLNPDNSDVDKLFIQLVQTYNQLFEENPINASGVDAKAILSARLSKSRRLENLIAQLPGEKKNGLFGNLIALSLGLTPNFKSNFDLAEDAKLQLSKDTYDDDLDNLLAQIGDQYADLFLAAKNLSDAILLSDILRVNTEITKAPLSASMIKRYDEHHQDLTLLKALVRQQLPEKYKEIFFDQSKNGYAGYIDGGASQEEFYKFIKPILEKMDGTEELLVKLNREDLLRKQRTFDNGSIPHQIHLGELHAILRRQEDFYPFLKDNREKIEKILTFRIPYYVGPLARGNSRFAWMTRKSEETITPWNFEEVVDKGASAQSFIERMTNFDKNLPNEKVLPKHSLLYEYFTVYNELTKVKYVTEGMRKPAFLSGEQKKAIVDLLFKTNRKVTVKQLKEDYFKKIECFDSVEISGVEDRFNASLGTYHDLLKIIKDKDFLDNEENEDILEDIVLTLTLFEDREMIEERLKTYAHLFDDKVMKQLKRRRYTGWGRLSRKLINGIRDKQSGKTILDFLKSDGFANRNFMQLIHDDSLTFKEDIQKAQVSGQGDSLHEHIANLAGSPAIKKGILQTVKVVDELVKVMGRHKPENIVIEMARENQTTQKGQKNSRERMKRIEEGIKELGSQILKEHPVENTQLQNEKLYLYYLQNGRDMYVDQELDINRLSDYDVDHIVPQSFLKDDSIDNKVLTRSDKARGKSDNVPSEEVVKKMKNYWRQLLNAKLITQRKFDNLTKAERGGLSELDKAGFIKRQLVETRQITKHVAQILDSRMNTKYDENDKLIREVKVITLKSKLVSDFRKDFQFYKVREINNYHHAHDAYLNAVVGTALIKKYPKLESEFVYGDYKVYDVRKMIAKSEQEIGKATAKYFFYSNIMNFFKTEITLANGEIRKRPLIETNGETGEIVWDKGRDFATVRKVLSMPQVNIVKKTEVQTGGFSKESILPKRNSDKLIARKKDWDPKKYGGFDSPTVAYSVLVVAKVEKGKSKKLKSVKELLGITIMERSSFEKNPIDFLEAKGYKEVKKDLIIKLPKYSLFELENGRKRMLASAGELQKGNELALPSKYVNFLYLASHYEKLKGSPEDNEQKQLFVEQHKHYLDEIIEQISEFSKRVILADANLDKVLSAYNKHRDKPIREQAENIIHLFTLTNLGAPAAFKYFDTTIDRKRYTSTKEVLDATLIHQSITGLYETRIDLSQLGGDGGAEAAAKEAAAKEAAAKEAAAKALEAEAAAKEAAAKEAAAKEAAAKAGGTLNIEDEYRLHETSKEPDVPLGSTWLSDFPQAWAETGGMGLAVRQAPLIIPLKATSTPVSIKQYPMSQEARLGIKPHIQRLLDQGILVPCQSPWNTPLLPVKKPGTNDYRPVQDLREVNKRVEDIHPTVPNPYNLLSGLPPSHQWYTVLDLKDAFFCLRLHPTSQPLFAFEWRDPEMGISGQLTWTRLPQGFKNSPTLFDEALHRDLADFRIQHPDLILLQYVDDLLLAATSEQDCQRGTRALLQTLGNLGYRASAKKAQICQKQVKYLGYLLKEGQRWLTEARKETVMGQPTPKTPRQLREFLGTAGFCRLWIPGFAEMAAPLYPLTKTGTLFNWGPDQQKAYQEIKQALLTAPALGLPDLTKPFELFVDEKQGYAKGVLTQKLGPWRRPVAYLSKKLDPVAAGWPPCLRMVAAIAVLTKDAGKLTMGQPLVILAPHAVEALVKQPPDRWLSNARMTHYQAMLLDTDRVQFGPVVALNPATLLPLPEKEAPHDCLEILAETHGTRPDLTDQPIPDADYTWYTDGSSFLQEGQRRAGAAVTTETEVIWARALPAGTSAQRAELIALTQALKMAEGKKLNVYTDSRYAFATAHVHGEIYRRRGLLTSEGREIKNKNEILALLKALFLPKRLSIIHCPGHQKGNSAEARGNRMADQAAREAAMKAVLETSTLLAGKRTADGSEFEKRTADGSEFESPKKKAKVE

SEQ ID NO: 952 - protein, 2118 aa, synthetic construct
MPAAKRVKLDGGDKKYSIGLDIGTNSVGWAVITDEYKVPSKKFKVLGNTDRHSIKKNLIGALLFDSGETAEATRLKRTARRRYTRRKNRICYLQEIFSNEMAKVDDSFFHRLEESFLVEEDKKHERHPIFGNIVDEVAYHEKYPTIYHLRKKLVDSTDKADLRLIYLALAHMIKFRGHFLIEGDLNPDNSDVDKLFIQLVQTYNQLFEENPINASGVDAKAILSARLSKSRRLENLIAQLPGEKKNGLFGNLIALSLGLTPNFKSNFDLAEDAKLQLSKDTYDDDLDNLLAQIGDQYADLFLAAKNLSDAILLSDILRVNTEITKAPLSASMIKRYDEHHQDLTLLKALVRQQLPEKYKEIFFDQSKNGYAGYIDGGASQEEFYKFIKPILEKMDGTEELLVKLNREDLLRKQRTFDNGSIPHQIHLGELHAILRRQEDFYPFLKDNREKIEKILTFRIPYYVGPLARGNSRFAWMTRKSEETITPWNFEEVVDKGASAQSFIERMTNFDKNLPNEKVLPKHSLLYEYFTVYNELTKVKYVTEGMRKPAFLSGEQKKAIVDLLFKTNRKVTVKQLKEDYFKKIECFDSVEISGVEDRFNASLGTYHDLLKIIKDKDFLDNEENEDILEDIVLTLTLFEDREMIEERLKTYAHLFDDKVMKQLKRRRYTGWGRLSRKLINGIRDKQSGKTILDFLKSDGFANRNFMQLIHDDSLTFKEDIQKAQVSGQGDSLHEHIANLAGSPAIKKGILQTVKVVDELVKVMGRHKPENIVIEMARENQTTQKGQKNSRERMKRIEEGIKELGSQILKEHPVENTQLQNEKLYLYYLQNGRDMYVDQELDINRLSDYDVDHIVPQSFLKDDSIDNKVLTRSDKARGKSDNVPSEEVVKKMKNYWRQLLNAKLITQRKFDNLTKAERGGLSELDKAGFIKRQLVETRQITKHVAQILDSRMNTKYDENDKLIREVKVITLKSKLVSDFRKDFQFYKVREINNYHHAHDAYLNAVVGTALIKKYPKLESEFVYGDYKVYDVRKMIAKSEQEIGKATAKYFFYSNIMNFFKTEITLANGEIRKRPLIETNGETGEIVWDKGRDFATVRKVLSMPQVNIVKKTEVQTGGFSKESILPKRNSDKLIARKKDWDPKKYGGFDSPTVAYSVLVVAKVEKGKSKKLKSVKELLGITIMERSSFEKNPIDFLEAKGYKEVKKDLIIKLPKYSLFELENGRKRMLASAGELQKGNELALPSKYVNFLYLASHYEKLKGSPEDNEQKQLFVEQHKHYLDEIIEQISEFSKRVILADANLDKVLSAYNKHRDKPIREQAENIIHLFTLTNLGAPAAFKYFDTTIDRKRYTSTKEVLDATLIHQSITGLYETRIDLSQLGGDGGSGGSSGGSSGSETPGTSESATPESSGGSSGGSSGGTLNIEDEYRLHETSKEPDVPLGSTWLSDFPQAWAETGGMGLAVRQAPLIIPLKATSTPVSIKQYPMSQEARLGIKPHIQRLLDQGILVPCQSPWNTPLLPVKKPGTNDYRPVQDLREVNKRVEDIHPTVPNPYNLLSGLPPSHQWYTVLDLKDAFFCLRLHPTSQPLFAFEWRDPEMGISGQLTWTRLPQGFKNSPTLFDEALHRDLADFRIQHPDLILLQYVDDLLLAATSEQDCQRGTRALLQTLGNLGYRASAKKAQICQKQVKYLGYLLKEGQRWLTEARKETVMGQPTPKTPRQLREFLGTAGFCRLWIPGFAEMAAPLYPLTKTGTLFNWGPDQQKAYQEIKQALLTAPALGLPDLTKPFELFVDEKQGYAKGVLTQKLGPWRRPVAYLSKKLDPVAAGWPPCLRMVAAIAVLTKDAGKLTMGQPLVILAPHAVEALVKQPPDRWLSNARMTHYQAMLLDTDRVQFGPVVALNPATLLPLPEKEAPHDCLEILAETHGTRPDLTDQPIPDADYTWYTDGSSFLQEGQRRAGAAVTTETEVIWARALPAGTSAQRAELIALTQALKMAEGKKLNVYTDSRYAFATAHVHGEIYRRRGLLTSEGREIKNKNEILALLKALFLPKRLSIIHCPGHQKGNSAEARGNRMADQAAREAAMKAVLETSTLLAGKRTADGSEFEKRTADGSEFESPKKKAKVE

SEQ ID NO: 953 - protein, 2105 aa, synthetic construct
MPAAKRVKLDGGDKKYSIGLDIGTNSVGWAVITDEYKVPSKKFKVLGNTDRHSIKKNLIGALLFDSGETAEATRLKRTARRRYTRRKNRICYLQEIFSNEMAKVDDSFFHRLEESFLVEEDKKHERHPIFGNIVDEVAYHEKYPTIYHLRKKLVDSTDKADLRLIYLALAHMIKFRGHFLIEGDLNPDNSDVDKLFIQLVQTYNQLFEENPINASGVDAKAILSARLSKSRRLENLIAQLPGEKKNGLFGNLIALSLGLTPNFKSNFDLAEDAKLQLSKDTYDDDLDNLLAQIGDQYADLFLAAKNLSDAILLSDILRVNTEITKAPLSASMIKRYDEHHQDLTLLKALVRQQLPEKYKEIFFDQSKNGYAGYIDGGASQEEFYKFIKPILEKMDGTEELLVKLNREDLLRKQRTFDNGSIPHQIHLGELHAILRRQEDFYPFLKDNREKIEKILTFRIPYYVGPLARGNSRFAWMTRKSEETITPWNFEEVVDKGASAQSFIERMTNFDKNLPNEKVLPKHSLLYEYFTVYNELTKVKYVTEGMRKPAFLSGEQKKAIVDLLFKTNRKVTVKQLKEDYFKKIECFDSVEISGVEDRFNASLGTYHDLLKIIKDKDFLDNEENEDILEDIVLTLTLFEDREMIEERLKTYAHLFDDKVMKQLKRRRYTGWGRLSRKLINGIRDKQSGKTILDFLKSDGFANRNFMQLIHDDSLTFKEDIQKAQVSGQGDSLHEHIANLAGSPAIKKGILQTVKVVDELVKVMGRHKPENIVIEMARENQTTQKGQKNSRERMKRIEEGIKELGSQILKEHPVENTQLQNEKLYLYYLQNGRDMYVDQELDINRLSDYDVDHIVPQSFLKDDSIDNKVLTRSDKARGKSDNVPSEEVVKKMKNYWRQLLNAKLITQRKFDNLTKAERGGLSELDKAGFIKRQLVETRQITKHVAQILDSRMNTKYDENDKLIREVKVITLKSKLVSDFRKDFQFYKVREINNYHHAHDAYLNAVVGTALIKKYPKLESEFVYGDYKVYDVRKMIAKSEQEIGKATAKYFFYSNIMNFFKTEITLANGEIRKRPLIETNGETGEIVWDKGRDFATVRKVLSMPQVNIVKKTEVQTGGFSKESILPKRNSDKLIARKKDWDPKKYGGFDSPTVAYSVLVVAKVEKGKSKKLKSVKELLGITIMERSSFEKNPIDFLEAKGYKEVKKDLIIKLPKYSLFELENGRKRMLASAGELQKGNELALPSKYVNFLYLASHYEKLKGSPEDNEQKQLFVEQHKHYLDEIIEQISEFSKRVILADANLDKVLSAYNKHRDKPIREQAENIIHLFTLTNLGAPAAFKYFDTTIDRKRYTSTKEVLDATLIHQSITGLYETRIDLSQLGGDGGGGGGSGGGGSGGGGSGGGGSGGTLNIEDEYRLHETSKEPDVPLGSTWLSDFPQAWAETGGMGLAVRQAPLIIPLKATSTPVSIKQYPMSQEARLGIKPHIQRLLDQGILVPCQSPWNTPLLPVKKPGTNDYRPVQDLREVNKRVEDIHPTVPNPYNLLSGLPPSHQWYTVLDLKDAFFCLRLHPTSQPLFAFEWRDPEMGISGQLTWTRLPQGFKNSPTLFDEALHRDLADFRIQHPDLILLQYVDDLLLAATSEQDCQRGTRALLQTLGNLGYRASAKKAQICQKQVKYLGYLLKEGQRWLTEARKETVMGQPTPKTPRQLREFLGTAGFCRLWIPGFAEMAAPLYPLTKTGTLFNWGPDQQKAYQEIKQALLTAPALGLPDLTKPFELFVDEKQGYAKGVLTQKLGPWRRPVAYLSKKLDPVAAGWPPCLRMVAAIAVLTKDAGKLTMGQPLVILAPHAVEALVKQPPDRWLSNARMTHYQAMLLDTDRVQFGPVVALNPATLLPLPEKEAPHDCLEILAETHGTRPDLTDQPIPDADYTWYTDGSSFLQEGQRRAGAAVTTETEVIWARALPAGTSAQRAELIALTQALKMAEGKKLNVYTDSRYAFATAHVHGEIYRRRGLLTSEGREIKNKNEILALLKALFLPKRLSIIHCPGHQKGNSAEARGNRMADQAAREAAMKAVLETSTLLAGKRTADGSEFEKRTADGSEFESPKKKAKVE

SEQ ID NO: 954 - protein, 2093 aa, synthetic construct
MPAAKRVKLDGGDKKYSIGLDIGTNSVGWAVITDEYKVPSKKFKVLGNTDRHSIKKNLIGALLFDSGETAEATRLKRTARRRYTRRKNRICYLQEIFSNEMAKVDDSFFHRLEESFLVEEDKKHERHPIFGNIVDEVAYHEKYPTIYHLRKKLVDSTDKADLRLIYLALAHMIKFRGHFLIEGDLNPDNSDVDKLFIQLVQTYNQLFEENPINASGVDAKAILSARLSKSRRLENLIAQLPGEKKNGLFGNLIALSLGLTPNFKSNFDLAEDAKLQLSKDTYDDDLDNLLAQIGDQYADLFLAAKNLSDAILLSDILRVNTEITKAPLSASMIKRYDEHHQDLTLLKALVRQQLPEKYKEIFFDQSKNGYAGYIDGGASQEEFYKFIKPILEKMDGTEELLVKLNREDLLRKQRTFDNGSIPHQIHLGELHAILRRQEDFYPFLKDNREKIEKILTFRIPYYVGPLARGNSRFAWMTRKSEETITPWNFEEVVDKGASAQSFIERMTNFDKNLPNEKVLPKHSLLYEYFTVYNELTKVKYVTEGMRKPAFLSGEQKKAIVDLLFKTNRKVTVKQLKEDYFKKIECFDSVEISGVEDRFNASLGTYHDLLKIIKDKDFLDNEENEDILEDIVLTLTLFEDREMIEERLKTYAHLFDDKVMKQLKRRRYTGWGRLSRKLINGIRDKQSGKTILDFLKSDGFANRNFMQLIHDDSLTFKEDIQKAQVSGQGDSLHEHIANLAGSPAIKKGILQTVKVVDELVKVMGRHKPENIVIEMARENQTTQKGQKNSRERMKRIEEGIKELGSQILKEHPVENTQLQNEKLYLYYLQNGRDMYVDQELDINRLSDYDVDHIVPQSFLKDDSIDNKVLTRSDKARGKSDNVPSEEVVKKMKNYWRQLLNAKLITQRKFDNLTKAERGGLSELDKAGFIKRQLVETRQITKHVAQILDSRMNTKYDENDKLIREVKVITLKSKLVSDFRKDFQFYKVREINNYHHAHDAYLNAVVGTALIKKYPKLESEFVYGDYKVYDVRKMIAKSEQEIGKATAKYFFYSNIMNFFKTEITLANGEIRKRPLIETNGETGEIVWDKGRDFATVRKVLSMPQVNIVKKTEVQTGGFSKESILPKRNSDKLIARKKDWDPKKYGGFDSPTVAYSVLVVAKVEKGKSKKLKSVKELLGITIMERSSFEKNPIDFLEAKGYKEVKKDLIIKLPKYSLFELENGRKRMLASAGELQKGNELALPSKYVNFLYLASHYEKLKGSPEDNEQKQLFVEQHKHYLDEIIEQISEFSKRVILADANLDKVLSAYNKHRDKPIREQAENIIHLFTLTNLGAPAAFKYFDTTIDRKRYTSTKEVLDATLIHQSITGLYETRIDLSQLGGDGGGSSEAAAKGGTLNIEDEYRLHETSKEPDVPLGSTWLSDFPQAWAETGGMGLAVRQAPLIIPLKATSTPVSIKQYPMSQEARLGIKPHIQRLLDQGILVPCQSPWNTPLLPVKKPGTNDYRPVQDLREVNKRVEDIHPTVPNPYNLLSGLPPSHQWYTVLDLKDAFFCLRLHPTSQPLFAFEWRDPEMGISGQLTWTRLPQGFKNSPTLFDEALHRDLADFRIQHPDLILLQYVDDLLLAATSEQDCQRGTRALLQTLGNLGYRASAKKAQICQKQVKYLGYLLKEGQRWLTEARKETVMGQPTPKTPRQLREFLGTAGFCRLWIPGFAEMAAPLYPLTKTGTLFNWGPDQQKAYQEIKQALLTAPALGLPDLTKPFELFVDEKQGYAKGVLTQKLGPWRRPVAYLSKKLDPVAAGWPPCLRMVAAIAVLTKDAGKLTMGQPLVILAPHAVEALVKQPPDRWLSNARMTHYQAMLLDTDRVQFGPVVALNPATLLPLPEKEAPHDCLEILAETHGTRPDLTDQPIPDADYTWYTDGSSFLQEGQRRAGAAVTTETEVIWARALPAGTSAQRAELIALTQALKMAEGKKLNVYTDSRYAFATAHVHGEIYRRRGLLTSEGREIKNKNEILALLKALFLPKRLSIIHCPGHQKGNSAEARGNRMADQAAREAAMKAVLETSTLLAGKRTADGSEFEKRTADGSEFESPKKKAKVE

SEQ ID NO: 955 - protein, 2096 aa, synthetic construct
MPAAKRVKLDGGDKKYSIGLDIGTNSVGWAVITDEYKVPSKKFKVLGNTDRHSIKKNLIGALLFDSGETAEATRLKRTARRRYTRRKNRICYLQEIFSNEMAKVDDSFFHRLEESFLVEEDKKHERHPIFGNIVDEVAYHEKYPTIYHLRKKLVDSTDKADLRLIYLALAHMIKFRGHFLIEGDLNPDNSDVDKLFIQLVQTYNQLFEENPINASGVDAKAILSARLSKSRRLENLIAQLPGEKKNGLFGNLIALSLGLTPNFKSNFDLAEDAKLQLSKDTYDDDLDNLLAQIGDQYADLFLAAKNLSDAILLSDILRVNTEITKAPLSASMIKRYDEHHQDLTLLKALVRQQLPEKYKEIFFDQSKNGYAGYIDGGASQEEFYKFIKPILEKMDGTEELLVKLNREDLLRKQRTFDNGSIPHQIHLGELHAILRRQEDFYPFLKDNREKIEKILTFRIPYYVGPLARGNSRFAWMTRKSEETITPWNFEEVVDKGASAQSFIERMTNFDKNLPNEKVLPKHSLLYEYFTVYNELTKVKYVTEGMRKPAFLSGEQKKAIVDLLFKTNRKVTVKQLKEDYFKKIECFDSVEISGVEDRFNASLGTYHDLLKIIKDKDFLDNEENEDILEDIVLTLTLFEDREMIEERLKTYAHLFDDKVMKQLKRRRYTGWGRLSRKLINGIRDKQSGKTILDFLKSDGFANRNFMQLIHDDSLTFKEDIQKAQVSGQGDSLHEHIANLAGSPAIKKGILQTVKVVDELVKVMGRHKPENIVIEMARENQTTQKGQKNSRERMKRIEEGIKELGSQILKEHPVENTQLQNEKLYLYYLQNGRDMYVDQELDINRLSDYDVDHIVPQSFLKDDSIDNKVLTRSDKARGKSDNVPSEEVVKKMKNYWRQLLNAKLITQRKFDNLTKAERGGLSELDKAGFIKRQLVETRQITKHVAQILDSRMNTKYDENDKLIREVKVITLKSKLVSDFRKDFQFYKVREINNYHHAHDAYLNAVVGTALIKKYPKLESEFVYGDYKVYDVRKMIAKSEQEIGKATAKYFFYSNIMNFFKTEITLANGEIRKRPLIETNGETGEIVWDKGRDFATVRKVLSMPQVNIVKKTEVQTGGFSKESILPKRNSDKLIARKKDWDPKKYGGFDSPTVAYSVLVVAKVEKGKSKKLKSVKELLGITIMERSSFEKNPIDFLEAKGYKEVKKDLIIKLPKYSLFELENGRKRMLASAGELQKGNELALPSKYVNFLYLASHYEKLKGSPEDNEQKQLFVEQHKHYLDEIIEQISEFSKRVILADANLDKVLSAYNKHRDKPIREQAENIIHLFTLTNLGAPAAFKYFDTTIDRKRYTSTKEVLDATLIHQSITGLYETRIDLSQLGGDGGEAAAKGGGGSSGGTLNIEDEYRLHETSKEPDVPLGSTWLSDFPQAWAETGGMGLAVRQAPLIIPLKATSTPVSIKQYPMSQEARLGIKPHIQRLLDQGILVPCQSPWNTPLLPVKKPGTNDYRPVQDLREVNKRVEDIHPTVPNPYNLLSGLPPSHQWYTVLDLKDAFFCLRLHPTSQPLFAFEWRDPEMGISGQLTWTRLPQGFKNSPTLFDEALHRDLADFRIQHPDLILLQYVDDLLLAATSEQDCQRGTRALLQTLGNLGYRASAKKAQICQKQVKYLGYLLKEGQRWLTEARKETVMGQPTPKTPRQLREFLGTAGFCRLWIPGFAEMAAPLYPLTKTGTLFNWGPDQQKAYQEIKQALLTAPALGLPDLTKPFELFVDEKQGYAKGVLTQKLGPWRRPVAYLSKKLDPVAAGWPPCLRMVAAIAVLTKDAGKLTMGQPLVILAPHAVEALVKQPPDRWLSNARMTHYQAMLLDTDRVQFGPVVALNPATLLPLPEKEAPHDCLEILAETHGTRPDLTDQPIPDADYTWYTDGSSFLQEGQRRAGAAVTTETEVIWARALPAGTSAQRAELIALTQALKMAEGKKLNVYTDSRYAFATAHVHGEIYRRRGLLTSEGREIKNKNEILALLKALFLPKRLSIIHCPGHQKGNSAEARGNRMADQAAREAAMKAVLETSTLLAGKRTADGSEFEKRTADGSEFESPKKKAKVE

SEQ ID NO: 956 - protein, 2092 aa, synthetic construct
MPAAKRVKLDGGDKKYSIGLDIGTNSVGWAVITDEYKVPSKKFKVLGNTDRHSIKKNLIGALLFDSGETAEATRLKRTARRRYTRRKNRICYLQEIFSNEMAKVDDSFFHRLEESFLVEEDKKHERHPIFGNIVDEVAYHEKYPTIYHLRKKLVDSTDKADLRLIYLALAHMIKFRGHFLIEGDLNPDNSDVDKLFIQLVQTYNQLFEENPINASGVDAKAILSARLSKSRRLENLIAQLPGEKKNGLFGNLIALSLGLTPNFKSNFDLAEDAKLQLSKDTYDDDLDNLLAQIGDQYADLFLAAKNLSDAILLSDILRVNTEITKAPLSASMIKRYDEHHQDLTLLKALVRQQLPEKYKEIFFDQSKNGYAGYIDGGASQEEFYKFIKPILEKMDGTEELLVKLNREDLLRKQRTFDNGSIPHQIHLGELHAILRRQEDFYPFLKDNREKIEKILTFRIPYYVGPLARGNSRFAWMTRKSEETITPWNFEEVVDKGASAQSFIERMTNFDKNLPNEKVLPKHSLLYEYFTVYNELTKVKYVTEGMRKPAFLSGEQKKAIVDLLFKTNRKVTVKQLKEDYFKKIECFDSVEISGVEDRFNASLGTYHDLLKIIKDKDFLDNEENEDILEDIVLTLTLFEDREMIEERLKTYAHLFDDKVMKQLKRRRYTGWGRLSRKLINGIRDKQSGKTILDFLKSDGFANRNFMQLIHDDSLTFKEDIQKAQVSGQGDSLHEHIANLAGSPAIKKGILQTVKVVDELVKVMGRHKPENIVIEMARENQTTQKGQKNSRERMKRIEEGIKELGSQILKEHPVENTQLQNEKLYLYYLQNGRDMYVDQELDINRLSDYDVDHIVPQSFLKDDSIDNKVLTRSDKARGKSDNVPSEEVVKKMKNYWRQLLNAKLITQRKFDNLTKAERGGLSELDKAGFIKRQLVETRQITKHVAQILDSRMNTKYDENDKLIREVKVITLKSKLVSDFRKDFQFYKVREINNYHHAHDAYLNAVVGTALIKKYPKLESEFVYGDYKVYDVRKMIAKSEQEIGKATAKYFFYSNIMNFFKTEITLANGEIRKRPLIETNGETGEIVWDKGRDFATVRKVLSMPQVNIVKKTEVQTGGFSKESILPKRNSDKLIARKKDWDPKKYGGFDSPTVAYSVLVVAKVEKGKSKKLKSVKELLGITIMERSSFEKNPIDFLEAKGYKEVKKDLIIKLPKYSLFELENGRKRMLASAGELQKGNELALPSKYVNFLYLASHYEKLKGSPEDNEQKQLFVEQHKHYLDEIIEQISEFSKRVILADANLDKVLSAYNKHRDKPIREQAENIIHLFTLTNLGAPAAFKYFDTTIDRKRYTSTKEVLDATLIHQSITGLYETRIDLSQLGGDGGGGGGGGGGGTLNIEDEYRLHETSKEPDVPLGSTWLSDFPQAWAETGGMGLAVRQAPLIIPLKATSTPVSIKQYPMSQEARLGIKPHIQRLLDQGILVPCQSPWNTPLLPVKKPGTNDYRPVQDLREVNKRVEDIHPTVPNPYNLLSGLPPSHQWYTVLDLKDAFFCLRLHPTSQPLFAFEWRDPEMGISGQLTWTRLPQGFKNSPTLFDEALHRDLADFRIQHPDLILLQYVDDLLLAATSEQDCQRGTRALLQTLGNLGYRASAKKAQICQKQVKYLGYLLKEGQRWLTEARKETVMGQPTPKTPRQLREFLGTAGFCRLWIPGFAEMAAPLYPLTKTGTLFNWGPDQQKAYQEIKQALLTAPALGLPDLTKPFELFVDEKQGYAKGVLTQKLGPWRRPVAYLSKKLDPVAAGWPPCLRMVAAIAVLTKDAGKLTMGQPLVILAPHAVEALVKQPPDRWLSNARMTHYQAMLLDTDRVQFGPVVALNPATLLPLPEKEAPHDCLEILAETHGTRPDLTDQPIPDADYTWYTDGSSFLQEGQRRAGAAVTTETEVIWARALPAGTSAQRAELIALTQALKMAEGKKLNVYTDSRYAFATAHVHGEIYRRRGLLTSEGREIKNKNEILALLKALFLPKRLSIIHCPGHQKGNSAEARGNRMADQAAREAAMKAVLETSTLLAGKRTADGSEFEKRTADGSEFESPKKKAKVE

SEQ ID NO: 957 - protein, 2094 aa, synthetic construct
MPAAKRVKLDGGDKKYSIGLDIGTNSVGWAVITDEYKVPSKKFKVLGNTDRHSIKKNLIGALLFDSGETAEATRLKRTARRRYTRRKNRICYLQEIFSNEMAKVDDSFFHRLEESFLVEEDKKHERHPIFGNIVDEVAYHEKYPTIYHLRKKLVDSTDKADLRLIYLALAHMIKFRGHFLIEGDLNPDNSDVDKLFIQLVQTYNQLFEENPINASGVDAKAILSARLSKSRRLENLIAQLPGEKKNGLFGNLIALSLGLTPNFKSNFDLAEDAKLQLSKDTYDDDLDNLLAQIGDQYADLFLAAKNLSDAILLSDILRVNTEITKAPLSASMIKRYDEHHQDLTLLKALVRQQLPEKYKEIFFDQSKNGYAGYIDGGASQEEFYKFIKPILEKMDGTEELLVKLNREDLLRKQRTFDNGSIPHQIHLGELHAILRRQEDFYPFLKDNREKIEKILTFRIPYYVGPLARGNSRFAWMTRKSEETITPWNFEEVVDKGASAQSFIERMTNFDKNLPNEKVLPKHSLLYEYFTVYNELTKVKYVTEGMRKPAFLSGEQKKAIVDLLFKTNRKVTVKQLKEDYFKKIECFDSVEISGVEDRFNASLGTYHDLLKIIKDKDFLDNEENEDILEDIVLTLTLFEDREMIEERLKTYAHLFDDKVMKQLKRRRYTGWGRLSRKLINGIRDKQSGKTILDFLKSDGFANRNFMQLIHDDSLTFKEDIQKAQVSGQGDSLHEHIANLAGSPAIKKGILQTVKVVDELVKVMGRHKPENIVIEMARENQTTQKGQKNSRERMKRIEEGIKELGSQILKEHPVENTQLQNEKLYLYYLQNGRDMYVDQELDINRLSDYDVDHIVPQSFLKDDSIDNKVLTRSDKARGKSDNVPSEEVVKKMKNYWRQLLNAKLITQRKFDNLTKAERGGLSELDKAGFIKRQLVETRQITKHVAQILDSRMNTKYDENDKLIREVKVITLKSKLVSDFRKDFQFYKVREINNYHHAHDAYLNAVVGTALIKKYPKLESEFVYGDYKVYDVRKMIAKSEQEIGKATAKYFFYSNIMNFFKTEITLANGEIRKRPLIETNGETGEIVWDKGRDFATVRKVLSMPQVNIVKKTEVQTGGFSKESILPKRNSDKLIARKKDWDPKKYGGFDSPTVAYSVLVVAKVEKGKSKKLKSVKELLGITIMERSSFEKNPIDFLEAKGYKEVKKDLIIKLPKYSLFELENGRKRMLASAGELQKGNELALPSKYVNFLYLASHYEKLKGSPEDNEQKQLFVEQHKHYLDEIIEQISEFSKRVILADANLDKVLSAYNKHRDKPIREQAENIIHLFTLTNLGAPAAFKYFDTTIDRKRYTSTKEVLDATLIHQSITGLYETRIDLSQLGGDGGGSSGGSGGGGGTLNIEDEYRLHETSKEPDVPLGSTWLSDFPQAWAETGGMGLAVRQAPLIIPLKATSTPVSIKQYPMSQEARLGIKPHIQRLLDQGILVPCQSPWNTPLLPVKKPGTNDYRPVQDLREVNKRVEDIHPTVPNPYNLLSGLPPSHQWYTVLDLKDAFFCLRLHPTSQPLFAFEWRDPEMGISGQLTWTRLPQGFKNSPTLFDEALHRDLADFRIQHPDLILLQYVDDLLLAATSEQDCQRGTRALLQTLGNLGYRASAKKAQICQKQVKYLGYLLKEGQRWLTEARKETVMGQPTPKTPRQLREFLGTAGFCRLWIPGFAEMAAPLYPLTKTGTLFNWGPDQQKAYQEIKQALLTAPALGLPDLTKPFELFVDEKQGYAKGVLTQKLGPWRRPVAYLSKKLDPVAAGWPPCLRMVAAIAVLTKDAGKLTMGQPLVILAPHAVEALVKQPPDRWLSNARMTHYQAMLLDTDRVQFGPVVALNPATLLPLPEKEAPHDCLEILAETHGTRPDLTDQPIPDADYTWYTDGSSFLQEGQRRAGAAVTTETEVIWARALPAGTSAQRAELIALTQALKMAEGKKLNVYTDSRYAFATAHVHGEIYRRRGLLTSEGREIKNKNEILALLKALFLPKRLSIIHCPGHQKGNSAEARGNRMADQAAREAAMKAVLETSTLLAGKRTADGSEFEKRTADGSEFESPKKKAKVE

SEQ ID NO: 958 - protein, 2103 aa, synthetic construct
MPAAKRVKLDGGDKKYSIGLDIGTNSVGWAVITDEYKVPSKKFKVLGNTDRHSIKKNLIGALLFDSGETAEATRLKRTARRRYTRRKNRICYLQEIFSNEMAKVDDSFFHRLEESFLVEEDKKHERHPIFGNIVDEVAYHEKYPTIYHLRKKLVDSTDKADLRLIYLALAHMIKFRGHFLIEGDLNPDNSDVDKLFIQLVQTYNQLFEENPINASGVDAKAILSARLSKSRRLENLIAQLPGEKKNGLFGNLIALSLGLTPNFKSNFDLAEDAKLQLSKDTYDDDLDNLLAQIGDQYADLFLAAKNLSDAILLSDILRVNTEITKAPLSASMIKRYDEHHQDLTLLKALVRQQLPEKYKEIFFDQSKNGYAGYIDGGASQEEFYKFIKPILEKMDGTEELLVKLNREDLLRKQRTFDNGSIPHQIHLGELHAILRRQEDFYPFLKDNREKIEKILTFRIPYYVGPLARGNSRFAWMTRKSEETITPWNFEEVVDKGASAQSFIERMTNFDKNLPNEKVLPKHSLLYEYFTVYNELTKVKYVTEGMRKPAFLSGEQKKAIVDLLFKTNRKVTVKQLKEDYFKKIECFDSVEISGVEDRFNASLGTYHDLLKIIKDKDFLDNEENEDILEDIVLTLTLFEDREMIEERLKTYAHLFDDKVMKQLKRRRYTGWGRLSRKLINGIRDKQSGKTILDFLKSDGFANRNFMQLIHDDSLTFKEDIQKAQVSGQGDSLHEHIANLAGSPAIKKGILQTVKVVDELVKVMGRHKPENIVIEMARENQTTQKGQKNSRERMKRIEEGIKELGSQILKEHPVENTQLQNEKLYLYYLQNGRDMYVDQELDINRLSDYDVDHIVPQSFLKDDSIDNKVLTRSDKARGKSDNVPSEEVVKKMKNYWRQLLNAKLITQRKFDNLTKAERGGLSELDKAGFIKRQLVETRQITKHVAQILDSRMNTKYDENDKLIREVKVITLKSKLVSDFRKDFQFYKVREINNYHHAHDAYLNAVVGTALIKKYPKLESEFVYGDYKVYDVRKMIAKSEQEIGKATAKYFFYSNIMNFFKTEITLANGEIRKRPLIETNGETGEIVWDKGRDFATVRKVLSMPQVNIVKKTEVQTGGFSKESILPKRNSDKLIARKKDWDPKKYGGFDSPTVAYSVLVVAKVEKGKSKKLKSVKELLGITIMERSSFEKNPIDFLEAKGYKEVKKDLIIKLPKYSLFELENGRKRMLASAGELQKGNELALPSKYVNFLYLASHYEKLKGSPEDNEQKQLFVEQHKHYLDEIIEQISEFSKRVILADANLDKVLSAYNKHRDKPIREQAENIIHLFTLTNLGAPAAFKYFDTTIDRKRYTSTKEVLDATLIHQSITGLYETRIDLSQLGGDGGGGSGGSGGSGGSGGSGGSGGTLNIEDEYRLHETSKEPDVPLGSTWLSDFPQAWAETGGMGLAVRQAPLIIPLKATSTPVSIKQYPMSQEARLGIKPHIQRLLDQGILVPCQSPWNTPLLPVKKPGTNDYRPVQDLREVNKRVEDIHPTVPNPYNLLSGLPPSHQWYTVLDLKDAFFCLRLHPTSQPLFAFEWRDPEMGISGQLTWTRLPQGFKNSPTLFNEALHRDLADFRIQHPDLILLQYVDDLLLAATSEQDCQRGTRALLQTLGNLGYRASAKKAQICQKQVKYLGYLLKEGQRWLTEARKETVMGQPTPKTPRQLREFLGTAGFCRLWIPGFAEMAAPLYPLTKPGTLFNWGPDQQKAYQEIKQALLTAPALGLPDLTKPFELFVDEKQGYAKGVLTQKLGPWRRPVAYLSKKLDPVAAGWPPCLRMVAAIAVLTKDAGKLTMGQPLVILAPHAVEALVKQPPDRWLSNARMTHYQAMLLDTDRVQFGPVVALNPATLLPLPEKEAPHDCLEILAETHGTRPDLTDQPIPDADYTWYTDGSSFLQEGQRRAGAAVTTETEVIWARALPAGTSAQRAELIALTQALKMAEGKKLNVYTDSRYAFATAHVHGEIYRRRGWLTSEGREIKNKNEILALLKALFLPKRLSIIHCPGHQKGNSAEARGNRMADQAAREAAMKAVLETSTLLAGKRTADGSEFEKRTADGSEFESPKKKAKVE

SEQ ID NO: 959 - protein, 2094 aa, synthetic construct
MPAAKRVKLDGGDKKYSIGLDIGTNSVGWAVITDEYKVPSKKFKVLGNTDRHSIKKNLIGALLFDSGETAEATRLKRTARRRYTRRKNRICYLQEIFSNEMAKVDDSFFHRLEESFLVEEDKKHERHPIFGNIVDEVAYHEKYPTIYHLRKKLVDSTDKADLRLIYLALAHMIKFRGHFLIEGDLNPDNSDVDKLFIQLVQTYNQLFEENPINASGVDAKAILSARLSKSRRLENLIAQLPGEKKNGLFGNLIALSLGLTPNFKSNFDLAEDAKLQLSKDTYDDDLDNLLAQIGDQYADLFLAAKNLSDAILLSDILRVNTEITKAPLSASMIKRYDEHHQDLTLLKALVRQQLPEKYKEIFFDQSKNGYAGYIDGGASQEEFYKFIKPILEKMDGTEELLVKLNREDLLRKQRTFDNGSIPHQIHLGELHAILRRQEDFYPFLKDNREKIEKILTFRIPYYVGPLARGNSRFAWMTRKSEETITPWNFEEVVDKGASAQSFIERMTNFDKNLPNEKVLPKHSLLYEYFTVYNELTKVKYVTEGMRKPAFLSGEQKKAIVDLLFKTNRKVTVKQLKEDYFKKIECFDSVEISGVEDRFNASLGTYHDLLKIIKDKDFLDNEENEDILEDIVLTLTLFEDREMIEERLKTYAHLFDDKVMKQLKRRRYTGWGRLSRKLINGIRDKQSGKTILDFLKSDGFANRNFMQLIHDDSLTFKEDIQKAQVSGQGDSLHEHIANLAGSPAIKKGILQTVKVVDELVKVMGRHKPENIVIEMARENQTTQKGQKNSRERMKRIEEGIKELGSQILKEHPVENTQLQNEKLYLYYLQNGRDMYVDQELDINRLSDYDVDHIVPQSFLKDDSIDNKVLTRSDKARGKSDNVPSEEVVKKMKNYWRQLLNAKLITQRKFDNLTKAERGGLSELDKAGFIKRQLVETRQITKHVAQILDSRMNTKYDENDKLIREVKVITLKSKLVSDFRKDFQFYKVREINNYHHAHDAYLNAVVGTALIKKYPKLESEFVYGDYKVYDVRKMIAKSEQEIGKATAKYFFYSNIMNFFKTEITLANGEIRKRPLIETNGETGEIVWDKGRDFATVRKVLSMPQVNIVKKTEVQTGGFSKESILPKRNSDKLIARKKDWDPKKYGGFDSPTVAYSVLVVAKVEKGKSKKLKSVKELLGITIMERSSFEKNPIDFLEAKGYKEVKKDLIIKLPKYSLFELENGRKRMLASAGELQKGNELALPSKYVNFLYLASHYEKLKGSPEDNEQKQLFVEQHKHYLDEIIEQISEFSKRVILADANLDKVLSAYNKHRDKPIREQAENIIHLFTLTNLGAPAAFKYFDTTIDRKRYTSTKEVLDATLIHQSITGLYETRIDLSQLGGDGGGSSGSSGSSGGTLNIEDEYRLHETSKEPDVPLGSTWLSDFPQAWAETGGMGLAVRQAPLIIPLKATSTPVSIKQYPMSQEARLGIKPHIQRLLDQGILVPCQSPWNTPLLPVKKPGTNDYRPVQDLREVNKRVEDIHPTVPNPYNLLSGLPPSHQWYTVLDLKDAFFCLRLHPTSQPLFAFEWRDPEMGISGQLTWTRLPQGFKNSPTLFNEALHRDLADFRIQHPDLILLQYVDDLLLAATSEQDCQRGTRALLQTLGNLGYRASAKKAQICQKQVKYLGYLLKEGQRWLTEARKETVMGQPTPKTPRQLREFLGTAGFCRLWIPGFAEMAAPLYPLTKPGTLFNWGPDQQKAYQEIKQALLTAPALGLPDLTKPFELFVDEKQGYAKGVLTQKLGPWRRPVAYLSKKLDPVAAGWPPCLRMVAAIAVLTKDAGKLTMGQPLVILAPHAVEALVKQPPDRWLSNARMTHYQAMLLDTDRVQFGPVVALNPATLLPLPEKEAPHDCLEILAETHGTRPDLTDQPIPDADYTWYTDGSSFLQEGQRRAGAAVTTETEVIWARALPAGTSAQRAELIALTQALKMAEGKKLNVYTDSRYAFATAHVHGEIYRRRGWLTSEGREIKNKNEILALLKALFLPKRLSIIHCPGHQKGNSAEARGNRMADQAAREAAMKAVLETSTLLAGKRTADGSEFEKRTADGSEFESPKKKAKVE

SEQ ID NO: 960 - protein, 2096 aa, synthetic construct
MPAAKRVKLDGGDKKYSIGLDIGTNSVGWAVITDEYKVPSKKFKVLGNTDRHSIKKNLIGALLFDSGETAEATRLKRTARRRYTRRKNRICYLQEIFSNEMAKVDDSFFHRLEESFLVEEDKKHERHPIFGNIVDEVAYHEKYPTIYHLRKKLVDSTDKADLRLIYLALAHMIKFRGHFLIEGDLNPDNSDVDKLFIQLVQTYNQLFEENPINASGVDAKAILSARLSKSRRLENLIAQLPGEKKNGLFGNLIALSLGLTPNFKSNFDLAEDAKLQLSKDTYDDDLDNLLAQIGDQYADLFLAAKNLSDAILLSDILRVNTEITKAPLSASMIKRYDEHHQDLTLLKALVRQQLPEKYKEIFFDQSKNGYAGYIDGGASQEEFYKFIKPILEKMDGTEELLVKLNREDLLRKQRTFDNGSIPHQIHLGELHAILRRQEDFYPFLKDNREKIEKILTFRIPYYVGPLARGNSRFAWMTRKSEETITPWNFEEVVDKGASAQSFIERMTNFDKNLPNEKVLPKHSLLYEYFTVYNELTKVKYVTEGMRKPAFLSGEQKKAIVDLLFKTNRKVTVKQLKEDYFKKIECFDSVEISGVEDRFNASLGTYHDLLKIIKDKDFLDNEENEDILEDIVLTLTLFEDREMIEERLKTYAHLFDDKVMKQLKRRRYTGWGRLSRKLINGIRDKQSGKTILDFLKSDGFANRNFMQLIHDDSLTFKEDIQKAQVSGQGDSLHEHIANLAGSPAIKKGILQTVKVVDELVKVMGRHKPENIVIEMARENQTTQKGQKNSRERMKRIEEGIKELGSQILKEHPVENTQLQNEKLYLYYLQNGRDMYVDQELDINRLSDYDVDHIVPQSFLKDDSIDNKVLTRSDKARGKSDNVPSEEVVKKMKNYWRQLLNAKLITQRKFDNLTKAERGGLSELDKAGFIKRQLVETRQITKHVAQILDSRMNTKYDENDKLIREVKVITLKSKLVSDFRKDFQFYKVREINNYHHAHDAYLNAVVGTALIKKYPKLESEFVYGDYKVYDVRKMIAKSEQEIGKATAKYFFYSNIMNFFKTEITLANGEIRKRPLIETNGETGEIVWDKGRDFATVRKVLSMPQVNIVKKTEVQTGGFSKESILPKRNSDKLIARKKDWDPKKYGGFDSPTVAYSVLVVAKVEKGKSKKLKSVKELLGITIMERSSFEKNPIDFLEAKGYKEVKKDLIIKLPKYSLFELENGRKRMLASAGELQKGNELALPSKYVNFLYLASHYEKLKGSPEDNEQKQLFVEQHKHYLDEIIEQISEFSKRVILADANLDKVLSAYNKHRDKPIREQAENIIHLFTLTNLGAPAAFKYFDTTIDRKRYTSTKEVLDATLIHQSITGLYETRIDLSQLGGDGGEAAAKGSSPAPGGTLNIEDEYRLHETSKEPDVPLGSTWLSDFPQAWAETGGMGLAVRQAPLIIPLKATSTPVSIKQYPMSQEARLGIKPHIQRLLDQGILVPCQSPWNTPLLPVKKPGTNDYRPVQDLREVNKRVEDIHPTVPNPYNLLSGLPPSHQWYTVLDLKDAFFCLRLHPTSQPLFAFEWRDPEMGISGQLTWTRLPQGFKNSPTLFNEALHRDLADFRIQHPDLILLQYVDDLLLAATSEQDCQRGTRALLQTLGNLGYRASAKKAQICQKQVKYLGYLLKEGQRWLTEARKETVMGQPTPKTPRQLREFLGTAGFCRLWIPGFAEMAAPLYPLTKPGTLFNWGPDQQKAYQEIKQALLTAPALGLPDLTKPFELFVDEKQGYAKGVLTQKLGPWRRPVAYLSKKLDPVAAGWPPCLRMVAAIAVLTKDAGKLTMGQPLVILAPHAVEALVKQPPDRWLSNARMTHYQAMLLDTDRVQFGPVVALNPATLLPLPEKEAPHDCLEILAETHGTRPDLTDQPIPDADYTWYTDGSSFLQEGQRRAGAAVTTETEVIWARALPAGTSAQRAELIALTQALKMAEGKKLNVYTDSRYAFATAHVHGEIYRRRGWLTSEGREIKNKNEILALLKALFLPKRLSIIHCPGHQKGNSAEARGNRMADQAAREAAMKAVLETSTLLAGKRTADGSEFEKRTADGSEFESPKKKAKVE

SEQ ID NO: 961 - protein, 2096 aa, synthetic construct
MPAAKRVKLDGGDKKYSIGLDIGTNSVGWAVITDEYKVPSKKFKVLGNTDRHSIKKNLIGALLFDSGETAEATRLKRTARRRYTRRKNRICYLQEIFSNEMAKVDDSFFHRLEESFLVEEDKKHERHPIFGNIVDEVAYHEKYPTIYHLRKKLVDSTDKADLRLIYLALAHMIKFRGHFLIEGDLNPDNSDVDKLFIQLVQTYNQLFEENPINASGVDAKAILSARLSKSRRLENLIAQLPGEKKNGLFGNLIALSLGLTPNFKSNFDLAEDAKLQLSKDTYDDDLDNLLAQIGDQYADLFLAAKNLSDAILLSDILRVNTEITKAPLSASMIKRYDEHHQDLTLLKALVRQQLPEKYKEIFFDQSKNGYAGYIDGGASQEEFYKFIKPILEKMDGTEELLVKLNREDLLRKQRTFDNGSIPHQIHLGELHAILRRQEDFYPFLKDNREKIEKILTFRIPYYVGPLARGNSRFAWMTRKSEETITPWNFEEVVDKGASAQSFIERMTNFDKNLPNEKVLPKHSLLYEYFTVYNELTKVKYVTEGMRKPAFLSGEQKKAIVDLLFKTNRKVTVKQLKEDYFKKIECFDSVEISGVEDRFNASLGTYHDLLKIIKDKDFLDNEENEDILEDIVLTLTLFEDREMIEERLKTYAHLFDDKVMKQLKRRRYTGWGRLSRKLINGIRDKQSGKTILDFLKSDGFANRNFMQLIHDDSLTFKEDIQKAQVSGQGDSLHEHIANLAGSPAIKKGILQTVKVVDELVKVMGRHKPENIVIEMARENQTTQKGQKNSRERMKRIEEGIKELGSQILKEHPVENTQLQNEKLYLYYLQNGRDMYVDQELDINRLSDYDVDHIVPQSFLKDDSIDNKVLTRSDKARGKSDNVPSEEVVKKMKNYWRQLLNAKLITQRKFDNLTKAERGGLSELDKAGFIKRQLVETRQITKHVAQILDSRMNTKYDENDKLIREVKVITLKSKLVSDFRKDFQFYKVREINNYHHAHDAYLNAVVGTALIKKYPKLESEFVYGDYKVYDVRKMIAKSEQEIGKATAKYFFYSNIMNFFKTEITLANGEIRKRPLIETNGETGEIVWDKGRDFATVRKVLSMPQVNIVKKTEVQTGGFSKESILPKRNSDKLIARKKDWDPKKYGGFDSPTVAYSVLVVAKVEKGKSKKLKSVKELLGITIMERSSFEKNPIDFLEAKGYKEVKKDLIIKLPKYSLFELENGRKRMLASAGELQKGNELALPSKYVNFLYLASHYEKLKGSPEDNEQKQLFVEQHKHYLDEIIEQISEFSKRVILADANLDKVLSAYNKHRDKPIREQAENIIHLFTLTNLGAPAAFKYFDTTIDRKRYTSTKEVLDATLIHQSITGLYETRIDLSQLGGDGGEAAAKPAPGGSGGTLNIEDEYRLHETSKEPDVPLGSTWLSDFPQAWAETGGMGLAVRQAPLIIPLKATSTPVSIKQYPMSQEARLGIKPHIQRLLDQGILVPCQSPWNTPLLPVKKPGTNDYRPVQDLREVNKRVEDIHPTVPNPYNLLSGLPPSHQWYTVLDLKDAFFCLRLHPTSQPLFAFEWRDPEMGISGQLTWTRLPQGFKNSPTLFNEALHRDLADFRIQHPDLILLQYVDDLLLAATSEQDCQRGTRALLQTLGNLGYRASAKKAQICQKQVKYLGYLLKEGQRWLTEARKETVMGQPTPKTPRQLREFLGTAGFCRLWIPGFAEMAAPLYPLTKPGTLFNWGPDQQKAYQEIKQALLTAPALGLPDLTKPFELFVDEKQGYAKGVLTQKLGPWRRPVAYLSKKLDPVAAGWPPCLRMVAAIAVLTKDAGKLTMGQPLVILAPHAVEALVKQPPDRWLSNARMTHYQAMLLDTDRVQFGPVVALNPATLLPLPEKEAPHDCLEILAETHGTRPDLTDQPIPDADYTWYTDGSSFLQEGQRRAGAAVTTETEVIWARALPAGTSAQRAELIALTQALKMAEGKKLNVYTDSRYAFATAHVHGEIYRRRGWLTSEGREIKNKNEILALLKALFLPKRLSIIHCPGHQKGNSAEARGNRMADQAAREAAMKAVLETSTLLAGKRTADGSEFEKRTADGSEFESPKKKAKVE

SEQ ID NO: 962 - protein, 2131 aa, synthetic construct
MPAAKRVKLDGGDKKYSIGLDIGTNSVGWAVITDEYKVPSKKFKVLGNTDRHSIKKNLIGALLFDSGETAEATRLKRTARRRYTRRKNRICYLQEIFSNEMAKVDDSFFHRLEESFLVEEDKKHERHPIFGNIVDEVAYHEKYPTIYHLRKKLVDSTDKADLRLIYLALAHMIKFRGHFLIEGDLNPDNSDVDKLFIQLVQTYNQLFEENPINASGVDAKAILSARLSKSRRLENLIAQLPGEKKNGLFGNLIALSLGLTPNFKSNFDLAEDAKLQLSKDTYDDDLDNLLAQIGDQYADLFLAAKNLSDAILLSDILRVNTEITKAPLSASMIKRYDEHHQDLTLLKALVRQQLPEKYKEIFFDQSKNGYAGYIDGGASQEEFYKFIKPILEKMDGTEELLVKLNREDLLRKQRTFDNGSIPHQIHLGELHAILRRQEDFYPFLKDNREKIEKILTFRIPYYVGPLARGNSRFAWMTRKSEETITPWNFEEVVDKGASAQSFIERMTNFDKNLPNEKVLPKHSLLYEYFTVYNELTKVKYVTEGMRKPAFLSGEQKKAIVDLLFKTNRKVTVKQLKEDYFKKIECFDSVEISGVEDRFNASLGTYHDLLKIIKDKDFLDNEENEDILEDIVLTLTLFEDREMIEERLKTYAHLFDDKVMKQLKRRRYTGWGRLSRKLINGIRDKQSGKTILDFLKSDGFANRNFMQLIHDDSLTFKEDIQKAQVSGQGDSLHEHIANLAGSPAIKKGILQTVKVVDELVKVMGRHKPENIVIEMARENQTTQKGQKNSRERMKRIEEGIKELGSQILKEHPVENTQLQNEKLYLYYLQNGRDMYVDQELDINRLSDYDVDHIVPQSFLKDDSIDNKVLTRSDKARGKSDNVPSEEVVKKMKNYWRQLLNAKLITQRKFDNLTKAERGGLSELDKAGFIKRQLVETRQITKHVAQILDSRMNTKYDENDKLIREVKVITLKSKLVSDFRKDFQFYKVREINNYHHAHDAYLNAVVGTALIKKYPKLESEFVYGDYKVYDVRKMIAKSEQEIGKATAKYFFYSNIMNFFKTEITLANGEIRKRPLIETNGETGEIVWDKGRDFATVRKVLSMPQVNIVKKTEVQTGGFSKESILPKRNSDKLIARKKDWDPKKYGGFDSPTVAYSVLVVAKVEKGKSKKLKSVKELLGITIMERSSFEKNPIDFLEAKGYKEVKKDLIIKLPKYSLFELENGRKRMLASAGELQKGNELALPSKYVNFLYLASHYEKLKGSPEDNEQKQLFVEQHKHYLDEIIEQISEFSKRVILADANLDKVLSAYNKHRDKPIREQAENIIHLFTLTNLGAPAAFKYFDTTIDRKRYTSTKEVLDATLIHQSITGLYETRIDLSQLGGDGGAEAAAKEAAAKEAAAKEAAAKALEAEAAAKEAAAKEAAAKEAAAKAGGTLNIEDEYRLHETSKEPDVPLGSTWLSDFPQAWAETGGMGLAVRQAPLIIPLKATSTPVSIKQYPMSQEARLGIKPHIQRLLDQGILVPCQSPWNTPLLPVKKPGTNDYRPVQDLREVNKRVEDIHPTVPNPYNLLSGLPPSHQWYTVLDLKDAFFCLRLHPTSQPLFAFEWRDPEMGISGQLTWTRLPQGFKNSPTLFNEALHRDLADFRIQHPDLILLQYVDDLLLAATSEQDCQRGTRALLQTLGNLGYRASAKKAQICQKQVKYLGYLLKEGQRWLTEARKETVMGQPTPKTPRQLREFLGTAGFCRLWIPGFAEMAAPLYPLTKPGTLFNWGPDQQKAYQEIKQALLTAPALGLPDLTKPFELFVDEKQGYAKGVLTQKLGPWRRPVAYLSKKLDPVAAGWPPCLRMVAAIAVLTKDAGKLTMGQPLVILAPHAVEALVKQPPDRWLSNARMTHYQAMLLDTDRVQFGPVVALNPATLLPLPEKEAPHDCLEILAETHGTRPDLTDQPIPDADYTWYTDGSSFLQEGQRRAGAAVTTETEVIWARALPAGTSAQRAELIALTQALKMAEGKKLNVYTDSRYAFATAHVHGEIYRRRGWLTSEGREIKNKNEILALLKALFLPKRLSIIHCPGHQKGNSAEARGNRMADQAAREAAMKAVLETSTLLAGKRTADGSEFEKRTADGSEFESPKKKAKVE

SEQ ID NO: 963 - protein, 2096 aa, synthetic construct
MPAAKRVKLDGGDKKYSIGLDIGTNSVGWAVITDEYKVPSKKFKVLGNTDRHSIKKNLIGALLFDSGETAEATRLKRTARRRYTRRKNRICYLQEIFSNEMAKVDDSFFHRLEESFLVEEDKKHERHPIFGNIVDEVAYHEKYPTIYHLRKKLVDSTDKADLRLIYLALAHMIKFRGHFLIEGDLNPDNSDVDKLFIQLVQTYNQLFEENPINASGVDAKAILSARLSKSRRLENLIAQLPGEKKNGLFGNLIALSLGLTPNFKSNFDLAEDAKLQLSKDTYDDDLDNLLAQIGDQYADLFLAAKNLSDAILLSDILRVNTEITKAPLSASMIKRYDEHHQDLTLLKALVRQQLPEKYKEIFFDQSKNGYAGYIDGGASQEEFYKFIKPILEKMDGTEELLVKLNREDLLRKQRTFDNGSIPHQIHLGELHAILRRQEDFYPFLKDNREKIEKILTFRIPYYVGPLARGNSRFAWMTRKSEETITPWNFEEVVDKGASAQSFIERMTNFDKNLPNEKVLPKHSLLYEYFTVYNELTKVKYVTEGMRKPAFLSGEQKKAIVDLLFKTNRKVTVKQLKEDYFKKIECFDSVEISGVEDRFNASLGTYHDLLKIIKDKDFLDNEENEDILEDIVLTLTLFEDREMIEERLKTYAHLFDDKVMKQLKRRRYTGWGRLSRKLINGIRDKQSGKTILDFLKSDGFANRNFMQLIHDDSLTFKEDIQKAQVSGQGDSLHEHIANLAGSPAIKKGILQTVKVVDELVKVMGRHKPENIVIEMARENQTTQKGQKNSRERMKRIEEGIKELGSQILKEHPVENTQLQNEKLYLYYLQNGRDMYVDQELDINRLSDYDVDHIVPQSFLKDDSIDNKVLTRSDKARGKSDNVPSEEVVKKMKNYWRQLLNAKLITQRKFDNLTKAERGGLSELDKAGFIKRQLVETRQITKHVAQILDSRMNTKYDENDKLIREVKVITLKSKLVSDFRKDFQFYKVREINNYHHAHDAYLNAVVGTALIKKYPKLESEFVYGDYKVYDVRKMIAKSEQEIGKATAKYFFYSNIMNFFKTEITLANGEIRKRPLIETNGETGEIVWDKGRDFATVRKVLSMPQVNIVKKTEVQTGGFSKESILPKRNSDKLIARKKDWDPKKYGGFDSPTVAYSVLVVAKVEKGKSKKLKSVKELLGITIMERSSFEKNPIDFLEAKGYKEVKKDLIIKLPKYSLFELENGRKRMLASAGELQKGNELALPSKYVNFLYLASHYEKLKGSPEDNEQKQLFVEQHKHYLDEIIEQISEFSKRVILADANLDKVLSAYNKHRDKPIREQAENIIHLFTLTNLGAPAAFKYFDTTIDRKRYTSTKEVLDATLIHQSITGLYETRIDLSQLGGDGGEAAAKGGGPAPGGTLNIEDEYRLHETSKEPDVPLGSTWLSDFPQAWAETGGMGLAVRQAPLIIPLKATSTPVSIKQYPMSQEARLGIKPHIQRLLDQGILVPCQSPWNTPLLPVKKPGTNDYRPVQDLREVNKRVEDIHPTVPNPYNLLSGLPPSHQWYTVLDLKDAFFCLRLHPTSQPLFAFEWRDPEMGISGQLTWTRLPQGFKNSPTLFNEALHRDLADFRIQHPDLILLQYVDDLLLAATSEQDCQRGTRALLQTLGNLGYRASAKKAQICQKQVKYLGYLLKEGQRWLTEARKETVMGQPTPKTPRQLREFLGTAGFCRLWIPGFAEMAAPLYPLTKPGTLFNWGPDQQKAYQEIKQALLTAPALGLPDLTKPFELFVDEKQGYAKGVLTQKLGPWRRPVAYLSKKLDPVAAGWPPCLRMVAAIAVLTKDAGKLTMGQPLVILAPHAVEALVKQPPDRWLSNARMTHYQAMLLDTDRVQFGPVVALNPATLLPLPEKEAPHDCLEILAETHGTRPDLTDQPIPDADYTWYTDGSSFLQEGQRRAGAAVTTETEVIWARALPAGTSAQRAELIALTQALKMAEGKKLNVYTDSRYAFATAHVHGEIYRRRGWLTSEGREIKNKNEILALLKALFLPKRLSIIHCPGHQKGNSAEARGNRMADQAAREAAMKAVLETSTLLAGKRTADGSEFEKRTADGSEFESPKKKAKVE

SEQ ID NO: 964 - protein, 2100 aa, synthetic construct
MPAAKRVKLDGGDKKYSIGLDIGTNSVGWAVITDEYKVPSKKFKVLGNTDRHSIKKNLIGALLFDSGETAEATRLKRTARRRYTRRKNRICYLQEIFSNEMAKVDDSFFHRLEESFLVEEDKKHERHPIFGNIVDEVAYHEKYPTIYHLRKKLVDSTDKADLRLIYLALAHMIKFRGHFLIEGDLNPDNSDVDKLFIQLVQTYNQLFEENPINASGVDAKAILSARLSKSRRLENLIAQLPGEKKNGLFGNLIALSLGLTPNFKSNFDLAEDAKLQLSKDTYDDDLDNLLAQIGDQYADLFLAAKNLSDAILLSDILRVNTEITKAPLSASMIKRYDEHHQDLTLLKALVRQQLPEKYKEIFFDQSKNGYAGYIDGGASQEEFYKFIKPILEKMDGTEELLVKLNREDLLRKQRTFDNGSIPHQIHLGELHAILRRQEDFYPFLKDNREKIEKILTFRIPYYVGPLARGNSRFAWMTRKSEETITPWNFEEVVDKGASAQSFIERMTNFDKNLPNEKVLPKHSLLYEYFTVYNELTKVKYVTEGMRKPAFLSGEQKKAIVDLLFKTNRKVTVKQLKEDYFKKIECFDSVEISGVEDRFNASLGTYHDLLKIIKDKDFLDNEENEDILEDIVLTLTLFEDREMIEERLKTYAHLFDDKVMKQLKRRRYTGWGRLSRKLINGIRDKQSGKTILDFLKSDGFANRNFMQLIHDDSLTFKEDIQKAQVSGQGDSLHEHIANLAGSPAIKKGILQTVKVVDELVKVMGRHKPENIVIEMARENQTTQKGQKNSRERMKRIEEGIKELGSQILKEHPVENTQLQNEKLYLYYLQNGRDMYVDQELDINRLSDYDVDHIVPQSFLKDDSIDNKVLTRSDKARGKSDNVPSEEVVKKMKNYWRQLLNAKLITQRKFDNLTKAERGGLSELDKAGFIKRQLVETRQITKHVAQILDSRMNTKYDENDKLIREVKVITLKSKLVSDFRKDFQFYKVREINNYHHAHDAYLNAVVGTALIKKYPKLESEFVYGDYKVYDVRKMIAKSEQEIGKATAKYFFYSNIMNFFKTEITLANGEIRKRPLIETNGETGEIVWDKGRDFATVRKVLSMPQVNIVKKTEVQTGGFSKESILPKRNSDKLIARKKDWDPKKYGGFDSPTVAYSVLVVAKVEKGKSKKLKSVKELLGITIMERSSFEKNPIDFLEAKGYKEVKKDLIIKLPKYSLFELENGRKRMLASAGELQKGNELALPSKYVNFLYLASHYEKLKGSPEDNEQKQLFVEQHKHYLDEIIEQISEFSKRVILADANLDKVLSAYNKHRDKPIREQAENIIHLFTLTNLGAPAAFKYFDTTIDRKRYTSTKEVLDATLIHQSITGLYETRIDLSQLGGDGGGSSGSSGSSGSSGSSGGTLNIEDEYRLHETSKEPDVPLGSTWLSDFPQAWAETGGMGLAVRQAPLIIPLKATSTPVSIKQYPMSQEARLGIKPHIQRLLDQGILVPCQSPWNTPLLPVKKPGTNDYRPVQDLREVNKRVEDIHPTVPNPYNLLSGLPPSHQWYTVLDLKDAFFCLRLHPTSQPLFAFEWRDPEMGISGQLTWTRLPQGFKNSPTLFNEALHRDLADFRIQHPDLILLQYVDDLLLAATSEQDCQRGTRALLQTLGNLGYRASAKKAQICQKQVKYLGYLLKEGQRWLTEARKETVMGQPTPKTPRQLREFLGTAGFCRLWIPGFAEMAAPLYPLTKPGTLFNWGPDQQKAYQEIKQALLTAPALGLPDLTKPFELFVDEKQGYAKGVLTQKLGPWRRPVAYLSKKLDPVAAGWPPCLRMVAAIAVLTKDAGKLTMGQPLVILAPHAVEALVKQPPDRWLSNARMTHYQAMLLDTDRVQFGPVVALNPATLLPLPEKEAPHDCLEILAETHGTRPDLTDQPIPDADYTWYTDGSSFLQEGQRRAGAAVTTETEVIWARALPAGTSAQRAELIALTQALKMAEGKKLNVYTDSRYAFATAHVHGEIYRRRGWLTSEGREIKNKNEILALLKALFLPKRLSIIHCPGHQKGNSAEARGNRMADQAAREAAMKAVLETSTLLAGKRTADGSEFEKRTADGSEFESPKKKAKVE

SEQ ID NO: 965 - protein, 2105 aa, synthetic construct
MPAAKRVKLDGGDKKYSIGLDIGTNSVGWAVITDEYKVPSKKFKVLGNTDRHSIKKNLIGALLFDSGETAEATRLKRTARRRYTRRKNRICYLQEIFSNEMAKVDDSFFHRLEESFLVEEDKKHERHPIFGNIVDEVAYHEKYPTIYHLRKKLVDSTDKADLRLIYLALAHMIKFRGHFLIEGDLNPDNSDVDKLFIQLVQTYNQLFEENPINASGVDAKAILSARLSKSRRLENLIAQLPGEKKNGLFGNLIALSLGLTPNFKSNFDLAEDAKLQLSKDTYDDDLDNLLAQIGDQYADLFLAAKNLSDAILLSDILRVNTEITKAPLSASMIKRYDEHHQDLTLLKALVRQQLPEKYKEIFFDQSKNGYAGYIDGGASQEEFYKFIKPILEKMDGTEELLVKLNREDLLRKQRTFDNGSIPHQIHLGELHAILRRQEDFYPFLKDNREKIEKILTFRIPYYVGPLARGNSRFAWMTRKSEETITPWNFEEVVDKGASAQSFIERMTNFDKNLPNEKVLPKHSLLYEYFTVYNELTKVKYVTEGMRKPAFLSGEQKKAIVDLLFKTNRKVTVKQLKEDYFKKIECFDSVEISGVEDRFNASLGTYHDLLKIIKDKDFLDNEENEDILEDIVLTLTLFEDREMIEERLKTYAHLFDDKVMKQLKRRRYTGWGRLSRKLINGIRDKQSGKTILDFLKSDGFANRNFMQLIHDDSLTFKEDIQKAQVSGQGDSLHEHIANLAGSPAIKKGILQTVKVVDELVKVMGRHKPENIVIEMARENQTTQKGQKNSRERMKRIEEGIKELGSQILKEHPVENTQLQNEKLYLYYLQNGRDMYVDQELDINRLSDYDVDHIVPQSFLKDDSIDNKVLTRSDKARGKSDNVPSEEVVKKMKNYWRQLLNAKLITQRKFDNLTKAERGGLSELDKAGFIKRQLVETRQITKHVAQILDSRMNTKYDENDKLIREVKVITLKSKLVSDFRKDFQFYKVREINNYHHAHDAYLNAVVGTALIKKYPKLESEFVYGDYKVYDVRKMIAKSEQEIGKATAKYFFYSNIMNFFKTEITLANGEIRKRPLIETNGETGEIVWDKGRDFATVRKVLSMPQVNIVKKTEVQTGGFSKESILPKRNSDKLIARKKDWDPKKYGGFDSPTVAYSVLVVAKVEKGKSKKLKSVKELLGITIMERSSFEKNPIDFLEAKGYKEVKKDLIIKLPKYSLFELENGRKRMLASAGELQKGNELALPSKYVNFLYLASHYEKLKGSPEDNEQKQLFVEQHKHYLDEIIEQISEFSKRVILADANLDKVLSAYNKHRDKPIREQAENIIHLFTLTNLGAPAAFKYFDTTIDRKRYTSTKEVLDATLIHQSITGLYETRIDLSQLGGDGGEAAAKEAAAKEAAAKEAAAKGGTLNIEDEYRLHETSKEPDVPLGSTWLSDFPQAWAETGGMGLAVRQAPLIIPLKATSTPVSIKQYPMSQEARLGIKPHIQRLLDQGILVPCQSPWNTPLLPVKKPGTNDYRPVQDLREVNKRVEDIHPTVPNPYNLLSGLPPSHQWYTVLDLKDAFFCLRLHPTSQPLFAFEWRDPEMGISGQLTWTRLPQGFKNSPTLFNEALHRDLADFRIQHPDLILLQYVDDLLLAATSEQDCQRGTRALLQTLGNLGYRASAKKAQICQKQVKYLGYLLKEGQRWLTEARKETVMGQPTPKTPRQLREFLGTAGFCRLWIPGFAEMAAPLYPLTKPGTLFNWGPDQQKAYQEIKQALLTAPALGLPDLTKPFELFVDEKQGYAKGVLTQKLGPWRRPVAYLSKKLDPVAAGWPPCLRMVAAIAVLTKDAGKLTMGQPLVILAPHAVEALVKQPPDRWLSNARMTHYQAMLLDTDRVQFGPVVALNPATLLPLPEKEAPHDCLEILAETHGTRPDLTDQPIPDADYTWYTDGSSFLQEGQRRAGAAVTTETEVIWARALPAGTSAQRAELIALTQALKMAEGKKLNVYTDSRYAFATAHVHGEIYRRRGWLTSEGREIKNKNEILALLKALFLPKRLSIIHCPGHQKGNSAEARGNRMADQAAREAAMKAVLETSTLLAGKRTADGSEFEKRTADGSEFESPKKKAKVE

SEQ ID NO: 966 - protein, 2093 aa, synthetic construct
MPAAKRVKLDGGDKKYSIGLDIGTNSVGWAVITDEYKVPSKKFKVLGNTDRHSIKKNLIGALLFDSGETAEATRLKRTARRRYTRRKNRICYLQEIFSNEMAKVDDSFFHRLEESFLVEEDKKHERHPIFGNIVDEVAYHEKYPTIYHLRKKLVDSTDKADLRLIYLALAHMIKFRGHFLIEGDLNPDNSDVDKLFIQLVQTYNQLFEENPINASGVDAKAILSARLSKSRRLENLIAQLPGEKKNGLFGNLIALSLGLTPNFKSNFDLAEDAKLQLSKDTYDDDLDNLLAQIGDQYADLFLAAKNLSDAILLSDILRVNTEITKAPLSASMIKRYDEHHQDLTLLKALVRQQLPEKYKEIFFDQSKNGYAGYIDGGASQEEFYKFIKPILEKMDGTEELLVKLNREDLLRKQRTFDNGSIPHQIHLGELHAILRRQEDFYPFLKDNREKIEKILTFRIPYYVGPLARGNSRFAWMTRKSEETITPWNFEEVVDKGASAQSFIERMTNFDKNLPNEKVLPKHSLLYEYFTVYNELTKVKYVTEGMRKPAFLSGEQKKAIVDLLFKTNRKVTVKQLKEDYFKKIECFDSVEISGVEDRFNASLGTYHDLLKIIKDKDFLDNEENEDILEDIVLTLTLFEDREMIEERLKTYAHLFDDKVMKQLKRRRYTGWGRLSRKLINGIRDKQSGKTILDFLKSDGFANRNFMQLIHDDSLTFKEDIQKAQVSGQGDSLHEHIANLAGSPAIKKGILQTVKVVDELVKVMGRHKPENIVIEMARENQTTQKGQKNSRERMKRIEEGIKELGSQILKEHPVENTQLQNEKLYLYYLQNGRDMYVDQELDINRLSDYDVDHIVPQSFLKDDSIDNKVLTRSDKARGKSDNVPSEEVVKKMKNYWRQLLNAKLITQRKFDNLTKAERGGLSELDKAGFIKRQLVETRQITKHVAQILDSRMNTKYDENDKLIREVKVITLKSKLVSDFRKDFQFYKVREINNYHHAHDAYLNAVVGTALIKKYPKLESEFVYGDYKVYDVRKMIAKSEQEIGKATAKYFFYSNIMNFFKTEITLANGEIRKRPLIETNGETGEIVWDKGRDFATVRKVLSMPQVNIVKKTEVQTGGFSKESILPKRNSDKLIARKKDWDPKKYGGFDSPTVAYSVLVVAKVEKGKSKKLKSVKELLGITIMERSSFEKNPIDFLEAKGYKEVKKDLIIKLPKYSLFELENGRKRMLASAGELQKGNELALPSKYVNFLYLASHYEKLKGSPEDNEQKQLFVEQHKHYLDEIIEQISEFSKRVILADANLDKVLSAYNKHRDKPIREQAENIIHLFTLTNLGAPAAFKYFDTTIDRKRYTSTKEVLDATLIHQSITGLYETRIDLSQLGGDGGGSSEAAAKGGTLNIEDEYRLHETSKEPDVPLGSTWLSDFPQAWAETGGMGLAVRQAPLIIPLKATSTPVSIKQYPMSQEARLGIKPHIQRLLDQGILVPCQSPWNTPLLPVKKPGTNDYRPVQDLREVNKRVEDIHPTVPNPYNLLSGLPPSHQWYTVLDLKDAFFCLRLHPTSQPLFAFEWRDPEMGISGQLTWTRLPQGFKNSPTLFNEALHRDLADFRIQHPDLILLQYVDDLLLAATSEQDCQRGTRALLQTLGNLGYRASAKKAQICQKQVKYLGYLLKEGQRWLTEARKETVMGQPTPKTPRQLREFLGTAGFCRLWIPGFAEMAAPLYPLTKPGTLFNWGPDQQKAYQEIKQALLTAPALGLPDLTKPFELFVDEKQGYAKGVLTQKLGPWRRPVAYLSKKLDPVAAGWPPCLRMVAAIAVLTKDAGKLTMGQPLVILAPHAVEALVKQPPDRWLSNARMTHYQAMLLDTDRVQFGPVVALNPATLLPLPEKEAPHDCLEILAETHGTRPDLTDQPIPDADYTWYTDGSSFLQEGQRRAGAAVTTETEVIWARALPAGTSAQRAELIALTQALKMAEGKKLNVYTDSRYAFATAHVHGEIYRRRGWLTSEGREIKNKNEILALLKALFLPKRLSIIHCPGHQKGNSAEARGNRMADQAAREAAMKAVLETSTLLAGKRTADGSEFEKRTADGSEFESPKKKAKVE

SEQ ID NO: 967 - protein, 2096 aa, synthetic construct
MPAAKRVKLDGGDKKYSIGLDIGTNSVGWAVITDEYKVPSKKFKVLGNTDRHSIKKNLIGALLFDSGETAEATRLKRTARRRYTRRKNRICYLQEIFSNEMAKVDDSFFHRLEESFLVEEDKKHERHPIFGNIVDEVAYHEKYPTIYHLRKKLVDSTDKADLRLIYLALAHMIKFRGHFLIEGDLNPDNSDVDKLFIQLVQTYNQLFEENPINASGVDAKAILSARLSKSRRLENLIAQLPGEKKNGLFGNLIALSLGLTPNFKSNFDLAEDAKLQLSKDTYDDDLDNLLAQIGDQYADLFLAAKNLSDAILLSDILRVNTEITKAPLSASMIKRYDEHHQDLTLLKALVRQQLPEKYKEIFFDQSKNGYAGYIDGGASQEEFYKFIKPILEKMDGTEELLVKLNREDLLRKQRTFDNGSIPHQIHLGELHAILRRQEDFYPFLKDNREKIEKILTFRIPYYVGPLARGNSRFAWMTRKSEETITPWNFEEVVDKGASAQSFIERMTNFDKNLPNEKVLPKHSLLYEYFTVYNELTKVKYVTEGMRKPAFLSGEQKKAIVDLLFKTNRKVTVKQLKEDYFKKIECFDSVEISGVEDRFNASLGTYHDLLKIIKDKDFLDNEENEDILEDIVLTLTLFEDREMIEERLKTYAHLFDDKVMKQLKRRRYTGWGRLSRKLINGIRDKQSGKTILDFLKSDGFANRNFMQLIHDDSLTFKEDIQKAQVSGQGDSLHEHIANLAGSPAIKKGILQTVKVVDELVKVMGRHKPENIVIEMARENQTTQKGQKNSRERMKRIEEGIKELGSQILKEHPVENTQLQNEKLYLYYLQNGRDMYVDQELDINRLSDYDVDHIVPQSFLKDDSIDNKVLTRSDKARGKSDNVPSEEVVKKMKNYWRQLLNAKLITQRKFDNLTKAERGGLSELDKAGFIKRQLVETRQITKHVAQILDSRMNTKYDENDKLIREVKVITLKSKLVSDFRKDFQFYKVREINNYHHAHDAYLNAVVGTALIKKYPKLESEFVYGDYKVYDVRKMIAKSEQEIGKATAKYFFYSNIMNFFKTEITLANGEIRKRPLIETNGETGEIVWDKGRDFATVRKVLSMPQVNIVKKTEVQTGGFSKESILPKRNSDKLIARKKDWDPKKYGGFDSPTVAYSVLVVAKVEKGKSKKLKSVKELLGITIMERSSFEKNPIDFLEAKGYKEVKKDLIIKLPKYSLFELENGRKRMLASAGELQKGNELALPSKYVNFLYLASHYEKLKGSPEDNEQKQLFVEQHKHYLDEIIEQISEFSKRVILADANLDKVLSAYNKHRDKPIREQAENIIHLFTLTNLGAPAAFKYFDTTIDRKRYTSTKEVLDATLIHQSITGLYETRIDLSQLGGDGGPAPGSSEAAAKGGTLNIEDEYRLHETSKEPDVPLGSTWLSDFPQAWAETGGMGLAVRQAPLIIPLKATSTPVSIKQYPMSQEARLGIKPHIQRLLDQGILVPCQSPWNTPLLPVKKPGTNDYRPVQDLREVNKRVEDIHPTVPNPYNLLSGLPPSHQWYTVLDLKDAFFCLRLHPTSQPLFAFEWRDPEMGISGQLTWTRLPQGFKNSPTLFNEALHRDLADFRIQHPDLILLQYVDDLLLAATSEQDCQRGTRALLQTLGNLGYRASAKKAQICQKQVKYLGYLLKEGQRWLTEARKETVMGQPTPKTPRQLREFLGTAGFCRLWIPGFAEMAAPLYPLTKPGTLFNWGPDQQKAYQEIKQALLTAPALGLPDLTKPFELFVDEKQGYAKGVLTQKLGPWRRPVAYLSKKLDPVAAGWPPCLRMVAAIAVLTKDAGKLTMGQPLVILAPHAVEALVKQPPDRWLSNARMTHYQAMLLDTDRVQFGPVVALNPATLLPLPEKEAPHDCLEILAETHGTRPDLTDQPIPDADYTWYTDGSSFLQEGQRRAGAAVTTETEVIWARALPAGTSAQRAELIALTQALKMAEGKKLNVYTDSRYAFATAHVHGEIYRRRGWLTSEGREIKNKNEILALLKALFLPKRLSIIHCPGHQKGNSAEARGNRMADQAAREAAMKAVLETSTLLAGKRTADGSEFEKRTADGSEFESPKKKAKVE

SEQ ID NO: 968 - protein, 2096 aa, synthetic construct
MPAAKRVKLDGGDKKYSIGLDIGTNSVGWAVITDEYKVPSKKFKVLGNTDRHSIKKNLIGALLFDSGETAEATRLKRTARRRYTRRKNRICYLQEIFSNEMAKVDDSFFHRLEESFLVEEDKKHERHPIFGNIVDEVAYHEKYPTIYHLRKKLVDSTDKADLRLIYLALAHMIKFRGHFLIEGDLNPDNSDVDKLFIQLVQTYNQLFEENPINASGVDAKAILSARLSKSRRLENLIAQLPGEKKNGLFGNLIALSLGLTPNFKSNFDLAEDAKLQLSKDTYDDDLDNLLAQIGDQYADLFLAAKNLSDAILLSDILRVNTEITKAPLSASMIKRYDEHHQDLTLLKALVRQQLPEKYKEIFFDQSKNGYAGYIDGGASQEEFYKFIKPILEKMDGTEELLVKLNREDLLRKQRTFDNGSIPHQIHLGELHAILRRQEDFYPFLKDNREKIEKILTFRIPYYVGPLARGNSRFAWMTRKSEETITPWNFEEVVDKGASAQSFIERMTNFDKNLPNEKVLPKHSLLYEYFTVYNELTKVKYVTEGMRKPAFLSGEQKKAIVDLLFKTNRKVTVKQLKEDYFKKIECFDSVEISGVEDRFNASLGTYHDLLKIIKDKDFLDNEENEDILEDIVLTLTLFEDREMIEERLKTYAHLFDDKVMKQLKRRRYTGWGRLSRKLINGIRDKQSGKTILDFLKSDGFANRNFMQLIHDDSLTFKEDIQKAQVSGQGDSLHEHIANLAGSPAIKKGILQTVKVVDELVKVMGRHKPENIVIEMARENQTTQKGQKNSRERMKRIEEGIKELGSQILKEHPVENTQLQNEKLYLYYLQNGRDMYVDQELDINRLSDYDVDHIVPQSFLKDDSIDNKVLTRSDKARGKSDNVPSEEVVKKMKNYWRQLLNAKLITQRKFDNLTKAERGGLSELDKAGFIKRQLVETRQITKHVAQILDSRMNTKYDENDKLIREVKVITLKSKLVSDFRKDFQFYKVREINNYHHAHDAYLNAVVGTALIKKYPKLESEFVYGDYKVYDVRKMIAKSEQEIGKATAKYFFYSNIMNFFKTEITLANGEIRKRPLIETNGETGEIVWDKGRDFATVRKVLSMPQVNIVKKTEVQTGGFSKESILPKRNSDKLIARKKDWDPKKYGGFDSPTVAYSVLVVAKVEKGKSKKLKSVKELLGITIMERSSFEKNPIDFLEAKGYKEVKKDLIIKLPKYSLFELENGRKRMLASAGELQKGNELALPSKYVNFLYLASHYEKLKGSPEDNEQKQLFVEQHKHYLDEIIEQISEFSKRVILADANLDKVLSAYNKHRDKPIREQAENIIHLFTLTNLGAPAAFKYFDTTIDRKRYTSTKEVLDATLIHQSITGLYETRIDLSQLGGDGGGGSPAPEAAAKGGTLNIEDEYRLHETSKEPDVPLGSTWLSDFPQAWAETGGMGLAVRQAPLIIPLKATSTPVSIKQYPMSQEARLGIKPHIQRLLDQGILVPCQSPWNTPLLPVKKPGTNDYRPVQDLREVNKRVEDIHPTVPNPYNLLSGLPPSHQWYTVLDLKDAFFCLRLHPTSQPLFAFEWRDPEMGISGQLTWTRLPQGFKNSPTLFNEALHRDLADFRIQHPDLILLQYVDDLLLAATSEQDCQRGTRALLQTLGNLGYRASAKKAQICQKQVKYLGYLLKEGQRWLTEARKETVMGQPTPKTPRQLREFLGTAGFCRLWIPGFAEMAAPLYPLTKPGTLFNWGPDQQKAYQEIKQALLTAPALGLPDLTKPFELFVDEKQGYAKGVLTQKLGPWRRPVAYLSKKLDPVAAGWPPCLRMVAAIAVLTKDAGKLTMGQPLVILAPHAVEALVKQPPDRWLSNARMTHYQAMLLDTDRVQFGPVVALNPATLLPLPEKEAPHDCLEILAETHGTRPDLTDQPIPDADYTWYTDGSSFLQEGQRRAGAAVTTETEVIWARALPAGTSAQRAELIALTQALKMAEGKKLNVYTDSRYAFATAHVHGEIYRRRGWLTSEGREIKNKNEILALLKALFLPKRLSIIHCPGHQKGNSAEARGNRMADQAAREAAMKAVLETSTLLAGKRTADGSEFEKRTADGSEFESPKKKAKVE

SEQ ID NO: 969 - protein, 2094 aa, synthetic construct
MPAAKRVKLDGGDKKYSIGLDIGTNSVGWAVITDEYKVPSKKFKVLGNTDRHSIKKNLIGALLFDSGETAEATRLKRTARRRYTRRKNRICYLQEIFSNEMAKVDDSFFHRLEESFLVEEDKKHERHPIFGNIVDEVAYHEKYPTIYHLRKKLVDSTDKADLRLIYLALAHMIKFRGHFLIEGDLNPDNSDVDKLFIQLVQTYNQLFEENPINASGVDAKAILSARLSKSRRLENLIAQLPGEKKNGLFGNLIALSLGLTPNFKSNFDLAEDAKLQLSKDTYDDDLDNLLAQIGDQYADLFLAAKNLSDAILLSDILRVNTEITKAPLSASMIKRYDEHHQDLTLLKALVRQQLPEKYKEIFFDQSKNGYAGYIDGGASQEEFYKFIKPILEKMDGTEELLVKLNREDLLRKQRTFDNGSIPHQIHLGELHAILRRQEDFYPFLKDNREKIEKILTFRIPYYVGPLARGNSRFAWMTRKSEETITPWNFEEVVDKGASAQSFIERMTNFDKNLPNEKVLPKHSLLYEYFTVYNELTKVKYVTEGMRKPAFLSGEQKKAIVDLLFKTNRKVTVKQLKEDYFKKIECFDSVEISGVEDRFNASLGTYHDLLKIIKDKDFLDNEENEDILEDIVLTLTLFEDREMIEERLKTYAHLFDDKVMKQLKRRRYTGWGRLSRKLINGIRDKQSGKTILDFLKSDGFANRNFMQLIHDDSLTFKEDIQKAQVSGQGDSLHEHIANLAGSPAIKKGILQTVKVVDELVKVMGRHKPENIVIEMARENQTTQKGQKNSRERMKRIEEGIKELGSQILKEHPVENTQLQNEKLYLYYLQNGRDMYVDQELDINRLSDYDVDHIVPQSFLKDDSIDNKVLTRSDKARGKSDNVPSEEVVKKMKNYWRQLLNAKLITQRKFDNLTKAERGGLSELDKAGFIKRQLVETRQITKHVAQILDSRMNTKYDENDKLIREVKVITLKSKLVSDFRKDFQFYKVREINNYHHAHDAYLNAVVGTALIKKYPKLESEFVYGDYKVYDVRKMIAKSEQEIGKATAKYFFYSNIMNFFKTEITLANGEIRKRPLIETNGETGEIVWDKGRDFATVRKVLSMPQVNIVKKTEVQTGGFSKESILPKRNSDKLIARKKDWDPKKYGGFDSPTVAYSVLVVAKVEKGKSKKLKSVKELLGITIMERSSFEKNPIDFLEAKGYKEVKKDLIIKLPKYSLFELENGRKRMLASAGELQKGNELALPSKYVNFLYLASHYEKLKGSPEDNEQKQLFVEQHKHYLDEIIEQISEFSKRVILADANLDKVLSAYNKHRDKPIREQAENIIHLFTLTNLGAPAAFKYFDTTIDRKRYTSTKEVLDATLIHQSITGLYETRIDLSQLGGDGGGGGGSSPAPGGTLNIEDEYRLHETSKEPDVPLGSTWLSDFPQAWAETGGMGLAVRQAPLIIPLKATSTPVSIKQYPMSQEARLGIKPHIQRLLDQGILVPCQSPWNTPLLPVKKPGTNDYRPVQDLREVNKRVEDIHPTVPNPYNLLSGLPPSHQWYTVLDLKDAFFCLRLHPTSQPLFAFEWRDPEMGISGQLTWTRLPQGFKNSPTLFNEALHRDLADFRIQHPDLILLQYVDDLLLAATSEQDCQRGTRALLQTLGNLGYRASAKKAQICQKQVKYLGYLLKEGQRWLTEARKETVMGQPTPKTPRQLREFLGTAGFCRLWIPGFAEMAAPLYPLTKPGTLFNWGPDQQKAYQEIKQALLTAPALGLPDLTKPFELFVDEKQGYAKGVLTQKLGPWRRPVAYLSKKLDPVAAGWPPCLRMVAAIAVLTKDAGKLTMGQPLVILAPHAVEALVKQPPDRWLSNARMTHYQAMLLDTDRVQFGPVVALNPATLLPLPEKEAPHDCLEILAETHGTRPDLTDQPIPDADYTWYTDGSSFLQEGQRRAGAAVTTETEVIWARALPAGTSAQRAELIALTQALKMAEGKKLNVYTDSRYAFATAHVHGEIYRRRGWLTSEGREIKNKNEILALLKALFLPKRLSIIHCPGHQKGNSAEARGNRMADQAAREAAMKAVLETSTLLAGKRTADGSEFEKRTADGSEFESPKKKAKVE

SEQ ID NO: 970 - protein, 2094 aa, synthetic construct
MPAAKRVKLDGGDKKYSIGLDIGTNSVGWAVITDEYKVPSKKFKVLGNTDRHSIKKNLIGALLFDSGETAEATRLKRTARRRYTRRKNRICYLQEIFSNEMAKVDDSFFHRLEESFLVEEDKKHERHPIFGNIVDEVAYHEKYPTIYHLRKKLVDSTDKADLRLIYLALAHMIKFRGHFLIEGDLNPDNSDVDKLFIQLVQTYNQLFEENPINASGVDAKAILSARLSKSRRLENLIAQLPGEKKNGLFGNLIALSLGLTPNFKSNFDLAEDAKLQLSKDTYDDDLDNLLAQIGDQYADLFLAAKNLSDAILLSDILRVNTEITKAPLSASMIKRYDEHHQDLTLLKALVRQQLPEKYKEIFFDQSKNGYAGYIDGGASQEEFYKFIKPILEKMDGTEELLVKLNREDLLRKQRTFDNGSIPHQIHLGELHAILRRQEDFYPFLKDNREKIEKILTFRIPYYVGPLARGNSRFAWMTRKSEETITPWNFEEVVDKGASAQSFIERMTNFDKNLPNEKVLPKHSLLYEYFTVYNELTKVKYVTEGMRKPAFLSGEQKKAIVDLLFKTNRKVTVKQLKEDYFKKIECFDSVEISGVEDRFNASLGTYHDLLKIIKDKDFLDNEENEDILEDIVLTLTLFEDREMIEERLKTYAHLFDDKVMKQLKRRRYTGWGRLSRKLINGIRDKQSGKTILDFLKSDGFANRNFMQLIHDDSLTFKEDIQKAQVSGQGDSLHEHIANLAGSPAIKKGILQTVKVVDELVKVMGRHKPENIVIEMARENQTTQKGQKNSRERMKRIEEGIKELGSQILKEHPVENTQLQNEKLYLYYLQNGRDMYVDQELDINRLSDYDVDHIVPQSFLKDDSIDNKVLTRSDKARGKSDNVPSEEVVKKMKNYWRQLLNAKLITQRKFDNLTKAERGGLSELDKAGFIKRQLVETRQITKHVAQILDSRMNTKYDENDKLIREVKVITLKSKLVSDFRKDFQFYKVREINNYHHAHDAYLNAVVGTALIKKYPKLESEFVYGDYKVYDVRKMIAKSEQEIGKATAKYFFYSNIMNFFKTEITLANGEIRKRPLIETNGETGEIVWDKGRDFATVRKVLSMPQVNIVKKTEVQTGGFSKESILPKRNSDKLIARKKDWDPKKYGGFDSPTVAYSVLVVAKVEKGKSKKLKSVKELLGITIMERSSFEKNPIDFLEAKGYKEVKKDLIIKLPKYSLFELENGRKRMLASAGELQKGNELALPSKYVNFLYLASHYEKLKGSPEDNEQKQLFVEQHKHYLDEIIEQISEFSKRVILADANLDKVLSAYNKHRDKPIREQAENIIHLFTLTNLGAPAAFKYFDTTIDRKRYTSTKEVLDATLIHQSITGLYETRIDLSQLGGDGGPAPGSSGGSGGTLNIEDEYRLHETSKEPDVPLGSTWLSDFPQAWAETGGMGLAVRQAPLIIPLKATSTPVSIKQYPMSQEARLGIKPHIQRLLDQGILVPCQSPWNTPLLPVKKPGTNDYRPVQDLREVNKRVEDIHPTVPNPYNLLSGLPPSHQWYTVLDLKDAFFCLRLHPTSQPLFAFEWRDPEMGISGQLTWTRLPQGFKNSPTLFNEALHRDLADFRIQHPDLILLQYVDDLLLAATSEQDCQRGTRALLQTLGNLGYRASAKKAQICQKQVKYLGYLLKEGQRWLTEARKETVMGQPTPKTPRQLREFLGTAGFCRLWIPGFAEMAAPLYPLTKPGTLFNWGPDQQKAYQEIKQALLTAPALGLPDLTKPFELFVDEKQGYAKGVLTQKLGPWRRPVAYLSKKLDPVAAGWPPCLRMVAAIAVLTKDAGKLTMGQPLVILAPHAVEALVKQPPDRWLSNARMTHYQAMLLDTDRVQFGPVVALNPATLLPLPEKEAPHDCLEILAETHGTRPDLTDQPIPDADYTWYTDGSSFLQEGQRRAGAAVTTETEVIWARALPAGTSAQRAELIALTQALKMAEGKKLNVYTDSRYAFATAHVHGEIYRRRGWLTSEGREIKNKNEILALLKALFLPKRLSIIHCPGHQKGNSAEARGNRMADQAAREAAMKAVLETSTLLAGKRTADGSEFEKRTADGSEFESPKKKAKVE

SEQ ID NO: 971 - protein, 2096 aa, synthetic construct
MPAAKRVKLDGGDKKYSIGLDIGTNSVGWAVITDEYKVPSKKFKVLGNTDRHSIKKNLIGALLFDSGETAEATRLKRTARRRYTRRKNRICYLQEIFSNEMAKVDDSFFHRLEESFLVEEDKKHERHPIFGNIVDEVAYHEKYPTIYHLRKKLVDSTDKADLRLIYLALAHMIKFRGHFLIEGDLNPDNSDVDKLFIQLVQTYNQLFEENPINASGVDAKAILSARLSKSRRLENLIAQLPGEKKNGLFGNLIALSLGLTPNFKSNFDLAEDAKLQLSKDTYDDDLDNLLAQIGDQYADLFLAAKNLSDAILLSDILRVNTEITKAPLSASMIKRYDEHHQDLTLLKALVRQQLPEKYKEIFFDQSKNGYAGYIDGGASQEEFYKFIKPILEKMDGTEELLVKLNREDLLRKQRTFDNGSIPHQIHLGELHAILRRQEDFYPFLKDNREKIEKILTFRIPYYVGPLARGNSRFAWMTRKSEETITPWNFEEVVDKGASAQSFIERMTNFDKNLPNEKVLPKHSLLYEYFTVYNELTKVKYVTEGMRKPAFLSGEQKKAIVDLLFKTNRKVTVKQLKEDYFKKIECFDSVEISGVEDRFNASLGTYHDLLKIIKDKDFLDNEENEDILEDIVLTLTLFEDREMIEERLKTYAHLFDDKVMKQLKRRRYTGWGRLSRKLINGIRDKQSGKTILDFLKSDGFANRNFMQLIHDDSLTFKEDIQKAQVSGQGDSLHEHIANLAGSPAIKKGILQTVKVVDELVKVMGRHKPENIVIEMARENQTTQKGQKNSRERMKRIEEGIKELGSQILKEHPVENTQLQNEKLYLYYLQNGRDMYVDQELDINRLSDYDVDHIVPQSFLKDDSIDNKVLTRSDKARGKSDNVPSEEVVKKMKNYWRQLLNAKLITQRKFDNLTKAERGGLSELDKAGFIKRQLVETRQITKHVAQILDSRMNTKYDENDKLIREVKVITLKSKLVSDFRKDFQFYKVREINNYHHAHDAYLNAVVGTALIKKYPKLESEFVYGDYKVYDVRKMIAKSEQEIGKATAKYFFYSNIMNFFKTEITLANGEIRKRPLIETNGETGEIVWDKGRDFATVRKVLSMPQVNIVKKTEVQTGGFSKESILPKRNSDKLIARKKDWDPKKYGGFDSPTVAYSVLVVAKVEKGKSKKLKSVKELLGITIMERSSFEKNPIDFLEAKGYKEVKKDLIIKLPKYSLFELENGRKRMLASAGELQKGNELALPSKYVNFLYLASHYEKLKGSPEDNEQKQLFVEQHKHYLDEIIEQISEFSKRVILADANLDKVLSAYNKHRDKPIREQAENIIHLFTLTNLGAPAAFKYFDTTIDRKRYTSTKEVLDATLIHQSITGLYETRIDLSQLGGDGGGSSGGGEAAAKGGTLNIEDEYRLHETSKEPDVPLGSTWLSDFPQAWAETGGMGLAVRQAPLIIPLKATSTPVSIKQYPMSQEARLGIKPHIQRLLDQGILVPCQSPWNTPLLPVKKPGTNDYRPVQDLREVNKRVEDIHPTVPNPYNLLSGLPPSHQWYTVLDLKDAFFCLRLHPTSQPLFAFEWRDPEMGISGQLTWTRLPQGFKNSPTLFNEALHRDLADFRIQHPDLILLQYVDDLLLAATSEQDCQRGTRALLQTLGNLGYRASAKKAQICQKQVKYLGYLLKEGQRWLTEARKETVMGQPTPKTPRQLREFLGTAGFCRLWIPGFAEMAAPLYPLTKPGTLFNWGPDQQKAYQEIKQALLTAPALGLPDLTKPFELFVDEKQGYAKGVLTQKLGPWRRPVAYLSKKLDPVAAGWPPCLRMVAAIAVLTKDAGKLTMGQPLVILAPHAVEALVKQPPDRWLSNARMTHYQAMLLDTDRVQFGPVVALNPATLLPLPEKEAPHDCLEILAETHGTRPDLTDQPIPDADYTWYTDGSSFLQEGQRRAGAAVTTETEVIWARALPAGTSAQRAELIALTQALKMAEGKKLNVYTDSRYAFATAHVHGEIYRRRGWLTSEGREIKNKNEILALLKALFLPKRLSIIHCPGHQKGNSAEARGNRMADQAAREAAMKAVLETSTLLAGKRTADGSEFEKRTADGSEFESPKKKAKVE

SEQ ID NO: 972 - protein, 2100 aa, synthetic construct
MPAAKRVKLDGGDKKYSIGLDIGTNSVGWAVITDEYKVPSKKFKVLGNTDRHSIKKNLIGALLFDSGETAEATRLKRTARRRYTRRKNRICYLQEIFSNEMAKVDDSFFHRLEESFLVEEDKKHERHPIFGNIVDEVAYHEKYPTIYHLRKKLVDSTDKADLRLIYLALAHMIKFRGHFLIEGDLNPDNSDVDKLFIQLVQTYNQLFEENPINASGVDAKAILSARLSKSRRLENLIAQLPGEKKNGLFGNLIALSLGLTPNFKSNFDLAEDAKLQLSKDTYDDDLDNLLAQIGDQYADLFLAAKNLSDAILLSDILRVNTEITKAPLSASMIKRYDEHHQDLTLLKALVRQQLPEKYKEIFFDQSKNGYAGYIDGGASQEEFYKFIKPILEKMDGTEELLVKLNREDLLRKQRTFDNGSIPHQIHLGELHAILRRQEDFYPFLKDNREKIEKILTFRIPYYVGPLARGNSRFAWMTRKSEETITPWNFEEVVDKGASAQSFIERMTNFDKNLPNEKVLPKHSLLYEYFTVYNELTKVKYVTEGMRKPAFLSGEQKKAIVDLLFKTNRKVTVKQLKEDYFKKIECFDSVEISGVEDRFNASLGTYHDLLKIIKDKDFLDNEENEDILEDIVLTLTLFEDREMIEERLKTYAHLFDDKVMKQLKRRRYTGWGRLSRKLINGIRDKQSGKTILDFLKSDGFANRNFMQLIHDDSLTFKEDIQKAQVSGQGDSLHEHIANLAGSPAIKKGILQTVKVVDELVKVMGRHKPENIVIEMARENQTTQKGQKNSRERMKRIEEGIKELGSQILKEHPVENTQLQNEKLYLYYLQNGRDMYVDQELDINRLSDYDVDHIVPQSFLKDDSIDNKVLTRSDKARGKSDNVPSEEVVKKMKNYWRQLLNAKLITQRKFDNLTKAERGGLSELDKAGFIKRQLVETRQITKHVAQILDSRMNTKYDENDKLIREVKVITLKSKLVSDFRKDFQFYKVREINNYHHAHDAYLNAVVGTALIKKYPKLESEFVYGDYKVYDVRKMIAKSEQEIGKATAKYFFYSNIMNFFKTEITLANGEIRKRPLIETNGETGEIVWDKGRDFATVRKVLSMPQVNIVKKTEVQTGGFSKESILPKRNSDKLIARKKDWDPKKYGGFDSPTVAYSVLVVAKVEKGKSKKLKSVKELLGITIMERSSFEKNPIDFLEAKGYKEVKKDLIIKLPKYSLFELENGRKRMLASAGELQKGNELALPSKYVNFLYLASHYEKLKGSPEDNEQKQLFVEQHKHYLDEIIEQISEFSKRVILADANLDKVLSAYNKHRDKPIREQAENIIHLFTLTNLGAPAAFKYFDTTIDRKRYTSTKEVLDATLIHQSITGLYETRIDLSQLGGDGGGGGGSEAAAKGGGGSGGTLNIEDEYRLHETSKEPDVPLGSTWLSDFPQAWAETGGMGLAVRQAPLIIPLKATSTPVSIKQYPMSQEARLGIKPHIQRLLDQGILVPCQSPWNTPLLPVKKPGTNDYRPVQDLREVNKRVEDIHPTVPNPYNLLSGLPPSHQWYTVLDLKDAFFCLRLHPTSQPLFAFEWRDPEMGISGQLTWTRLPQGFKNSPTLFNEALHRDLADFRIQHPDLILLQYVDDLLLAATSEQDCQRGTRALLQTLGNLGYRASAKKAQICQKQVKYLGYLLKEGQRWLTEARKETVMGQPTPKTPRQLREFLGTAGFCRLWIPGFAEMAAPLYPLTKPGTLFNWGPDQQKAYQEIKQALLTAPALGLPDLTKPFELFVDEKQGYAKGVLTQKLGPWRRPVAYLSKKLDPVAAGWPPCLRMVAAIAVLTKDAGKLTMGQPLVILAPHAVEALVKQPPDRWLSNARMTHYQAMLLDTDRVQFGPVVALNPATLLPLPEKEAPHDCLEILAETHGTRPDLTDQPIPDADYTWYTDGSSFLQEGQRRAGAAVTTETEVIWARALPAGTSAQRAELIALTQALKMAEGKKLNVYTDSRYAFATAHVHGEIYRRRGWLTSEGREIKNKNEILALLKALFLPKRLSIIHCPGHQKGNSAEARGNRMADQAAREAAMKAVLETSTLLAGKRTADGSEFEKRTADGSEFESPKKKAKVE

SEQ ID NO: 973 - protein, 2096 aa, synthetic construct
MPAAKRVKLDGGDKKYSIGLDIGTNSVGWAVITDEYKVPSKKFKVLGNTDRHSIKKNLIGALLFDSGETAEATRLKRTARRRYTRRKNRICYLQEIFSNEMAKVDDSFFHRLEESFLVEEDKKHERHPIFGNIVDEVAYHEKYPTIYHLRKKLVDSTDKADLRLIYLALAHMIKFRGHFLIEGDLNPDNSDVDKLFIQLVQTYNQLFEENPINASGVDAKAILSARLSKSRRLENLIAQLPGEKKNGLFGNLIALSLGLTPNFKSNFDLAEDAKLQLSKDTYDDDLDNLLAQIGDQYADLFLAAKNLSDAILLSDILRVNTEITKAPLSASMIKRYDEHHQDLTLLKALVRQQLPEKYKEIFFDQSKNGYAGYIDGGASQEEFYKFIKPILEKMDGTEELLVKLNREDLLRKQRTFDNGSIPHQIHLGELHAILRRQEDFYPFLKDNREKIEKILTFRIPYYVGPLARGNSRFAWMTRKSEETITPWNFEEVVDKGASAQSFIERMTNFDKNLPNEKVLPKHSLLYEYFTVYNELTKVKYVTEGMRKPAFLSGEQKKAIVDLLFKTNRKVTVKQLKEDYFKKIECFDSVEISGVEDRFNASLGTYHDLLKIIKDKDFLDNEENEDILEDIVLTLTLFEDREMIEERLKTYAHLFDDKVMKQLKRRRYTGWGRLSRKLINGIRDKQSGKTILDFLKSDGFANRNFMQLIHDDSLTFKEDIQKAQVSGQGDSLHEHIANLAGSPAIKKGILQTVKVVDELVKVMGRHKPENIVIEMARENQTTQKGQKNSRERMKRIEEGIKELGSQILKEHPVENTQLQNEKLYLYYLQNGRDMYVDQELDINRLSDYDVDHIVPQSFLKDDSIDNKVLTRSDKARGKSDNVPSEEVVKKMKNYWRQLLNAKLITQRKFDNLTKAERGGLSELDKAGFIKRQLVETRQITKHVAQILDSRMNTKYDENDKLIREVKVITLKSKLVSDFRKDFQFYKVREINNYHHAHDAYLNAVVGTALIKKYPKLESEFVYGDYKVYDVRKMIAKSEQEIGKATAKYFFYSNIMNFFKTEITLANGEIRKRPLIETNGETGEIVWDKGRDFATVRKVLSMPQVNIVKKTEVQTGGFSKESILPKRNSDKLIARKKDWDPKKYGGFDSPTVAYSVLVVAKVEKGKSKKLKSVKELLGITIMERSSFEKNPIDFLEAKGYKEVKKDLIIKLPKYSLFELENGRKRMLASAGELQKGNELALPSKYVNFLYLASHYEKLKGSPEDNEQKQLFVEQHKHYLDEIIEQISEFSKRVILADANLDKVLSAYNKHRDKPIREQAENIIHLFTLTNLGAPAAFKYFDTTIDRKRYTSTKEVLDATLIHQSITGLYETRIDLSQLGGDGGGGGGGSEAAAKGGTLNIEDEYRLHETSKEPDVPLGSTWLSDFPQAWAETGGMGLAVRQAPLIIPLKATSTPVSIKQYPMSQEARLGIKPHIQRLLDQGILVPCQSPWNTPLLPVKKPGTNDYRPVQDLREVNKRVEDIHPTVPNPYNLLSGLPPSHQWYTVLDLKDAFFCLRLHPTSQPLFAFEWRDPEMGISGQLTWTRLPQGFKNSPTLFNEALHRDLADFRIQHPDLILLQYVDDLLLAATSEQDCQRGTRALLQTLGNLGYRASAKKAQICQKQVKYLGYLLKEGQRWLTEARKETVMGQPTPKTPRQLREFLGTAGFCRLWIPGFAEMAAPLYPLTKPGTLFNWGPDQQKAYQEIKQALLTAPALGLPDLTKPFELFVDEKQGYAKGVLTQKLGPWRRPVAYLSKKLDPVAAGWPPCLRMVAAIAVLTKDAGKLTMGQPLVILAPHAVEALVKQPPDRWLSNARMTHYQAMLLDTDRVQFGPVVALNPATLLPLPEKEAPHDCLEILAETHGTRPDLTDQPIPDADYTWYTDGSSFLQEGQRRAGAAVTTETEVIWARALPAGTSAQRAELIALTQALKMAEGKKLNVYTDSRYAFATAHVHGEIYRRRGWLTSEGREIKNKNEILALLKALFLPKRLSIIHCPGHQKGNSAEARGNRMADQAAREAAMKAVLETSTLLAGKRTADGSEFEKRTADGSEFESPKKKAKVE

SEQ ID NO: 974 - protein, 2091 aa, synthetic construct
MPAAKRVKLDGGDKKYSIGLDIGTNSVGWAVITDEYKVPSKKFKVLGNTDRHSIKKNLIGALLFDSGETAEATRLKRTARRRYTRRKNRICYLQEIFSNEMAKVDDSFFHRLEESFLVEEDKKHERHPIFGNIVDEVAYHEKYPTIYHLRKKLVDSTDKADLRLIYLALAHMIKFRGHFLIEGDLNPDNSDVDKLFIQLVQTYNQLFEENPINASGVDAKAILSARLSKSRRLENLIAQLPGEKKNGLFGNLIALSLGLTPNFKSNFDLAEDAKLQLSKDTYDDDLDNLLAQIGDQYADLFLAAKNLSDAILLSDILRVNTEITKAPLSASMIKRYDEHHQDLTLLKALVRQQLPEKYKEIFFDQSKNGYAGYIDGGASQEEFYKFIKPILEKMDGTEELLVKLNREDLLRKQRTFDNGSIPHQIHLGELHAILRRQEDFYPFLKDNREKIEKILTFRIPYYVGPLARGNSRFAWMTRKSEETITPWNFEEVVDKGASAQSFIERMTNFDKNLPNEKVLPKHSLLYEYFTVYNELTKVKYVTEGMRKPAFLSGEQKKAIVDLLFKTNRKVTVKQLKEDYFKKIECFDSVEISGVEDRFNASLGTYHDLLKIIKDKDFLDNEENEDILEDIVLTLTLFEDREMIEERLKTYAHLFDDKVMKQLKRRRYTGWGRLSRKLINGIRDKQSGKTILDFLKSDGFANRNFMQLIHDDSLTFKEDIQKAQVSGQGDSLHEHIANLAGSPAIKKGILQTVKVVDELVKVMGRHKPENIVIEMARENQTTQKGQKNSRERMKRIEEGIKELGSQILKEHPVENTQLQNEKLYLYYLQNGRDMYVDQELDINRLSDYDVDHIVPQSFLKDDSIDNKVLTRSDKARGKSDNVPSEEVVKKMKNYWRQLLNAKLITQRKFDNLTKAERGGLSELDKAGFIKRQLVETRQITKHVAQILDSRMNTKYDENDKLIREVKVITLKSKLVSDFRKDFQFYKVREINNYHHAHDAYLNAVVGTALIKKYPKLESEFVYGDYKVYDVRKMIAKSEQEIGKATAKYFFYSNIMNFFKTEITLANGEIRKRPLIETNGETGEIVWDKGRDFATVRKVLSMPQVNIVKKTEVQTGGFSKESILPKRNSDKLIARKKDWDPKKYGGFDSPTVAYSVLVVAKVEKGKSKKLKSVKELLGITIMERSSFEKNPIDFLEAKGYKEVKKDLIIKLPKYSLFELENGRKRMLASAGELQKGNELALPSKYVNFLYLASHYEKLKGSPEDNEQKQLFVEQHKHYLDEIIEQISEFSKRVILADANLDKVLSAYNKHRDKPIREQAENIIHLFTLTNLGAPAAFKYFDTTIDRKRYTSTKEVLDATLIHQSITGLYETRIDLSQLGGDGGGGGGGSGGTLNIEDEYRLHETSKEPDVPLGSTWLSDFPQAWAETGGMGLAVRQAPLIIPLKATSTPVSIKQYPMSQEARLGIKPHIQRLLDQGILVPCQSPWNTPLLPVKKPGTNDYRPVQDLREVNKRVEDIHPTVPNPYNLLSGLPPSHQWYTVLDLKDAFFCLRLHPTSQPLFAFEWRDPEMGISGQLTWTRLPQGFKNSPTLFNEALHRDLADFRIQHPDLILLQYVDDLLLAATSEQDCQRGTRALLQTLGNLGYRASAKKAQICQKQVKYLGYLLKEGQRWLTEARKETVMGQPTPKTPRQLREFLGTAGFCRLWIPGFAEMAAPLYPLTKPGTLFNWGPDQQKAYQEIKQALLTAPALGLPDLTKPFELFVDEKQGYAKGVLTQKLGPWRRPVAYLSKKLDPVAAGWPPCLRMVAAIAVLTKDAGKLTMGQPLVILAPHAVEALVKQPPDRWLSNARMTHYQAMLLDTDRVQFGPVVALNPATLLPLPEKEAPHDCLEILAETHGTRPDLTDQPIPDADYTWYTDGSSFLQEGQRRAGAAVTTETEVIWARALPAGTSAQRAELIALTQALKMAEGKKLNVYTDSRYAFATAHVHGEIYRRRGWLTSEGREIKNKNEILALLKALFLPKRLSIIHCPGHQKGNSAEARGNRMADQAAREAAMKAVLETSTLLAGKRTADGSEFEKRTADGSEFESPKKKAKVE

SEQ ID NO: 975 - protein, 2096 aa, synthetic construct
MPAAKRVKLDGGDKKYSIGLDIGTNSVGWAVITDEYKVPSKKFKVLGNTDRHSIKKNLIGALLFDSGETAEATRLKRTARRRYTRRKNRICYLQEIFSNEMAKVDDSFFHRLEESFLVEEDKKHERHPIFGNIVDEVAYHEKYPTIYHLRKKLVDSTDKADLRLIYLALAHMIKFRGHFLIEGDLNPDNSDVDKLFIQLVQTYNQLFEENPINASGVDAKAILSARLSKSRRLENLIAQLPGEKKNGLFGNLIALSLGLTPNFKSNFDLAEDAKLQLSKDTYDDDLDNLLAQIGDQYADLFLAAKNLSDAILLSDILRVNTEITKAPLSASMIKRYDEHHQDLTLLKALVRQQLPEKYKEIFFDQSKNGYAGYIDGGASQEEFYKFIKPILEKMDGTEELLVKLNREDLLRKQRTFDNGSIPHQIHLGELHAILRRQEDFYPFLKDNREKIEKILTFRIPYYVGPLARGNSRFAWMTRKSEETITPWNFEEVVDKGASAQSFIERMTNFDKNLPNEKVLPKHSLLYEYFTVYNELTKVKYVTEGMRKPAFLSGEQKKAIVDLLFKTNRKVTVKQLKEDYFKKIECFDSVEISGVEDRFNASLGTYHDLLKIIKDKDFLDNEENEDILEDIVLTLTLFEDREMIEERLKTYAHLFDDKVMKQLKRRRYTGWGRLSRKLINGIRDKQSGKTILDFLKSDGFANRNFMQLIHDDSLTFKEDIQKAQVSGQGDSLHEHIANLAGSPAIKKGILQTVKVVDELVKVMGRHKPENIVIEMARENQTTQKGQKNSRERMKRIEEGIKELGSQILKEHPVENTQLQNEKLYLYYLQNGRDMYVDQELDINRLSDYDVDHIVPQSFLKDDSIDNKVLTRSDKARGKSDNVPSEEVVKKMKNYWRQLLNAKLITQRKFDNLTKAERGGLSELDKAGFIKRQLVETRQITKHVAQILDSRMNTKYDENDKLIREVKVITLKSKLVSDFRKDFQFYKVREINNYHHAHDAYLNAVVGTALIKKYPKLESEFVYGDYKVYDVRKMIAKSEQEIGKATAKYFFYSNIMNFFKTEITLANGEIRKRPLIETNGETGEIVWDKGRDFATVRKVLSMPQVNIVKKTEVQTGGFSKESILPKRNSDKLIARKKDWDPKKYGGFDSPTVAYSVLVVAKVEKGKSKKLKSVKELLGITIMERSSFEKNPIDFLEAKGYKEVKKDLIIKLPKYSLFELENGRKRMLASAGELQKGNELALPSKYVNFLYLASHYEKLKGSPEDNEQKQLFVEQHKHYLDEIIEQISEFSKRVILADANLDKVLSAYNKHRDKPIREQAENIIHLFTLTNLGAPAAFKYFDTTIDRKRYTSTKEVLDATLIHQSITGLYETRIDLSQLGGDGGGSSGGSEAAAKGGTLNIEDEYRLHETSKEPDVPLGSTWLSDFPQAWAETGGMGLAVRQAPLIIPLKATSTPVSIKQYPMSQEARLGIKPHIQRLLDQGILVPCQSPWNTPLLPVKKPGTNDYRPVQDLREVNKRVEDIHPTVPNPYNLLSGLPPSHQWYTVLDLKDAFFCLRLHPTSQPLFAFEWRDPEMGISGQLTWTRLPQGFKNSPTLFNEALHRDLADFRIQHPDLILLQYVDDLLLAATSEQDCQRGTRALLQTLGNLGYRASAKKAQICQKQVKYLGYLLKEGQRWLTEARKETVMGQPTPKTPRQLREFLGTAGFCRLWIPGFAEMAAPLYPLTKPGTLFNWGPDQQKAYQEIKQALLTAPALGLPDLTKPFELFVDEKQGYAKGVLTQKLGPWRRPVAYLSKKLDPVAAGWPPCLRMVAAIAVLTKDAGKLTMGQPLVILAPHAVEALVKQPPDRWLSNARMTHYQAMLLDTDRVQFGPVVALNPATLLPLPEKEAPHDCLEILAETHGTRPDLTDQPIPDADYTWYTDGSSFLQEGQRRAGAAVTTETEVIWARALPAGTSAQRAELIALTQALKMAEGKKLNVYTDSRYAFATAHVHGEIYRRRGWLTSEGREIKNKNEILALLKALFLPKRLSIIHCPGHQKGNSAEARGNRMADQAAREAAMKAVLETSTLLAGKRTADGSEFEKRTADGSEFESPKKKAKVE

SEQ ID NO: 976 - protein, 2115 aa, synthetic construct
MPAAKRVKLDGGDKKYSIGLDIGTNSVGWAVITDEYKVPSKKFKVLGNTDRHSIKKNLIGALLFDSGETAEATRLKRTARRRYTRRKNRICYLQEIFSNEMAKVDDSFFHRLEESFLVEEDKKHERHPIFGNIVDEVAYHEKYPTIYHLRKKLVDSTDKADLRLIYLALAHMIKFRGHFLIEGDLNPDNSDVDKLFIQLVQTYNQLFEENPINASGVDAKAILSARLSKSRRLENLIAQLPGEKKNGLFGNLIALSLGLTPNFKSNFDLAEDAKLQLSKDTYDDDLDNLLAQIGDQYADLFLAAKNLSDAILLSDILRVNTEITKAPLSASMIKRYDEHHQDLTLLKALVRQQLPEKYKEIFFDQSKNGYAGYIDGGASQEEFYKFIKPILEKMDGTEELLVKLNREDLLRKQRTFDNGSIPHQIHLGELHAILRRQEDFYPFLKDNREKIEKILTFRIPYYVGPLARGNSRFAWMTRKSEETITPWNFEEVVDKGASAQSFIERMTNFDKNLPNEKVLPKHSLLYEYFTVYNELTKVKYVTEGMRKPAFLSGEQKKAIVDLLFKTNRKVTVKQLKEDYFKKIECFDSVEISGVEDRFNASLGTYHDLLKIIKDKDFLDNEENEDILEDIVLTLTLFEDREMIEERLKTYAHLFDDKVMKQLKRRRYTGWGRLSRKLINGIRDKQSGKTILDFLKSDGFANRNFMQLIHDDSLTFKEDIQKAQVSGQGDSLHEHIANLAGSPAIKKGILQTVKVVDELVKVMGRHKPENIVIEMARENQTTQKGQKNSRERMKRIEEGIKELGSQILKEHPVENTQLQNEKLYLYYLQNGRDMYVDQELDINRLSDYDVDHIVPQSFLKDDSIDNKVLTRSDKARGKSDNVPSEEVVKKMKNYWRQLLNAKLITQRKFDNLTKAERGGLSELDKAGFIKRQLVETRQITKHVAQILDSRMNTKYDENDKLIREVKVITLKSKLVSDFRKDFQFYKVREINNYHHAHDAYLNAVVGTALIKKYPKLESEFVYGDYKVYDVRKMIAKSEQEIGKATAKYFFYSNIMNFFKTEITLANGEIRKRPLIETNGETGEIVWDKGRDFATVRKVLSMPQVNIVKKTEVQTGGFSKESILPKRNSDKLIARKKDWDPKKYGGFDSPTVAYSVLVVAKVEKGKSKKLKSVKELLGITIMERSSFEKNPIDFLEAKGYKEVKKDLIIKLPKYSLFELENGRKRMLASAGELQKGNELALPSKYVNFLYLASHYEKLKGSPEDNEQKQLFVEQHKHYLDEIIEQISEFSKRVILADANLDKVLSAYNKHRDKPIREQAENIIHLFTLTNLGAPAAFKYFDTTIDRKRYTSTKEVLDATLIHQSITGLYETRIDLSQLGGDGGGGGGSGGGGSGGGGSGGGGSGGGGSGGGGSGGTLNIEDEYRLHETSKEPDVPLGSTWLSDFPQAWAETGGMGLAVRQAPLIIPLKATSTPVSIKQYPMSQEARLGIKPHIQRLLDQGILVPCQSPWNTPLLPVKKPGTNDYRPVQDLREVNKRVEDIHPTVPNPYNLLSGLPPSHQWYTVLDLKDAFFCLRLHPTSQPLFAFEWRDPEMGISGQLTWTRLPQGFKNSPTLFNEALHRDLADFRIQHPDLILLQYVDDLLLAATSEQDCQRGTRALLQTLGNLGYRASAKKAQICQKQVKYLGYLLKEGQRWLTEARKETVMGQPTPKTPRQLREFLGTAGFCRLWIPGFAEMAAPLYPLTKPGTLFNWGPDQQKAYQEIKQALLTAPALGLPDLTKPFELFVDEKQGYAKGVLTQKLGPWRRPVAYLSKKLDPVAAGWPPCLRMVAAIAVLTKDAGKLTMGQPLVILAPHAVEALVKQPPDRWLSNARMTHYQAMLLDTDRVQFGPVVALNPATLLPLPEKEAPHDCLEILAETHGTRPDLTDQPIPDADYTWYTDGSSFLQEGQRRAGAAVTTETEVIWARALPAGTSAQRAELIALTQALKMAEGKKLNVYTDSRYAFATAHVHGEIYRRRGWLTSEGREIKNKNEILALLKALFLPKRLSIIHCPGHQKGNSAEARGNRMADQAAREAAMKAVLETSTLLAGKRTADGSEFEKRTADGSEFESPKKKAKVE

SEQ ID NO: 977 - protein, 2105 aa, synthetic construct
MPAAKRVKLDGGDKKYSIGLDIGTNSVGWAVITDEYKVPSKKFKVLGNTDRHSIKKNLIGALLFDSGETAEATRLKRTARRRYTRRKNRICYLQEIFSNEMAKVDDSFFHRLEESFLVEEDKKHERHPIFGNIVDEVAYHEKYPTIYHLRKKLVDSTDKADLRLIYLALAHMIKFRGHFLIEGDLNPDNSDVDKLFIQLVQTYNQLFEENPINASGVDAKAILSARLSKSRRLENLIAQLPGEKKNGLFGNLIALSLGLTPNFKSNFDLAEDAKLQLSKDTYDDDLDNLLAQIGDQYADLFLAAKNLSDAILLSDILRVNTEITKAPLSASMIKRYDEHHQDLTLLKALVRQQLPEKYKEIFFDQSKNGYAGYIDGGASQEEFYKFIKPILEKMDGTEELLVKLNREDLLRKQRTFDNGSIPHQIHLGELHAILRRQEDFYPFLKDNREKIEKILTFRIPYYVGPLARGNSRFAWMTRKSEETITPWNFEEVVDKGASAQSFIERMTNFDKNLPNEKVLPKHSLLYEYFTVYNELTKVKYVTEGMRKPAFLSGEQKKAIVDLLFKTNRKVTVKQLKEDYFKKIECFDSVEISGVEDRFNASLGTYHDLLKIIKDKDFLDNEENEDILEDIVLTLTLFEDREMIEERLKTYAHLFDDKVMKQLKRRRYTGWGRLSRKLINGIRDKQSGKTILDFLKSDGFANRNFMQLIHDDSLTFKEDIQKAQVSGQGDSLHEHIANLAGSPAIKKGILQTVKVVDELVKVMGRHKPENIVIEMARENQTTQKGQKNSRERMKRIEEGIKELGSQILKEHPVENTQLQNEKLYLYYLQNGRDMYVDQELDINRLSDYDVDHIVPQSFLKDDSIDNKVLTRSDKARGKSDNVPSEEVVKKMKNYWRQLLNAKLITQRKFDNLTKAERGGLSELDKAGFIKRQLVETRQITKHVAQILDSRMNTKYDENDKLIREVKVITLKSKLVSDFRKDFQFYKVREINNYHHAHDAYLNAVVGTALIKKYPKLESEFVYGDYKVYDVRKMIAKSEQEIGKATAKYFFYSNIMNFFKTEITLANGEIRKRPLIETNGETGEIVWDKGRDFATVRKVLSMPQVNIVKKTEVQTGGFSKESILPKRNSDKLIARKKDWDPKKYGGFDSPTVAYSVLVVAKVEKGKSKKLKSVKELLGITIMERSSFEKNPIDFLEAKGYKEVKKDLIIKLPKYSLFELENGRKRMLASAGELQKGNELALPSKYVNFLYLASHYEKLKGSPEDNEQKQLFVEQHKHYLDEIIEQISEFSKRVILADANLDKVLSAYNKHRDKPIREQAENIIHLFTLTNLGAPAAFKYFDTTIDRKRYTSTKEVLDATLIHQSITGLYETRIDLSQLGGDGGGGGGSGGGGSGGGGSGGGGSGGTLNIEDEYRLHETSKEPDVPLGSTWLSDFPQAWAETGGMGLAVRQAPLIIPLKATSTPVSIKQYPMSQEARLGIKPHIQRLLDQGILVPCQSPWNTPLLPVKKPGTNDYRPVQDLREVNKRVEDIHPTVPNPYNLLSGLPPSHQWYTVLDLKDAFFCLRLHPTSQPLFAFEWRDPEMGISGQLTWTRLPQGFKNSPTLFNEALHRDLADFRIQHPDLILLQYVDDLLLAATSEQDCQRGTRALLQTLGNLGYRASAKKAQICQKQVKYLGYLLKEGQRWLTEARKETVMGQPTPKTPRQLREFLGTAGFCRLWIPGFAEMAAPLYPLTKPGTLFNWGPDQQKAYQEIKQALLTAPALGLPDLTKPFELFVDEKQGYAKGVLTQKLGPWRRPVAYLSKKLDPVAAGWPPCLRMVAAIAVLTKDAGKLTMGQPLVILAPHAVEALVKQPPDRWLSNARMTHYQAMLLDTDRVQFGPVVALNPATLLPLPEKEAPHDCLEILAETHGTRPDLTDQPIPDADYTWYTDGSSFLQEGQRRAGAAVTTETEVIWARALPAGTSAQRAELIALTQALKMAEGKKLNVYTDSRYAFATAHVHGEIYRRRGWLTSEGREIKNKNEILALLKALFLPKRLSIIHCPGHQKGNSAEARGNRMADQAAREAAMKAVLETSTLLAGKRTADGSEFEKRTADGSEFESPKKKAKVE

SEQ ID NO: 978 - protein, 2094 aa, synthetic construct
MPAAKRVKLDGGDKKYSIGLDIGTNSVGWAVITDEYKVPSKKFKVLGNTDRHSIKKNLIGALLFDSGETAEATRLKRTARRRYTRRKNRICYLQEIFSNEMAKVDDSFFHRLEESFLVEEDKKHERHPIFGNIVDEVAYHEKYPTIYHLRKKLVDSTDKADLRLIYLALAHMIKFRGHFLIEGDLNPDNSDVDKLFIQLVQTYNQLFEENPINASGVDAKAILSARLSKSRRLENLIAQLPGEKKNGLFGNLIALSLGLTPNFKSNFDLAEDAKLQLSKDTYDDDLDNLLAQIGDQYADLFLAAKNLSDAILLSDILRVNTEITKAPLSASMIKRYDEHHQDLTLLKALVRQQLPEKYKEIFFDQSKNGYAGYIDGGASQEEFYKFIKPILEKMDGTEELLVKLNREDLLRKQRTFDNGSIPHQIHLGELHAILRRQEDFYPFLKDNREKIEKILTFRIPYYVGPLARGNSRFAWMTRKSEETITPWNFEEVVDKGASAQSFIERMTNFDKNLPNEKVLPKHSLLYEYFTVYNELTKVKYVTEGMRKPAFLSGEQKKAIVDLLFKTNRKVTVKQLKEDYFKKIECFDSVEISGVEDRFNASLGTYHDLLKIIKDKDFLDNEENEDILEDIVLTLTLFEDREMIEERLKTYAHLFDDKVMKQLKRRRYTGWGRLSRKLINGIRDKQSGKTILDFLKSDGFANRNFMQLIHDDSLTFKEDIQKAQVSGQGDSLHEHIANLAGSPAIKKGILQTVKVVDELVKVMGRHKPENIVIEMARENQTTQKGQKNSRERMKRIEEGIKELGSQILKEHPVENTQLQNEKLYLYYLQNGRDMYVDQELDINRLSDYDVDHIVPQSFLKDDSIDNKVLTRSDKARGKSDNVPSEEVVKKMKNYWRQLLNAKLITQRKFDNLTKAERGGLSELDKAGFIKRQLVETRQITKHVAQILDSRMNTKYDENDKLIREVKVITLKSKLVSDFRKDFQFYKVREINNYHHAHDAYLNAVVGTALIKKYPKLESEFVYGDYKVYDVRKMIAKSEQEIGKATAKYFFYSNIMNFFKTEITLANGEIRKRPLIETNGETGEIVWDKGRDFATVRKVLSMPQVNIVKKTEVQTGGFSKESILPKRNSDKLIARKKDWDPKKYGGFDSPTVAYSVLVVAKVEKGKSKKLKSVKELLGITIMERSSFEKNPIDFLEAKGYKEVKKDLIIKLPKYSLFELENGRKRMLASAGELQKGNELALPSKYVNFLYLASHYEKLKGSPEDNEQKQLFVEQHKHYLDEIIEQISEFSKRVILADANLDKVLSAYNKHRDKPIREQAENIIHLFTLTNLGAPAAFKYFDTTIDRKRYTSTKEVLDATLIHQSITGLYETRIDLSQLGGDGGPAPAPAPAPGGTLNIEDEYRLHETSKEPDVPLGSTWLSDFPQAWAETGGMGLAVRQAPLIIPLKATSTPVSIKQYPMSQEARLGIKPHIQRLLDQGILVPCQSPWNTPLLPVKKPGTNDYRPVQDLREVNKRVEDIHPTVPNPYNLLSGLPPSHQWYTVLDLKDAFFCLRLHPTSQPLFAFEWRDPEMGISGQLTWTRLPQGFKNSPTLFNEALHRDLADFRIQHPDLILLQYVDDLLLAATSEQDCQRGTRALLQTLGNLGYRASAKKAQICQKQVKYLGYLLKEGQRWLTEARKETVMGQPTPKTPRQLREFLGTAGFCRLWIPGFAEMAAPLYPLTKPGTLFNWGPDQQKAYQEIKQALLTAPALGLPDLTKPFELFVDEKQGYAKGVLTQKLGPWRRPVAYLSKKLDPVAAGWPPCLRMVAAIAVLTKDAGKLTMGQPLVILAPHAVEALVKQPPDRWLSNARMTHYQAMLLDTDRVQFGPVVALNPATLLPLPEKEAPHDCLEILAETHGTRPDLTDQPIPDADYTWYTDGSSFLQEGQRRAGAAVTTETEVIWARALPAGTSAQRAELIALTQALKMAEGKKLNVYTDSRYAFATAHVHGEIYRRRGWLTSEGREIKNKNEILALLKALFLPKRLSIIHCPGHQKGNSAEARGNRMADQAAREAAMKAVLETSTLLAGKRTADGSEFEKRTADGSEFESPKKKAKVE

SEQ ID NO: 979 - protein, 2096 aa, synthetic construct
MPAAKRVKLDGGDKKYSIGLDIGTNSVGWAVITDEYKVPSKKFKVLGNTDRHSIKKNLIGALLFDSGETAEATRLKRTARRRYTRRKNRICYLQEIFSNEMAKVDDSFFHRLEESFLVEEDKKHERHPIFGNIVDEVAYHEKYPTIYHLRKKLVDSTDKADLRLIYLALAHMIKFRGHFLIEGDLNPDNSDVDKLFIQLVQTYNQLFEENPINASGVDAKAILSARLSKSRRLENLIAQLPGEKKNGLFGNLIALSLGLTPNFKSNFDLAEDAKLQLSKDTYDDDLDNLLAQIGDQYADLFLAAKNLSDAILLSDILRVNTEITKAPLSASMIKRYDEHHQDLTLLKALVRQQLPEKYKEIFFDQSKNGYAGYIDGGASQEEFYKFIKPILEKMDGTEELLVKLNREDLLRKQRTFDNGSIPHQIHLGELHAILRRQEDFYPFLKDNREKIEKILTFRIPYYVGPLARGNSRFAWMTRKSEETITPWNFEEVVDKGASAQSFIERMTNFDKNLPNEKVLPKHSLLYEYFTVYNELTKVKYVTEGMRKPAFLSGEQKKAIVDLLFKTNRKVTVKQLKEDYFKKIECFDSVEISGVEDRFNASLGTYHDLLKIIKDKDFLDNEENEDILEDIVLTLTLFEDREMIEERLKTYAHLFDDKVMKQLKRRRYTGWGRLSRKLINGIRDKQSGKTILDFLKSDGFANRNFMQLIHDDSLTFKEDIQKAQVSGQGDSLHEHIANLAGSPAIKKGILQTVKVVDELVKVMGRHKPENIVIEMARENQTTQKGQKNSRERMKRIEEGIKELGSQILKEHPVENTQLQNEKLYLYYLQNGRDMYVDQELDINRLSDYDVDHIVPQSFLKDDSIDNKVLTRSDKARGKSDNVPSEEVVKKMKNYWRQLLNAKLITQRKFDNLTKAERGGLSELDKAGFIKRQLVETRQITKHVAQILDSRMNTKYDENDKLIREVKVITLKSKLVSDFRKDFQFYKVREINNYHHAHDAYLNAVVGTALIKKYPKLESEFVYGDYKVYDVRKMIAKSEQEIGKATAKYFFYSNIMNFFKTEITLANGEIRKRPLIETNGETGEIVWDKGRDFATVRKVLSMPQVNIVKKTEVQTGGFSKESILPKRNSDKLIARKKDWDPKKYGGFDSPTVAYSVLVVAKVEKGKSKKLKSVKELLGITIMERSSFEKNPIDFLEAKGYKEVKKDLIIKLPKYSLFELENGRKRMLASAGELQKGNELALPSKYVNFLYLASHYEKLKGSPEDNEQKQLFVEQHKHYLDEIIEQISEFSKRVILADANLDKVLSAYNKHRDKPIREQAENIIHLFTLTNLGAPAAFKYFDTTIDRKRYTSTKEVLDATLIHQSITGLYETRIDLSQLGGDGGGGGEAAAKGGSGGTLNIEDEYRLHETSKEPDVPLGSTWLSDFPQAWAETGGMGLAVRQAPLIIPLKATSTPVSIKQYPMSQEARLGIKPHIQRLLDQGILVPCQSPWNTPLLPVKKPGTNDYRPVQDLREVNKRVEDIHPTVPNPYNLLSGLPPSHQWYTVLDLKDAFFCLRLHPTSQPLFAFEWRDPEMGISGQLTWTRLPQGFKNSPTLFNEALHRDLADFRIQHPDLILLQYVDDLLLAATSEQDCQRGTRALLQTLGNLGYRASAKKAQICQKQVKYLGYLLKEGQRWLTEARKETVMGQPTPKTPRQLREFLGTAGFCRLWIPGFAEMAAPLYPLTKPGTLFNWGPDQQKAYQEIKQALLTAPALGLPDLTKPFELFVDEKQGYAKGVLTQKLGPWRRPVAYLSKKLDPVAAGWPPCLRMVAAIAVLTKDAGKLTMGQPLVILAPHAVEALVKQPPDRWLSNARMTHYQAMLLDTDRVQFGPVVALNPATLLPLPEKEAPHDCLEILAETHGTRPDLTDQPIPDADYTWYTDGSSFLQEGQRRAGAAVTTETEVIWARALPAGTSAQRAELIALTQALKMAEGKKLNVYTDSRYAFATAHVHGEIYRRRGWLTSEGREIKNKNEILALLKALFLPKRLSIIHCPGHQKGNSAEARGNRMADQAAREAAMKAVLETSTLLAGKRTADGSEFEKRTADGSEFESPKKKAKVE

SEQ ID NO: 980 - protein, 2094 aa, synthetic construct
MPAAKRVKLDGGDKKYSIGLDIGTNSVGWAVITDEYKVPSKKFKVLGNTDRHSIKKNLIGALLFDSGETAEATRLKRTARRRYTRRKNRICYLQEIFSNEMAKVDDSFFHRLEESFLVEEDKKHERHPIFGNIVDEVAYHEKYPTIYHLRKKLVDSTDKADLRLIYLALAHMIKFRGHFLIEGDLNPDNSDVDKLFIQLVQTYNQLFEENPINASGVDAKAILSARLSKSRRLENLIAQLPGEKKNGLFGNLIALSLGLTPNFKSNFDLAEDAKLQLSKDTYDDDLDNLLAQIGDQYADLFLAAKNLSDAILLSDILRVNTEITKAPLSASMIKRYDEHHQDLTLLKALVRQQLPEKYKEIFFDQSKNGYAGYIDGGASQEEFYKFIKPILEKMDGTEELLVKLNREDLLRKQRTFDNGSIPHQIHLGELHAILRRQEDFYPFLKDNREKIEKILTFRIPYYVGPLARGNSRFAWMTRKSEETITPWNFEEVVDKGASAQSFIERMTNFDKNLPNEKVLPKHSLLYEYFTVYNELTKVKYVTEGMRKPAFLSGEQKKAIVDLLFKTNRKVTVKQLKEDYFKKIECFDSVEISGVEDRFNASLGTYHDLLKIIKDKDFLDNEENEDILEDIVLTLTLFEDREMIEERLKTYAHLFDDKVMKQLKRRRYTGWGRLSRKLINGIRDKQSGKTILDFLKSDGFANRNFMQLIHDDSLTFKEDIQKAQVSGQGDSLHEHIANLAGSPAIKKGILQTVKVVDELVKVMGRHKPENIVIEMARENQTTQKGQKNSRERMKRIEEGIKELGSQILKEHPVENTQLQNEKLYLYYLQNGRDMYVDQELDINRLSDYDVDHIVPQSFLKDDSIDNKVLTRSDKARGKSDNVPSEEVVKKMKNYWRQLLNAKLITQRKFDNLTKAERGGLSELDKAGFIKRQLVETRQITKHVAQILDSRMNTKYDENDKLIREVKVITLKSKLVSDFRKDFQFYKVREINNYHHAHDAYLNAVVGTALIKKYPKLESEFVYGDYKVYDVRKMIAKSEQEIGKATAKYFFYSNIMNFFKTEITLANGEIRKRPLIETNGETGEIVWDKGRDFATVRKVLSMPQVNIVKKTEVQTGGFSKESILPKRNSDKLIARKKDWDPKKYGGFDSPTVAYSVLVVAKVEKGKSKKLKSVKELLGITIMERSSFEKNPIDFLEAKGYKEVKKDLIIKLPKYSLFELENGRKRMLASAGELQKGNELALPSKYVNFLYLASHYEKLKGSPEDNEQKQLFVEQHKHYLDEIIEQISEFSKRVILADANLDKVLSAYNKHRDKPIREQAENIIHLFTLTNLGAPAAFKYFDTTIDRKRYTSTKEVLDATLIHQSITGLYETRIDLSQLGGDGGGGSGGSGGSGGTLNIEDEYRLHETSKEPDVPLGSTWLSDFPQAWAETGGMGLAVRQAPLIIPLKATSTPVSIKQYPMSQEARLGIKPHIQRLLDQGILVPCQSPWNTPLLPVKKPGTNDYRPVQDLREVNKRVEDIHPTVPNPYNLLSGLPPSHQWYTVLDLKDAFFCLRLHPTSQPLFAFEWRDPEMGISGQLTWTRLPQGFKNSPTLFNEALHRDLADFRIQHPDLILLQYVDDLLLAATSEQDCQRGTRALLQTLGNLGYRASAKKAQICQKQVKYLGYLLKEGQRWLTEARKETVMGQPTPKTPRQLREFLGTAGFCRLWIPGFAEMAAPLYPLTKPGTLFNWGPDQQKAYQEIKQALLTAPALGLPDLTKPFELFVDEKQGYAKGVLTQKLGPWRRPVAYLSKKLDPVAAGWPPCLRMVAAIAVLTKDAGKLTMGQPLVILAPHAVEALVKQPPDRWLSNARMTHYQAMLLDTDRVQFGPVVALNPATLLPLPEKEAPHDCLEILAETHGTRPDLTDQPIPDADYTWYTDGSSFLQEGQRRAGAAVTTETEVIWARALPAGTSAQRAELIALTQALKMAEGKKLNVYTDSRYAFATAHVHGEIYRRRGWLTSEGREIKNKNEILALLKALFLPKRLSIIHCPGHQKGNSAEARGNRMADQAAREAAMKAVLETSTLLAGKRTADGSEFEKRTADGSEFESPKKKAKVE

SEQ ID NO: 981 - protein, 2100 aa, synthetic construct
MPAAKRVKLDGGDKKYSIGLDIGTNSVGWAVITDEYKVPSKKFKVLGNTDRHSIKKNLIGALLFDSGETAEATRLKRTARRRYTRRKNRICYLQEIFSNEMAKVDDSFFHRLEESFLVEEDKKHERHPIFGNIVDEVAYHEKYPTIYHLRKKLVDSTDKADLRLIYLALAHMIKFRGHFLIEGDLNPDNSDVDKLFIQLVQTYNQLFEENPINASGVDAKAILSARLSKSRRLENLIAQLPGEKKNGLFGNLIALSLGLTPNFKSNFDLAEDAKLQLSKDTYDDDLDNLLAQIGDQYADLFLAAKNLSDAILLSDILRVNTEITKAPLSASMIKRYDEHHQDLTLLKALVRQQLPEKYKEIFFDQSKNGYAGYIDGGASQEEFYKFIKPILEKMDGTEELLVKLNREDLLRKQRTFDNGSIPHQIHLGELHAILRRQEDFYPFLKDNREKIEKILTFRIPYYVGPLARGNSRFAWMTRKSEETITPWNFEEVVDKGASAQSFIERMTNFDKNLPNEKVLPKHSLLYEYFTVYNELTKVKYVTEGMRKPAFLSGEQKKAIVDLLFKTNRKVTVKQLKEDYFKKIECFDSVEISGVEDRFNASLGTYHDLLKIIKDKDFLDNEENEDILEDIVLTLTLFEDREMIEERLKTYAHLFDDKVMKQLKRRRYTGWGRLSRKLINGIRDKQSGKTILDFLKSDGFANRNFMQLIHDDSLTFKEDIQKAQVSGQGDSLHEHIANLAGSPAIKKGILQTVKVVDELVKVMGRHKPENIVIEMARENQTTQKGQKNSRERMKRIEEGIKELGSQILKEHPVENTQLQNEKLYLYYLQNGRDMYVDQELDINRLSDYDVDHIVPQSFLKDDSIDNKVLTRSDKARGKSDNVPSEEVVKKMKNYWRQLLNAKLITQRKFDNLTKAERGGLSELDKAGFIKRQLVETRQITKHVAQILDSRMNTKYDENDKLIREVKVITLKSKLVSDFRKDFQFYKVREINNYHHAHDAYLNAVVGTALIKKYPKLESEFVYGDYKVYDVRKMIAKSEQEIGKATAKYFFYSNIMNFFKTEITLANGEIRKRPLIETNGETGEIVWDKGRDFATVRKVLSMPQVNIVKKTEVQTGGFSKESILPKRNSDKLIARKKDWDPKKYGGFDSPTVAYSVLVVAKVEKGKSKKLKSVKELLGITIMERSSFEKNPIDFLEAKGYKEVKKDLIIKLPKYSLFELENGRKRMLASAGELQKGNELALPSKYVNFLYLASHYEKLKGSPEDNEQKQLFVEQHKHYLDEIIEQISEFSKRVILADANLDKVLSAYNKHRDKPIREQAENIIHLFTLTNLGAPAAFKYFDTTIDRKRYTSTKEVLDATLIHQSITGLYETRIDLSQLGGDGGEAAAKGGGGSEAAAKGGTLNIEDEYRLHETSKEPDVPLGSTWLSDFPQAWAETGGMGLAVRQAPLIIPLKATSTPVSIKQYPMSQEARLGIKPHIQRLLDQGILVPCQSPWNTPLLPVKKPGTNDYRPVQDLREVNKRVEDIHPTVPNPYNLLSGLPPSHQWYTVLDLKDAFFCLRLHPTSQPLFAFEWRDPEMGISGQLTWTRLPQGFKNSPTLFNEALHRDLADFRIQHPDLILLQYVDDLLLAATSEQDCQRGTRALLQTLGNLGYRASAKKAQICQKQVKYLGYLLKEGQRWLTEARKETVMGQPTPKTPRQLREFLGTAGFCRLWIPGFAEMAAPLYPLTKPGTLFNWGPDQQKAYQEIKQALLTAPALGLPDLTKPFELFVDEKQGYAKGVLTQKLGPWRRPVAYLSKKLDPVAAGWPPCLRMVAAIAVLTKDAGKLTMGQPLVILAPHAVEALVKQPPDRWLSNARMTHYQAMLLDTDRVQFGPVVALNPATLLPLPEKEAPHDCLEILAETHGTRPDLTDQPIPDADYTWYTDGSSFLQEGQRRAGAAVTTETEVIWARALPAGTSAQRAELIALTQALKMAEGKKLNVYTDSRYAFATAHVHGEIYRRRGWLTSEGREIKNKNEILALLKALFLPKRLSIIHCPGHQKGNSAEARGNRMADQAAREAAMKAVLETSTLLAGKRTADGSEFEKRTADGSEFESPKKKAKVE

SEQ ID NO: 982 - protein, 2093 aa, synthetic construct
MPAAKRVKLDGGDKKYSIGLDIGTNSVGWAVITDEYKVPSKKFKVLGNTDRHSIKKNLIGALLFDSGETAEATRLKRTARRRYTRRKNRICYLQEIFSNEMAKVDDSFFHRLEESFLVEEDKKHERHPIFGNIVDEVAYHEKYPTIYHLRKKLVDSTDKADLRLIYLALAHMIKFRGHFLIEGDLNPDNSDVDKLFIQLVQTYNQLFEENPINASGVDAKAILSARLSKSRRLENLIAQLPGEKKNGLFGNLIALSLGLTPNFKSNFDLAEDAKLQLSKDTYDDDLDNLLAQIGDQYADLFLAAKNLSDAILLSDILRVNTEITKAPLSASMIKRYDEHHQDLTLLKALVRQQLPEKYKEIFFDQSKNGYAGYIDGGASQEEFYKFIKPILEKMDGTEELLVKLNREDLLRKQRTFDNGSIPHQIHLGELHAILRRQEDFYPFLKDNREKIEKILTFRIPYYVGPLARGNSRFAWMTRKSEETITPWNFEEVVDKGASAQSFIERMTNFDKNLPNEKVLPKHSLLYEYFTVYNELTKVKYVTEGMRKPAFLSGEQKKAIVDLLFKTNRKVTVKQLKEDYFKKIECFDSVEISGVEDRFNASLGTYHDLLKIIKDKDFLDNEENEDILEDIVLTLTLFEDREMIEERLKTYAHLFDDKVMKQLKRRRYTGWGRLSRKLINGIRDKQSGKTILDFLKSDGFANRNFMQLIHDDSLTFKEDIQKAQVSGQGDSLHEHIANLAGSPAIKKGILQTVKVVDELVKVMGRHKPENIVIEMARENQTTQKGQKNSRERMKRIEEGIKELGSQILKEHPVENTQLQNEKLYLYYLQNGRDMYVDQELDINRLSDYDVDHIVPQSFLKDDSIDNKVLTRSDKARGKSDNVPSEEVVKKMKNYWRQLLNAKLITQRKFDNLTKAERGGLSELDKAGFIKRQLVETRQITKHVAQILDSRMNTKYDENDKLIREVKVITLKSKLVSDFRKDFQFYKVREINNYHHAHDAYLNAVVGTALIKKYPKLESEFVYGDYKVYDVRKMIAKSEQEIGKATAKYFFYSNIMNFFKTEITLANGEIRKRPLIETNGETGEIVWDKGRDFATVRKVLSMPQVNIVKKTEVQTGGFSKESILPKRNSDKLIARKKDWDPKKYGGFDSPTVAYSVLVVAKVEKGKSKKLKSVKELLGITIMERSSFEKNPIDFLEAKGYKEVKKDLIIKLPKYSLFELENGRKRMLASAGELQKGNELALPSKYVNFLYLASHYEKLKGSPEDNEQKQLFVEQHKHYLDEIIEQISEFSKRVILADANLDKVLSAYNKHRDKPIREQAENIIHLFTLTNLGAPAAFKYFDTTIDRKRYTSTKEVLDATLIHQSITGLYETRIDLSQLGGDGGEAAAKPAPGGTLNIEDEYRLHETSKEPDVPLGSTWLSDFPQAWAETGGMGLAVRQAPLIIPLKATSTPVSIKQYPMSQEARLGIKPHIQRLLDQGILVPCQSPWNTPLLPVKKPGTNDYRPVQDLREVNKRVEDIHPTVPNPYNLLSGLPPSHQWYTVLDLKDAFFCLRLHPTSQPLFAFEWRDPEMGISGQLTWTRLPQGFKNSPTLFNEALHRDLADFRIQHPDLILLQYVDDLLLAATSEQDCQRGTRALLQTLGNLGYRASAKKAQICQKQVKYLGYLLKEGQRWLTEARKETVMGQPTPKTPRQLREFLGTAGFCRLWIPGFAEMAAPLYPLTKPGTLFNWGPDQQKAYQEIKQALLTAPALGLPDLTKPFELFVDEKQGYAKGVLTQKLGPWRRPVAYLSKKLDPVAAGWPPCLRMVAAIAVLTKDAGKLTMGQPLVILAPHAVEALVKQPPDRWLSNARMTHYQAMLLDTDRVQFGPVVALNPATLLPLPEKEAPHDCLEILAETHGTRPDLTDQPIPDADYTWYTDGSSFLQEGQRRAGAAVTTETEVIWARALPAGTSAQRAELIALTQALKMAEGKKLNVYTDSRYAFATAHVHGEIYRRRGWLTSEGREIKNKNEILALLKALFLPKRLSIIHCPGHQKGNSAEARGNRMADQAAREAAMKAVLETSTLLAGKRTADGSEFEKRTADGSEFESPKKKAKVE

SEQ ID NO: 983 - protein, 2090 aa, synthetic construct
MPAAKRVKLDGGDKKYSIGLDIGTNSVGWAVITDEYKVPSKKFKVLGNTDRHSIKKNLIGALLFDSGETAEATRLKRTARRRYTRRKNRICYLQEIFSNEMAKVDDSFFHRLEESFLVEEDKKHERHPIFGNIVDEVAYHEKYPTIYHLRKKLVDSTDKADLRLIYLALAHMIKFRGHFLIEGDLNPDNSDVDKLFIQLVQTYNQLFEENPINASGVDAKAILSARLSKSRRLENLIAQLPGEKKNGLFGNLIALSLGLTPNFKSNFDLAEDAKLQLSKDTYDDDLDNLLAQIGDQYADLFLAAKNLSDAILLSDILRVNTEITKAPLSASMIKRYDEHHQDLTLLKALVRQQLPEKYKEIFFDQSKNGYAGYIDGGASQEEFYKFIKPILEKMDGTEELLVKLNREDLLRKQRTFDNGSIPHQIHLGELHAILRRQEDFYPFLKDNREKIEKILTFRIPYYVGPLARGNSRFAWMTRKSEETITPWNFEEVVDKGASAQSFIERMTNFDKNLPNEKVLPKHSLLYEYFTVYNELTKVKYVTEGMRKPAFLSGEQKKAIVDLLFKTNRKVTVKQLKEDYFKKIECFDSVEISGVEDRFNASLGTYHDLLKIIKDKDFLDNEENEDILEDIVLTLTLFEDREMIEERLKTYAHLFDDKVMKQLKRRRYTGWGRLSRKLINGIRDKQSGKTILDFLKSDGFANRNFMQLIHDDSLTFKEDIQKAQVSGQGDSLHEHIANLAGSPAIKKGILQTVKVVDELVKVMGRHKPENIVIEMARENQTTQKGQKNSRERMKRIEEGIKELGSQILKEHPVENTQLQNEKLYLYYLQNGRDMYVDQELDINRLSDYDVDHIVPQSFLKDDSIDNKVLTRSDKARGKSDNVPSEEVVKKMKNYWRQLLNAKLITQRKFDNLTKAERGGLSELDKAGFIKRQLVETRQITKHVAQILDSRMNTKYDENDKLIREVKVITLKSKLVSDFRKDFQFYKVREINNYHHAHDAYLNAVVGTALIKKYPKLESEFVYGDYKVYDVRKMIAKSEQEIGKATAKYFFYSNIMNFFKTEITLANGEIRKRPLIETNGETGEIVWDKGRDFATVRKVLSMPQVNIVKKTEVQTGGFSKESILPKRNSDKLIARKKDWDPKKYGGFDSPTVAYSVLVVAKVEKGKSKKLKSVKELLGITIMERSSFEKNPIDFLEAKGYKEVKKDLIIKLPKYSLFELENGRKRMLASAGELQKGNELALPSKYVNFLYLASHYEKLKGSPEDNEQKQLFVEQHKHYLDEIIEQISEFSKRVILADANLDKVLSAYNKHRDKPIREQAENIIHLFTLTNLGAPAAFKYFDTTIDRKRYTSTKEVLDATLIHQSITGLYETRIDLSQLGGDGGPAPAPGGTLNIEDEYRLHETSKEPDVPLGSTWLSDFPQAWAETGGMGLAVRQAPLIIPLKATSTPVSIKQYPMSQEARLGIKPHIQRLLDQGILVPCQSPWNTPLLPVKKPGTNDYRPVQDLREVNKRVEDIHPTVPNPYNLLSGLPPSHQWYTVLDLKDAFFCLRLHPTSQPLFAFEWRDPEMGISGQLTWTRLPQGFKNSPTLFNEALHRDLADFRIQHPDLILLQYVDDLLLAATSEQDCQRGTRALLQTLGNLGYRASAKKAQICQKQVKYLGYLLKEGQRWLTEARKETVMGQPTPKTPRQLREFLGTAGFCRLWIPGFAEMAAPLYPLTKPGTLFNWGPDQQKAYQEIKQALLTAPALGLPDLTKPFELFVDEKQGYAKGVLTQKLGPWRRPVAYLSKKLDPVAAGWPPCLRMVAAIAVLTKDAGKLTMGQPLVILAPHAVEALVKQPPDRWLSNARMTHYQAMLLDTDRVQFGPVVALNPATLLPLPEKEAPHDCLEILAETHGTRPDLTDQPIPDADYTWYTDGSSFLQEGQRRAGAAVTTETEVIWARALPAGTSAQRAELIALTQALKMAEGKKLNVYTDSRYAFATAHVHGEIYRRRGWLTSEGREIKNKNEILALLKALFLPKRLSIIHCPGHQKGNSAEARGNRMADQAAREAAMKAVLETSTLLAGKRTADGSEFEKRTADGSEFESPKKKAKVE

SEQ ID NO: 984 - protein, 2094 aa, synthetic construct
MPAAKRVKLDGGDKKYSIGLDIGTNSVGWAVITDEYKVPSKKFKVLGNTDRHSIKKNLIGALLFDSGETAEATRLKRTARRRYTRRKNRICYLQEIFSNEMAKVDDSFFHRLEESFLVEEDKKHERHPIFGNIVDEVAYHEKYPTIYHLRKKLVDSTDKADLRLIYLALAHMIKFRGHFLIEGDLNPDNSDVDKLFIQLVQTYNQLFEENPINASGVDAKAILSARLSKSRRLENLIAQLPGEKKNGLFGNLIALSLGLTPNFKSNFDLAEDAKLQLSKDTYDDDLDNLLAQIGDQYADLFLAAKNLSDAILLSDILRVNTEITKAPLSASMIKRYDEHHQDLTLLKALVRQQLPEKYKEIFFDQSKNGYAGYIDGGASQEEFYKFIKPILEKMDGTEELLVKLNREDLLRKQRTFDNGSIPHQIHLGELHAILRRQEDFYPFLKDNREKIEKILTFRIPYYVGPLARGNSRFAWMTRKSEETITPWNFEEVVDKGASAQSFIERMTNFDKNLPNEKVLPKHSLLYEYFTVYNELTKVKYVTEGMRKPAFLSGEQKKAIVDLLFKTNRKVTVKQLKEDYFKKIECFDSVEISGVEDRFNASLGTYHDLLKIIKDKDFLDNEENEDILEDIVLTLTLFEDREMIEERLKTYAHLFDDKVMKQLKRRRYTGWGRLSRKLINGIRDKQSGKTILDFLKSDGFANRNFMQLIHDDSLTFKEDIQKAQVSGQGDSLHEHIANLAGSPAIKKGILQTVKVVDELVKVMGRHKPENIVIEMARENQTTQKGQKNSRERMKRIEEGIKELGSQILKEHPVENTQLQNEKLYLYYLQNGRDMYVDQELDINRLSDYDVDHIVPQSFLKDDSIDNKVLTRSDKARGKSDNVPSEEVVKKMKNYWRQLLNAKLITQRKFDNLTKAERGGLSELDKAGFIKRQLVETRQITKHVAQILDSRMNTKYDENDKLIREVKVITLKSKLVSDFRKDFQFYKVREINNYHHAHDAYLNAVVGTALIKKYPKLESEFVYGDYKVYDVRKMIAKSEQEIGKATAKYFFYSNIMNFFKTEITLANGEIRKRPLIETNGETGEIVWDKGRDFATVRKVLSMPQVNIVKKTEVQTGGFSKESILPKRNSDKLIARKKDWDPKKYGGFDSPTVAYSVLVVAKVEKGKSKKLKSVKELLGITIMERSSFEKNPIDFLEAKGYKEVKKDLIIKLPKYSLFELENGRKRMLASAGELQKGNELALPSKYVNFLYLASHYEKLKGSPEDNEQKQLFVEQHKHYLDEIIEQISEFSKRVILADANLDKVLSAYNKHRDKPIREQAENIIHLFTLTNLGAPAAFKYFDTTIDRKRYTSTKEVLDATLIHQSITGLYETRIDLSQLGGDGGGGGPAPGGSGGTLNIEDEYRLHETSKEPDVPLGSTWLSDFPQAWAETGGMGLAVRQAPLIIPLKATSTPVSIKQYPMSQEARLGIKPHIQRLLDQGILVPCQSPWNTPLLPVKKPGTNDYRPVQDLREVNKRVEDIHPTVPNPYNLLSGLPPSHQWYTVLDLKDAFFCLRLHPTSQPLFAFEWRDPEMGISGQLTWTRLPQGFKNSPTLFNEALHRDLADFRIQHPDLILLQYVDDLLLAATSEQDCQRGTRALLQTLGNLGYRASAKKAQICQKQVKYLGYLLKEGQRWLTEARKETVMGQPTPKTPRQLREFLGTAGFCRLWIPGFAEMAAPLYPLTKPGTLFNWGPDQQKAYQEIKQALLTAPALGLPDLTKPFELFVDEKQGYAKGVLTQKLGPWRRPVAYLSKKLDPVAAGWPPCLRMVAAIAVLTKDAGKLTMGQPLVILAPHAVEALVKQPPDRWLSNARMTHYQAMLLDTDRVQFGPVVALNPATLLPLPEKEAPHDCLEILAETHGTRPDLTDQPIPDADYTWYTDGSSFLQEGQRRAGAAVTTETEVIWARALPAGTSAQRAELIALTQALKMAEGKKLNVYTDSRYAFATAHVHGEIYRRRGWLTSEGREIKNKNEILALLKALFLPKRLSIIHCPGHQKGNSAEARGNRMADQAAREAAMKAVLETSTLLAGKRTADGSEFEKRTADGSEFESPKKKAKVE

SEQ ID NO: 985 - protein, 2096 aa, synthetic construct
MPAAKRVKLDGGDKKYSIGLDIGTNSVGWAVITDEYKVPSKKFKVLGNTDRHSIKKNLIGALLFDSGETAEATRLKRTARRRYTRRKNRICYLQEIFSNEMAKVDDSFFHRLEESFLVEEDKKHERHPIFGNIVDEVAYHEKYPTIYHLRKKLVDSTDKADLRLIYLALAHMIKFRGHFLIEGDLNPDNSDVDKLFIQLVQTYNQLFEENPINASGVDAKAILSARLSKSRRLENLIAQLPGEKKNGLFGNLIALSLGLTPNFKSNFDLAEDAKLQLSKDTYDDDLDNLLAQIGDQYADLFLAAKNLSDAILLSDILRVNTEITKAPLSASMIKRYDEHHQDLTLLKALVRQQLPEKYKEIFFDQSKNGYAGYIDGGASQEEFYKFIKPILEKMDGTEELLVKLNREDLLRKQRTFDNGSIPHQIHLGELHAILRRQEDFYPFLKDNREKIEKILTFRIPYYVGPLARGNSRFAWMTRKSEETITPWNFEEVVDKGASAQSFIERMTNFDKNLPNEKVLPKHSLLYEYFTVYNELTKVKYVTEGMRKPAFLSGEQKKAIVDLLFKTNRKVTVKQLKEDYFKKIECFDSVEISGVEDRFNASLGTYHDLLKIIKDKDFLDNEENEDILEDIVLTLTLFEDREMIEERLKTYAHLFDDKVMKQLKRRRYTGWGRLSRKLINGIRDKQSGKTILDFLKSDGFANRNFMQLIHDDSLTFKEDIQKAQVSGQGDSLHEHIANLAGSPAIKKGILQTVKVVDELVKVMGRHKPENIVIEMARENQTTQKGQKNSRERMKRIEEGIKELGSQILKEHPVENTQLQNEKLYLYYLQNGRDMYVDQELDINRLSDYDVDHIVPQSFLKDDSIDNKVLTRSDKARGKSDNVPSEEVVKKMKNYWRQLLNAKLITQRKFDNLTKAERGGLSELDKAGFIKRQLVETRQITKHVAQILDSRMNTKYDENDKLIREVKVITLKSKLVSDFRKDFQFYKVREINNYHHAHDAYLNAVVGTALIKKYPKLESEFVYGDYKVYDVRKMIAKSEQEIGKATAKYFFYSNIMNFFKTEITLANGEIRKRPLIETNGETGEIVWDKGRDFATVRKVLSMPQVNIVKKTEVQTGGFSKESILPKRNSDKLIARKKDWDPKKYGGFDSPTVAYSVLVVAKVEKGKSKKLKSVKELLGITIMERSSFEKNPIDFLEAKGYKEVKKDLIIKLPKYSLFELENGRKRMLASAGELQKGNELALPSKYVNFLYLASHYEKLKGSPEDNEQKQLFVEQHKHYLDEIIEQISEFSKRVILADANLDKVLSAYNKHRDKPIREQAENIIHLFTLTNLGAPAAFKYFDTTIDRKRYTSTKEVLDATLIHQSITGLYETRIDLSQLGGDGGGGGEAAAKPAPGGTLNIEDEYRLHETSKEPDVPLGSTWLSDFPQAWAETGGMGLAVRQAPLIIPLKATSTPVSIKQYPMSQEARLGIKPHIQRLLDQGILVPCQSPWNTPLLPVKKPGTNDYRPVQDLREVNKRVEDIHPTVPNPYNLLSGLPPSHQWYTVLDLKDAFFCLRLHPTSQPLFAFEWRDPEMGISGQLTWTRLPQGFKNSPTLFNEALHRDLADFRIQHPDLILLQYVDDLLLAATSEQDCQRGTRALLQTLGNLGYRASAKKAQICQKQVKYLGYLLKEGQRWLTEARKETVMGQPTPKTPRQLREFLGTAGFCRLWIPGFAEMAAPLYPLTKPGTLFNWGPDQQKAYQEIKQALLTAPALGLPDLTKPFELFVDEKQGYAKGVLTQKLGPWRRPVAYLSKKLDPVAAGWPPCLRMVAAIAVLTKDAGKLTMGQPLVILAPHAVEALVKQPPDRWLSNARMTHYQAMLLDTDRVQFGPVVALNPATLLPLPEKEAPHDCLEILAETHGTRPDLTDQPIPDADYTWYTDGSSFLQEGQRRAGAAVTTETEVIWARALPAGTSAQRAELIALTQALKMAEGKKLNVYTDSRYAFATAHVHGEIYRRRGWLTSEGREIKNKNEILALLKALFLPKRLSIIHCPGHQKGNSAEARGNRMADQAAREAAMKAVLETSTLLAGKRTADGSEFEKRTADGSEFESPKKKAKVE

SEQ ID NO: 986 - protein, 2094 aa, synthetic construct
MPAAKRVKLDGGDKKYSIGLDIGTNSVGWAVITDEYKVPSKKFKVLGNTDRHSIKKNLIGALLFDSGETAEATRLKRTARRRYTRRKNRICYLQEIFSNEMAKVDDSFFHRLEESFLVEEDKKHERHPIFGNIVDEVAYHEKYPTIYHLRKKLVDSTDKADLRLIYLALAHMIKFRGHFLIEGDLNPDNSDVDKLFIQLVQTYNQLFEENPINASGVDAKAILSARLSKSRRLENLIAQLPGEKKNGLFGNLIALSLGLTPNFKSNFDLAEDAKLQLSKDTYDDDLDNLLAQIGDQYADLFLAAKNLSDAILLSDILRVNTEITKAPLSASMIKRYDEHHQDLTLLKALVRQQLPEKYKEIFFDQSKNGYAGYIDGGASQEEFYKFIKPILEKMDGTEELLVKLNREDLLRKQRTFDNGSIPHQIHLGELHAILRRQEDFYPFLKDNREKIEKILTFRIPYYVGPLARGNSRFAWMTRKSEETITPWNFEEVVDKGASAQSFIERMTNFDKNLPNEKVLPKHSLLYEYFTVYNELTKVKYVTEGMRKPAFLSGEQKKAIVDLLFKTNRKVTVKQLKEDYFKKIECFDSVEISGVEDRFNASLGTYHDLLKIIKDKDFLDNEENEDILEDIVLTLTLFEDREMIEERLKTYAHLFDDKVMKQLKRRRYTGWGRLSRKLINGIRDKQSGKTILDFLKSDGFANRNFMQLIHDDSLTFKEDIQKAQVSGQGDSLHEHIANLAGSPAIKKGILQTVKVVDELVKVMGRHKPENIVIEMARENQTTQKGQKNSRERMKRIEEGIKELGSQILKEHPVENTQLQNEKLYLYYLQNGRDMYVDQELDINRLSDYDVDHIVPQSFLKDDSIDNKVLTRSDKARGKSDNVPSEEVVKKMKNYWRQLLNAKLITQRKFDNLTKAERGGLSELDKAGFIKRQLVETRQITKHVAQILDSRMNTKYDENDKLIREVKVITLKSKLVSDFRKDFQFYKVREINNYHHAHDAYLNAVVGTALIKKYPKLESEFVYGDYKVYDVRKMIAKSEQEIGKATAKYFFYSNIMNFFKTEITLANGEIRKRPLIETNGETGEIVWDKGRDFATVRKVLSMPQVNIVKKTEVQTGGFSKESILPKRNSDKLIARKKDWDPKKYGGFDSPTVAYSVLVVAKVEKGKSKKLKSVKELLGITIMERSSFEKNPIDFLEAKGYKEVKKDLIIKLPKYSLFELENGRKRMLASAGELQKGNELALPSKYVNFLYLASHYEKLKGSPEDNEQKQLFVEQHKHYLDEIIEQISEFSKRVILADANLDKVLSAYNKHRDKPIREQAENIIHLFTLTNLGAPAAFKYFDTTIDRKRYTSTKEVLDATLIHQSITGLYETRIDLSQLGGDGGGGSPAPGSSGGTLNIEDEYRLHETSKEPDVPLGSTWLSDFPQAWAETGGMGLAVRQAPLIIPLKATSTPVSIKQYPMSQEARLGIKPHIQRLLDQGILVPCQSPWNTPLLPVKKPGTNDYRPVQDLREVNKRVEDIHPTVPNPYNLLSGLPPSHQWYTVLDLKDAFFCLRLHPTSQPLFAFEWRDPEMGISGQLTWTRLPQGFKNSPTLFNEALHRDLADFRIQHPDLILLQYVDDLLLAATSEQDCQRGTRALLQTLGNLGYRASAKKAQICQKQVKYLGYLLKEGQRWLTEARKETVMGQPTPKTPRQLREFLGTAGFCRLWIPGFAEMAAPLYPLTKPGTLFNWGPDQQKAYQEIKQALLTAPALGLPDLTKPFELFVDEKQGYAKGVLTQKLGPWRRPVAYLSKKLDPVAAGWPPCLRMVAAIAVLTKDAGKLTMGQPLVILAPHAVEALVKQPPDRWLSNARMTHYQAMLLDTDRVQFGPVVALNPATLLPLPEKEAPHDCLEILAETHGTRPDLTDQPIPDADYTWYTDGSSFLQEGQRRAGAAVTTETEVIWARALPAGTSAQRAELIALTQALKMAEGKKLNVYTDSRYAFATAHVHGEIYRRRGWLTSEGREIKNKNEILALLKALFLPKRLSIIHCPGHQKGNSAEARGNRMADQAAREAAMKAVLETSTLLAGKRTADGSEFEKRTADGSEFESPKKKAKVE

SEQ ID NO: 987 - protein, 2094 aa, synthetic construct
MPAAKRVKLDGGDKKYSIGLDIGTNSVGWAVITDEYKVPSKKFKVLGNTDRHSIKKNLIGALLFDSGETAEATRLKRTARRRYTRRKNRICYLQEIFSNEMAKVDDSFFHRLEESFLVEEDKKHERHPIFGNIVDEVAYHEKYPTIYHLRKKLVDSTDKADLRLIYLALAHMIKFRGHFLIEGDLNPDNSDVDKLFIQLVQTYNQLFEENPINASGVDAKAILSARLSKSRRLENLIAQLPGEKKNGLFGNLIALSLGLTPNFKSNFDLAEDAKLQLSKDTYDDDLDNLLAQIGDQYADLFLAAKNLSDAILLSDILRVNTEITKAPLSASMIKRYDEHHQDLTLLKALVRQQLPEKYKEIFFDQSKNGYAGYIDGGASQEEFYKFIKPILEKMDGTEELLVKLNREDLLRKQRTFDNGSIPHQIHLGELHAILRRQEDFYPFLKDNREKIEKILTFRIPYYVGPLARGNSRFAWMTRKSEETITPWNFEEVVDKGASAQSFIERMTNFDKNLPNEKVLPKHSLLYEYFTVYNELTKVKYVTEGMRKPAFLSGEQKKAIVDLLFKTNRKVTVKQLKEDYFKKIECFDSVEISGVEDRFNASLGTYHDLLKIIKDKDFLDNEENEDILEDIVLTLTLFEDREMIEERLKTYAHLFDDKVMKQLKRRRYTGWGRLSRKLINGIRDKQSGKTILDFLKSDGFANRNFMQLIHDDSLTFKEDIQKAQVSGQGDSLHEHIANLAGSPAIKKGILQTVKVVDELVKVMGRHKPENIVIEMARENQTTQKGQKNSRERMKRIEEGIKELGSQILKEHPVENTQLQNEKLYLYYLQNGRDMYVDQELDINRLSDYDVDHIVPQSFLKDDSIDNKVLTRSDKARGKSDNVPSEEVVKKMKNYWRQLLNAKLITQRKFDNLTKAERGGLSELDKAGFIKRQLVETRQITKHVAQILDSRMNTKYDENDKLIREVKVITLKSKLVSDFRKDFQFYKVREINNYHHAHDAYLNAVVGTALIKKYPKLESEFVYGDYKVYDVRKMIAKSEQEIGKATAKYFFYSNIMNFFKTEITLANGEIRKRPLIETNGETGEIVWDKGRDFATVRKVLSMPQVNIVKKTEVQTGGFSKESILPKRNSDKLIARKKDWDPKKYGGFDSPTVAYSVLVVAKVEKGKSKKLKSVKELLGITIMERSSFEKNPIDFLEAKGYKEVKKDLIIKLPKYSLFELENGRKRMLASAGELQKGNELALPSKYVNFLYLASHYEKLKGSPEDNEQKQLFVEQHKHYLDEIIEQISEFSKRVILADANLDKVLSAYNKHRDKPIREQAENIIHLFTLTNLGAPAAFKYFDTTIDRKRYTSTKEVLDATLIHQSITGLYETRIDLSQLGGDGGGSSPAPGGSGGTLNIEDEYRLHETSKEPDVPLGSTWLSDFPQAWAETGGMGLAVRQAPLIIPLKATSTPVSIKQYPMSQEARLGIKPHIQRLLDQGILVPCQSPWNTPLLPVKKPGTNDYRPVQDLREVNKRVEDIHPTVPNPYNLLSGLPPSHQWYTVLDLKDAFFCLRLHPTSQPLFAFEWRDPEMGISGQLTWTRLPQGFKNSPTLFNEALHRDLADFRIQHPDLILLQYVDDLLLAATSEQDCQRGTRALLQTLGNLGYRASAKKAQICQKQVKYLGYLLKEGQRWLTEARKETVMGQPTPKTPRQLREFLGTAGFCRLWIPGFAEMAAPLYPLTKPGTLFNWGPDQQKAYQEIKQALLTAPALGLPDLTKPFELFVDEKQGYAKGVLTQKLGPWRRPVAYLSKKLDPVAAGWPPCLRMVAAIAVLTKDAGKLTMGQPLVILAPHAVEALVKQPPDRWLSNARMTHYQAMLLDTDRVQFGPVVALNPATLLPLPEKEAPHDCLEILAETHGTRPDLTDQPIPDADYTWYTDGSSFLQEGQRRAGAAVTTETEVIWARALPAGTSAQRAELIALTQALKMAEGKKLNVYTDSRYAFATAHVHGEIYRRRGWLTSEGREIKNKNEILALLKALFLPKRLSIIHCPGHQKGNSAEARGNRMADQAAREAAMKAVLETSTLLAGKRTADGSEFEKRTADGSEFESPKKKAKVE

SEQ ID NO: 988 - protein, 2090 aa, synthetic construct
MPAAKRVKLDGGDKKYSIGLDIGTNSVGWAVITDEYKVPSKKFKVLGNTDRHSIKKNLIGALLFDSGETAEATRLKRTARRRYTRRKNRICYLQEIFSNEMAKVDDSFFHRLEESFLVEEDKKHERHPIFGNIVDEVAYHEKYPTIYHLRKKLVDSTDKADLRLIYLALAHMIKFRGHFLIEGDLNPDNSDVDKLFIQLVQTYNQLFEENPINASGVDAKAILSARLSKSRRLENLIAQLPGEKKNGLFGNLIALSLGLTPNFKSNFDLAEDAKLQLSKDTYDDDLDNLLAQIGDQYADLFLAAKNLSDAILLSDILRVNTEITKAPLSASMIKRYDEHHQDLTLLKALVRQQLPEKYKEIFFDQSKNGYAGYIDGGASQEEFYKFIKPILEKMDGTEELLVKLNREDLLRKQRTFDNGSIPHQIHLGELHAILRRQEDFYPFLKDNREKIEKILTFRIPYYVGPLARGNSRFAWMTRKSEETITPWNFEEVVDKGASAQSFIERMTNFDKNLPNEKVLPKHSLLYEYFTVYNELTKVKYVTEGMRKPAFLSGEQKKAIVDLLFKTNRKVTVKQLKEDYFKKIECFDSVEISGVEDRFNASLGTYHDLLKIIKDKDFLDNEENEDILEDIVLTLTLFEDREMIEERLKTYAHLFDDKVMKQLKRRRYTGWGRLSRKLINGIRDKQSGKTILDFLKSDGFANRNFMQLIHDDSLTFKEDIQKAQVSGQGDSLHEHIANLAGSPAIKKGILQTVKVVDELVKVMGRHKPENIVIEMARENQTTQKGQKNSRERMKRIEEGIKELGSQILKEHPVENTQLQNEKLYLYYLQNGRDMYVDQELDINRLSDYDVDHIVPQSFLKDDSIDNKVLTRSDKARGKSDNVPSEEVVKKMKNYWRQLLNAKLITQRKFDNLTKAERGGLSELDKAGFIKRQLVETRQITKHVAQILDSRMNTKYDENDKLIREVKVITLKSKLVSDFRKDFQFYKVREINNYHHAHDAYLNAVVGTALIKKYPKLESEFVYGDYKVYDVRKMIAKSEQEIGKATAKYFFYSNIMNFFKTEITLANGEIRKRPLIETNGETGEIVWDKGRDFATVRKVLSMPQVNIVKKTEVQTGGFSKESILPKRNSDKLIARKKDWDPKKYGGFDSPTVAYSVLVVAKVEKGKSKKLKSVKELLGITIMERSSFEKNPIDFLEAKGYKEVKKDLIIKLPKYSLFELENGRKRMLASAGELQKGNELALPSKYVNFLYLASHYEKLKGSPEDNEQKQLFVEQHKHYLDEIIEQISEFSKRVILADANLDKVLSAYNKHRDKPIREQAENIIHLFTLTNLGAPAAFKYFDTTIDRKRYTSTKEVLDATLIHQSITGLYETRIDLSQLGGDGGEAAAKGGTLNIEDEYRLHETSKEPDVPLGSTWLSDFPQAWAETGGMGLAVRQAPLIIPLKATSTPVSIKQYPMSQEARLGIKPHIQRLLDQGILVPCQSPWNTPLLPVKKPGTNDYRPVQDLREVNKRVEDIHPTVPNPYNLLSGLPPSHQWYTVLDLKDAFFCLRLHPTSQPLFAFEWRDPEMGISGQLTWTRLPQGFKNSPTLFNEALHRDLADFRIQHPDLILLQYVDDLLLAATSEQDCQRGTRALLQTLGNLGYRASAKKAQICQKQVKYLGYLLKEGQRWLTEARKETVMGQPTPKTPRQLREFLGTAGFCRLWIPGFAEMAAPLYPLTKPGTLFNWGPDQQKAYQEIKQALLTAPALGLPDLTKPFELFVDEKQGYAKGVLTQKLGPWRRPVAYLSKKLDPVAAGWPPCLRMVAAIAVLTKDAGKLTMGQPLVILAPHAVEALVKQPPDRWLSNARMTHYQAMLLDTDRVQFGPVVALNPATLLPLPEKEAPHDCLEILAETHGTRPDLTDQPIPDADYTWYTDGSSFLQEGQRRAGAAVTTETEVIWARALPAGTSAQRAELIALTQALKMAEGKKLNVYTDSRYAFATAHVHGEIYRRRGWLTSEGREIKNKNEILALLKALFLPKRLSIIHCPGHQKGNSAEARGNRMADQAAREAAMKAVLETSTLLAGKRTADGSEFEKRTADGSEFESPKKKAKVE

SEQ ID NO: 989 - protein, 2094 aa, synthetic construct
MPAAKRVKLDGGDKKYSIGLDIGTNSVGWAVITDEYKVPSKKFKVLGNTDRHSIKKNLIGALLFDSGETAEATRLKRTARRRYTRRKNRICYLQEIFSNEMAKVDDSFFHRLEESFLVEEDKKHERHPIFGNIVDEVAYHEKYPTIYHLRKKLVDSTDKADLRLIYLALAHMIKFRGHFLIEGDLNPDNSDVDKLFIQLVQTYNQLFEENPINASGVDAKAILSARLSKSRRLENLIAQLPGEKKNGLFGNLIALSLGLTPNFKSNFDLAEDAKLQLSKDTYDDDLDNLLAQIGDQYADLFLAAKNLSDAILLSDILRVNTEITKAPLSASMIKRYDEHHQDLTLLKALVRQQLPEKYKEIFFDQSKNGYAGYIDGGASQEEFYKFIKPILEKMDGTEELLVKLNREDLLRKQRTFDNGSIPHQIHLGELHAILRRQEDFYPFLKDNREKIEKILTFRIPYYVGPLARGNSRFAWMTRKSEETITPWNFEEVVDKGASAQSFIERMTNFDKNLPNEKVLPKHSLLYEYFTVYNELTKVKYVTEGMRKPAFLSGEQKKAIVDLLFKTNRKVTVKQLKEDYFKKIECFDSVEISGVEDRFNASLGTYHDLLKIIKDKDFLDNEENEDILEDIVLTLTLFEDREMIEERLKTYAHLFDDKVMKQLKRRRYTGWGRLSRKLINGIRDKQSGKTILDFLKSDGFANRNFMQLIHDDSLTFKEDIQKAQVSGQGDSLHEHIANLAGSPAIKKGILQTVKVVDELVKVMGRHKPENIVIEMARENQTTQKGQKNSRERMKRIEEGIKELGSQILKEHPVENTQLQNEKLYLYYLQNGRDMYVDQELDINRLSDYDVDHIVPQSFLKDDSIDNKVLTRSDKARGKSDNVPSEEVVKKMKNYWRQLLNAKLITQRKFDNLTKAERGGLSELDKAGFIKRQLVETRQITKHVAQILDSRMNTKYDENDKLIREVKVITLKSKLVSDFRKDFQFYKVREINNYHHAHDAYLNAVVGTALIKKYPKLESEFVYGDYKVYDVRKMIAKSEQEIGKATAKYFFYSNIMNFFKTEITLANGEIRKRPLIETNGETGEIVWDKGRDFATVRKVLSMPQVNIVKKTEVQTGGFSKESILPKRNSDKLIARKKDWDPKKYGGFDSPTVAYSVLVVAKVEKGKSKKLKSVKELLGITIMERSSFEKNPIDFLEAKGYKEVKKDLIIKLPKYSLFELENGRKRMLASAGELQKGNELALPSKYVNFLYLASHYEKLKGSPEDNEQKQLFVEQHKHYLDEIIEQISEFSKRVILADANLDKVLSAYNKHRDKPIREQAENIIHLFTLTNLGAPAAFKYFDTTIDRKRYTSTKEVLDATLIHQSITGLYETRIDLSQLGGDGGGGGGGSGSSGGTLNIEDEYRLHETSKEPDVPLGSTWLSDFPQAWAETGGMGLAVRQAPLIIPLKATSTPVSIKQYPMSQEARLGIKPHIQRLLDQGILVPCQSPWNTPLLPVKKPGTNDYRPVQDLREVNKRVEDIHPTVPNPYNLLSGLPPSHQWYTVLDLKDAFFCLRLHPTSQPLFAFEWRDPEMGISGQLTWTRLPQGFKNSPTLFNEALHRDLADFRIQHPDLILLQYVDDLLLAATSEQDCQRGTRALLQTLGNLGYRASAKKAQICQKQVKYLGYLLKEGQRWLTEARKETVMGQPTPKTPRQLREFLGTAGFCRLWIPGFAEMAAPLYPLTKPGTLFNWGPDQQKAYQEIKQALLTAPALGLPDLTKPFELFVDEKQGYAKGVLTQKLGPWRRPVAYLSKKLDPVAAGWPPCLRMVAAIAVLTKDAGKLTMGQPLVILAPHAVEALVKQPPDRWLSNARMTHYQAMLLDTDRVQFGPVVALNPATLLPLPEKEAPHDCLEILAETHGTRPDLTDQPIPDADYTWYTDGSSFLQEGQRRAGAAVTTETEVIWARALPAGTSAQRAELIALTQALKMAEGKKLNVYTDSRYAFATAHVHGEIYRRRGWLTSEGREIKNKNEILALLKALFLPKRLSIIHCPGHQKGNSAEARGNRMADQAAREAAMKAVLETSTLLAGKRTADGSEFEKRTADGSEFESPKKKAKVE

SEQ ID NO: 990 - protein, 2091 aa, synthetic construct
MPAAKRVKLDGGDKKYSIGLDIGTNSVGWAVITDEYKVPSKKFKVLGNTDRHSIKKNLIGALLFDSGETAEATRLKRTARRRYTRRKNRICYLQEIFSNEMAKVDDSFFHRLEESFLVEEDKKHERHPIFGNIVDEVAYHEKYPTIYHLRKKLVDSTDKADLRLIYLALAHMIKFRGHFLIEGDLNPDNSDVDKLFIQLVQTYNQLFEENPINASGVDAKAILSARLSKSRRLENLIAQLPGEKKNGLFGNLIALSLGLTPNFKSNFDLAEDAKLQLSKDTYDDDLDNLLAQIGDQYADLFLAAKNLSDAILLSDILRVNTEITKAPLSASMIKRYDEHHQDLTLLKALVRQQLPEKYKEIFFDQSKNGYAGYIDGGASQEEFYKFIKPILEKMDGTEELLVKLNREDLLRKQRTFDNGSIPHQIHLGELHAILRRQEDFYPFLKDNREKIEKILTFRIPYYVGPLARGNSRFAWMTRKSEETITPWNFEEVVDKGASAQSFIERMTNFDKNLPNEKVLPKHSLLYEYFTVYNELTKVKYVTEGMRKPAFLSGEQKKAIVDLLFKTNRKVTVKQLKEDYFKKIECFDSVEISGVEDRFNASLGTYHDLLKIIKDKDFLDNEENEDILEDIVLTLTLFEDREMIEERLKTYAHLFDDKVMKQLKRRRYTGWGRLSRKLINGIRDKQSGKTILDFLKSDGFANRNFMQLIHDDSLTFKEDIQKAQVSGQGDSLHEHIANLAGSPAIKKGILQTVKVVDELVKVMGRHKPENIVIEMARENQTTQKGQKNSRERMKRIEEGIKELGSQILKEHPVENTQLQNEKLYLYYLQNGRDMYVDQELDINRLSDYDVDHIVPQSFLKDDSIDNKVLTRSDKARGKSDNVPSEEVVKKMKNYWRQLLNAKLITQRKFDNLTKAERGGLSELDKAGFIKRQLVETRQITKHVAQILDSRMNTKYDENDKLIREVKVITLKSKLVSDFRKDFQFYKVREINNYHHAHDAYLNAVVGTALIKKYPKLESEFVYGDYKVYDVRKMIAKSEQEIGKATAKYFFYSNIMNFFKTEITLANGEIRKRPLIETNGETGEIVWDKGRDFATVRKVLSMPQVNIVKKTEVQTGGFSKESILPKRNSDKLIARKKDWDPKKYGGFDSPTVAYSVLVVAKVEKGKSKKLKSVKELLGITIMERSSFEKNPIDFLEAKGYKEVKKDLIIKLPKYSLFELENGRKRMLASAGELQKGNELALPSKYVNFLYLASHYEKLKGSPEDNEQKQLFVEQHKHYLDEIIEQISEFSKRVILADANLDKVLSAYNKHRDKPIREQAENIIHLFTLTNLGAPAAFKYFDTTIDRKRYTSTKEVLDATLIHQSITGLYETRIDLSQLGGDGGPAPGSSGGTLNIEDEYRLHETSKEPDVPLGSTWLSDFPQAWAETGGMGLAVRQAPLIIPLKATSTPVSIKQYPMSQEARLGIKPHIQRLLDQGILVPCQSPWNTPLLPVKKPGTNDYRPVQDLREVNKRVEDIHPTVPNPYNLLSGLPPSHQWYTVLDLKDAFFCLRLHPTSQPLFAFEWRDPEMGISGQLTWTRLPQGFKNSPTLFNEALHRDLADFRIQHPDLILLQYVDDLLLAATSEQDCQRGTRALLQTLGNLGYRASAKKAQICQKQVKYLGYLLKEGQRWLTEARKETVMGQPTPKTPRQLREFLGTAGFCRLWIPGFAEMAAPLYPLTKPGTLFNWGPDQQKAYQEIKQALLTAPALGLPDLTKPFELFVDEKQGYAKGVLTQKLGPWRRPVAYLSKKLDPVAAGWPPCLRMVAAIAVLTKDAGKLTMGQPLVILAPHAVEALVKQPPDRWLSNARMTHYQAMLLDTDRVQFGPVVALNPATLLPLPEKEAPHDCLEILAETHGTRPDLTDQPIPDADYTWYTDGSSFLQEGQRRAGAAVTTETEVIWARALPAGTSAQRAELIALTQALKMAEGKKLNVYTDSRYAFATAHVHGEIYRRRGWLTSEGREIKNKNEILALLKALFLPKRLSIIHCPGHQKGNSAEARGNRMADQAAREAAMKAVLETSTLLAGKRTADGSEFEKRTADGSEFESPKKKAKVE

SEQ ID NO: 991 - protein, 2095 aa, synthetic construct
MPAAKRVKLDGGDKKYSIGLDIGTNSVGWAVITDEYKVPSKKFKVLGNTDRHSIKKNLIGALLFDSGETAEATRLKRTARRRYTRRKNRICYLQEIFSNEMAKVDDSFFHRLEESFLVEEDKKHERHPIFGNIVDEVAYHEKYPTIYHLRKKLVDSTDKADLRLIYLALAHMIKFRGHFLIEGDLNPDNSDVDKLFIQLVQTYNQLFEENPINASGVDAKAILSARLSKSRRLENLIAQLPGEKKNGLFGNLIALSLGLTPNFKSNFDLAEDAKLQLSKDTYDDDLDNLLAQIGDQYADLFLAAKNLSDAILLSDILRVNTEITKAPLSASMIKRYDEHHQDLTLLKALVRQQLPEKYKEIFFDQSKNGYAGYIDGGASQEEFYKFIKPILEKMDGTEELLVKLNREDLLRKQRTFDNGSIPHQIHLGELHAILRRQEDFYPFLKDNREKIEKILTFRIPYYVGPLARGNSRFAWMTRKSEETITPWNFEEVVDKGASAQSFIERMTNFDKNLPNEKVLPKHSLLYEYFTVYNELTKVKYVTEGMRKPAFLSGEQKKAIVDLLFKTNRKVTVKQLKEDYFKKIECFDSVEISGVEDRFNASLGTYHDLLKIIKDKDFLDNEENEDILEDIVLTLTLFEDREMIEERLKTYAHLFDDKVMKQLKRRRYTGWGRLSRKLINGIRDKQSGKTILDFLKSDGFANRNFMQLIHDDSLTFKEDIQKAQVSGQGDSLHEHIANLAGSPAIKKGILQTVKVVDELVKVMGRHKPENIVIEMARENQTTQKGQKNSRERMKRIEEGIKELGSQILKEHPVENTQLQNEKLYLYYLQNGRDMYVDQELDINRLSDYDVDHIVPQSFLKDDSIDNKVLTRSDKARGKSDNVPSEEVVKKMKNYWRQLLNAKLITQRKFDNLTKAERGGLSELDKAGFIKRQLVETRQITKHVAQILDSRMNTKYDENDKLIREVKVITLKSKLVSDFRKDFQFYKVREINNYHHAHDAYLNAVVGTALIKKYPKLESEFVYGDYKVYDVRKMIAKSEQEIGKATAKYFFYSNIMNFFKTEITLANGEIRKRPLIETNGETGEIVWDKGRDFATVRKVLSMPQVNIVKKTEVQTGGFSKESILPKRNSDKLIARKKDWDPKKYGGFDSPTVAYSVLVVAKVEKGKSKKLKSVKELLGITIMERSSFEKNPIDFLEAKGYKEVKKDLIIKLPKYSLFELENGRKRMLASAGELQKGNELALPSKYVNFLYLASHYEKLKGSPEDNEQKQLFVEQHKHYLDEIIEQISEFSKRVILADANLDKVLSAYNKHRDKPIREQAENIIHLFTLTNLGAPAAFKYFDTTIDRKRYTSTKEVLDATLIHQSITGLYETRIDLSQLGGDGGEAAAKEAAAKGGTLNIEDEYRLHETSKEPDVPLGSTWLSDFPQAWAETGGMGLAVRQAPLIIPLKATSTPVSIKQYPMSQEARLGIKPHIQRLLDQGILVPCQSPWNTPLLPVKKPGTNDYRPVQDLREVNKRVEDIHPTVPNPYNLLSGLPPSHQWYTVLDLKDAFFCLRLHPTSQPLFAFEWRDPEMGISGQLTWTRLPQGFKNSPTLFNEALHRDLADFRIQHPDLILLQYVDDLLLAATSEQDCQRGTRALLQTLGNLGYRASAKKAQICQKQVKYLGYLLKEGQRWLTEARKETVMGQPTPKTPRQLREFLGTAGFCRLWIPGFAEMAAPLYPLTKPGTLFNWGPDQQKAYQEIKQALLTAPALGLPDLTKPFELFVDEKQGYAKGVLTQKLGPWRRPVAYLSKKLDPVAAGWPPCLRMVAAIAVLTKDAGKLTMGQPLVILAPHAVEALVKQPPDRWLSNARMTHYQAMLLDTDRVQFGPVVALNPATLLPLPEKEAPHDCLEILAETHGTRPDLTDQPIPDADYTWYTDGSSFLQEGQRRAGAAVTTETEVIWARALPAGTSAQRAELIALTQALKMAEGKKLNVYTDSRYAFATAHVHGEIYRRRGWLTSEGREIKNKNEILALLKALFLPKRLSIIHCPGHQKGNSAEARGNRMADQAAREAAMKAVLETSTLLAGKRTADGSEFEKRTADGSEFESPKKKAKVE

SEQ ID NO: 992 - protein, 2091 aa, synthetic construct
MPAAKRVKLDGGDKKYSIGLDIGTNSVGWAVITDEYKVPSKKFKVLGNTDRHSIKKNLIGALLFDSGETAEATRLKRTARRRYTRRKNRICYLQEIFSNEMAKVDDSFFHRLEESFLVEEDKKHERHPIFGNIVDEVAYHEKYPTIYHLRKKLVDSTDKADLRLIYLALAHMIKFRGHFLIEGDLNPDNSDVDKLFIQLVQTYNQLFEENPINASGVDAKAILSARLSKSRRLENLIAQLPGEKKNGLFGNLIALSLGLTPNFKSNFDLAEDAKLQLSKDTYDDDLDNLLAQIGDQYADLFLAAKNLSDAILLSDILRVNTEITKAPLSASMIKRYDEHHQDLTLLKALVRQQLPEKYKEIFFDQSKNGYAGYIDGGASQEEFYKFIKPILEKMDGTEELLVKLNREDLLRKQRTFDNGSIPHQIHLGELHAILRRQEDFYPFLKDNREKIEKILTFRIPYYVGPLARGNSRFAWMTRKSEETITPWNFEEVVDKGASAQSFIERMTNFDKNLPNEKVLPKHSLLYEYFTVYNELTKVKYVTEGMRKPAFLSGEQKKAIVDLLFKTNRKVTVKQLKEDYFKKIECFDSVEISGVEDRFNASLGTYHDLLKIIKDKDFLDNEENEDILEDIVLTLTLFEDREMIEERLKTYAHLFDDKVMKQLKRRRYTGWGRLSRKLINGIRDKQSGKTILDFLKSDGFANRNFMQLIHDDSLTFKEDIQKAQVSGQGDSLHEHIANLAGSPAIKKGILQTVKVVDELVKVMGRHKPENIVIEMARENQTTQKGQKNSRERMKRIEEGIKELGSQILKEHPVENTQLQNEKLYLYYLQNGRDMYVDQELDINRLSDYDVDHIVPQSFLKDDSIDNKVLTRSDKARGKSDNVPSEEVVKKMKNYWRQLLNAKLITQRKFDNLTKAERGGLSELDKAGFIKRQLVETRQITKHVAQILDSRMNTKYDENDKLIREVKVITLKSKLVSDFRKDFQFYKVREINNYHHAHDAYLNAVVGTALIKKYPKLESEFVYGDYKVYDVRKMIAKSEQEIGKATAKYFFYSNIMNFFKTEITLANGEIRKRPLIETNGETGEIVWDKGRDFATVRKVLSMPQVNIVKKTEVQTGGFSKESILPKRNSDKLIARKKDWDPKKYGGFDSPTVAYSVLVVAKVEKGKSKKLKSVKELLGITIMERSSFEKNPIDFLEAKGYKEVKKDLIIKLPKYSLFELENGRKRMLASAGELQKGNELALPSKYVNFLYLASHYEKLKGSPEDNEQKQLFVEQHKHYLDEIIEQISEFSKRVILADANLDKVLSAYNKHRDKPIREQAENIIHLFTLTNLGAPAAFKYFDTTIDRKRYTSTKEVLDATLIHQSITGLYETRIDLSQLGGDGGGSSGGGGGTLNIEDEYRLHETSKEPDVPLGSTWLSDFPQAWAETGGMGLAVRQAPLIIPLKATSTPVSIKQYPMSQEARLGIKPHIQRLLDQGILVPCQSPWNTPLLPVKKPGTNDYRPVQDLREVNKRVEDIHPTVPNPYNLLSGLPPSHQWYTVLDLKDAFFCLRLHPTSQPLFAFEWRDPEMGISGQLTWTRLPQGFKNSPTLFNEALHRDLADFRIQHPDLILLQYVDDLLLAATSEQDCQRGTRALLQTLGNLGYRASAKKAQICQKQVKYLGYLLKEGQRWLTEARKETVMGQPTPKTPRQLREFLGTAGFCRLWIPGFAEMAAPLYPLTKPGTLFNWGPDQQKAYQEIKQALLTAPALGLPDLTKPFELFVDEKQGYAKGVLTQKLGPWRRPVAYLSKKLDPVAAGWPPCLRMVAAIAVLTKDAGKLTMGQPLVILAPHAVEALVKQPPDRWLSNARMTHYQAMLLDTDRVQFGPVVALNPATLLPLPEKEAPHDCLEILAETHGTRPDLTDQPIPDADYTWYTDGSSFLQEGQRRAGAAVTTETEVIWARALPAGTSAQRAELIALTQALKMAEGKKLNVYTDSRYAFATAHVHGEIYRRRGWLTSEGREIKNKNEILALLKALFLPKRLSIIHCPGHQKGNSAEARGNRMADQAAREAAMKAVLETSTLLAGKRTADGSEFEKRTADGSEFESPKKKAKVE

SEQ ID NO: 993 - protein, 2093 aa, synthetic construct
MPAAKRVKLDGGDKKYSIGLDIGTNSVGWAVITDEYKVPSKKFKVLGNTDRHSIKKNLIGALLFDSGETAEATRLKRTARRRYTRRKNRICYLQEIFSNEMAKVDDSFFHRLEESFLVEEDKKHERHPIFGNIVDEVAYHEKYPTIYHLRKKLVDSTDKADLRLIYLALAHMIKFRGHFLIEGDLNPDNSDVDKLFIQLVQTYNQLFEENPINASGVDAKAILSARLSKSRRLENLIAQLPGEKKNGLFGNLIALSLGLTPNFKSNFDLAEDAKLQLSKDTYDDDLDNLLAQIGDQYADLFLAAKNLSDAILLSDILRVNTEITKAPLSASMIKRYDEHHQDLTLLKALVRQQLPEKYKEIFFDQSKNGYAGYIDGGASQEEFYKFIKPILEKMDGTEELLVKLNREDLLRKQRTFDNGSIPHQIHLGELHAILRRQEDFYPFLKDNREKIEKILTFRIPYYVGPLARGNSRFAWMTRKSEETITPWNFEEVVDKGASAQSFIERMTNFDKNLPNEKVLPKHSLLYEYFTVYNELTKVKYVTEGMRKPAFLSGEQKKAIVDLLFKTNRKVTVKQLKEDYFKKIECFDSVEISGVEDRFNASLGTYHDLLKIIKDKDFLDNEENEDILEDIVLTLTLFEDREMIEERLKTYAHLFDDKVMKQLKRRRYTGWGRLSRKLINGIRDKQSGKTILDFLKSDGFANRNFMQLIHDDSLTFKEDIQKAQVSGQGDSLHEHIANLAGSPAIKKGILQTVKVVDELVKVMGRHKPENIVIEMARENQTTQKGQKNSRERMKRIEEGIKELGSQILKEHPVENTQLQNEKLYLYYLQNGRDMYVDQELDINRLSDYDVDHIVPQSFLKDDSIDNKVLTRSDKARGKSDNVPSEEVVKKMKNYWRQLLNAKLITQRKFDNLTKAERGGLSELDKAGFIKRQLVETRQITKHVAQILDSRMNTKYDENDKLIREVKVITLKSKLVSDFRKDFQFYKVREINNYHHAHDAYLNAVVGTALIKKYPKLESEFVYGDYKVYDVRKMIAKSEQEIGKATAKYFFYSNIMNFFKTEITLANGEIRKRPLIETNGETGEIVWDKGRDFATVRKVLSMPQVNIVKKTEVQTGGFSKESILPKRNSDKLIARKKDWDPKKYGGFDSPTVAYSVLVVAKVEKGKSKKLKSVKELLGITIMERSSFEKNPIDFLEAKGYKEVKKDLIIKLPKYSLFELENGRKRMLASAGELQKGNELALPSKYVNFLYLASHYEKLKGSPEDNEQKQLFVEQHKHYLDEIIEQISEFSKRVILADANLDKVLSAYNKHRDKPIREQAENIIHLFTLTNLGAPAAFKYFDTTIDRKRYTSTKEVLDATLIHQSITGLYETRIDLSQLGGDGGGGSEAAAKGGTLNIEDEYRLHETSKEPDVPLGSTWLSDFPQAWAETGGMGLAVRQAPLIIPLKATSTPVSIKQYPMSQEARLGIKPHIQRLLDQGILVPCQSPWNTPLLPVKKPGTNDYRPVQDLREVNKRVEDIHPTVPNPYNLLSGLPPSHQWYTVLDLKDAFFCLRLHPTSQPLFAFEWRDPEMGISGQLTWTRLPQGFKNSPTLFNEALHRDLADFRIQHPDLILLQYVDDLLLAATSEQDCQRGTRALLQTLGNLGYRASAKKAQICQKQVKYLGYLLKEGQRWLTEARKETVMGQPTPKTPRQLREFLGTAGFCRLWIPGFAEMAAPLYPLTKPGTLFNWGPDQQKAYQEIKQALLTAPALGLPDLTKPFELFVDEKQGYAKGVLTQKLGPWRRPVAYLSKKLDPVAAGWPPCLRMVAAIAVLTKDAGKLTMGQPLVILAPHAVEALVKQPPDRWLSNARMTHYQAMLLDTDRVQFGPVVALNPATLLPLPEKEAPHDCLEILAETHGTRPDLTDQPIPDADYTWYTDGSSFLQEGQRRAGAAVTTETEVIWARALPAGTSAQRAELIALTQALKMAEGKKLNVYTDSRYAFATAHVHGEIYRRRGWLTSEGREIKNKNEILALLKALFLPKRLSIIHCPGHQKGNSAEARGNRMADQAAREAAMKAVLETSTLLAGKRTADGSEFEKRTADGSEFESPKKKAKVE

SEQ ID NO: 994 - protein, 2100 aa, synthetic construct
MPAAKRVKLDGGDKKYSIGLDIGTNSVGWAVITDEYKVPSKKFKVLGNTDRHSIKKNLIGALLFDSGETAEATRLKRTARRRYTRRKNRICYLQEIFSNEMAKVDDSFFHRLEESFLVEEDKKHERHPIFGNIVDEVAYHEKYPTIYHLRKKLVDSTDKADLRLIYLALAHMIKFRGHFLIEGDLNPDNSDVDKLFIQLVQTYNQLFEENPINASGVDAKAILSARLSKSRRLENLIAQLPGEKKNGLFGNLIALSLGLTPNFKSNFDLAEDAKLQLSKDTYDDDLDNLLAQIGDQYADLFLAAKNLSDAILLSDILRVNTEITKAPLSASMIKRYDEHHQDLTLLKALVRQQLPEKYKEIFFDQSKNGYAGYIDGGASQEEFYKFIKPILEKMDGTEELLVKLNREDLLRKQRTFDNGSIPHQIHLGELHAILRRQEDFYPFLKDNREKIEKILTFRIPYYVGPLARGNSRFAWMTRKSEETITPWNFEEVVDKGASAQSFIERMTNFDKNLPNEKVLPKHSLLYEYFTVYNELTKVKYVTEGMRKPAFLSGEQKKAIVDLLFKTNRKVTVKQLKEDYFKKIECFDSVEISGVEDRFNASLGTYHDLLKIIKDKDFLDNEENEDILEDIVLTLTLFEDREMIEERLKTYAHLFDDKVMKQLKRRRYTGWGRLSRKLINGIRDKQSGKTILDFLKSDGFANRNFMQLIHDDSLTFKEDIQKAQVSGQGDSLHEHIANLAGSPAIKKGILQTVKVVDELVKVMGRHKPENIVIEMARENQTTQKGQKNSRERMKRIEEGIKELGSQILKEHPVENTQLQNEKLYLYYLQNGRDMYVDQELDINRLSDYDVDHIVPQSFLKDDSIDNKVLTRSDKARGKSDNVPSEEVVKKMKNYWRQLLNAKLITQRKFDNLTKAERGGLSELDKAGFIKRQLVETRQITKHVAQILDSRMNTKYDENDKLIREVKVITLKSKLVSDFRKDFQFYKVREINNYHHAHDAYLNAVVGTALIKKYPKLESEFVYGDYKVYDVRKMIAKSEQEIGKATAKYFFYSNIMNFFKTEITLANGEIRKRPLIETNGETGEIVWDKGRDFATVRKVLSMPQVNIVKKTEVQTGGFSKESILPKRNSDKLIARKKDWDPKKYGGFDSPTVAYSVLVVAKVEKGKSKKLKSVKELLGITIMERSSFEKNPIDFLEAKGYKEVKKDLIIKLPKYSLFELENGRKRMLASAGELQKGNELALPSKYVNFLYLASHYEKLKGSPEDNEQKQLFVEQHKHYLDEIIEQISEFSKRVILADANLDKVLSAYNKHRDKPIREQAENIIHLFTLTNLGAPAAFKYFDTTIDRKRYTSTKEVLDATLIHQSITGLYETRIDLSQLGGDGGGGSGGSGGSGGSGGSGGTLNIEDEYRLHETSKEPDVPLGSTWLSDFPQAWAETGGMGLAVRQAPLIIPLKATSTPVSIKQYPMSQEARLGIKPHIQRLLDQGILVPCQSPWNTPLLPVKKPGTNDYRPVQDLREVNKRVEDIHPTVPNPYNLLSGLPPSHQWYTVLDLKDAFFCLRLHPTSQPLFAFEWRDPEMGISGQLTWTRLPQGFKNSPTLFNEALHRDLADFRIQHPDLILLQYVDDLLLAATSEQDCQRGTRALLQTLGNLGYRASAKKAQICQKQVKYLGYLLKEGQRWLTEARKETVMGQPTPKTPRQLREFLGTAGFCRLWIPGFAEMAAPLYPLTKPGTLFNWGPDQQKAYQEIKQALLTAPALGLPDLTKPFELFVDEKQGYAKGVLTQKLGPWRRPVAYLSKKLDPVAAGWPPCLRMVAAIAVLTKDAGKLTMGQPLVILAPHAVEALVKQPPDRWLSNARMTHYQAMLLDTDRVQFGPVVALNPATLLPLPEKEAPHDCLEILAETHGTRPDLTDQPIPDADYTWYTDGSSFLQEGQRRAGAAVTTETEVIWARALPAGTSAQRAELIALTQALKMAEGKKLNVYTDSRYAFATAHVHGEIYRRRGWLTSEGREIKNKNEILALLKALFLPKRLSIIHCPGHQKGNSAEARGNRMADQAAREAAMKAVLETSTLLAGKRTADGSEFEKRTADGSEFESPKKKAKVE

SEQ ID NO: 995 - protein, 2094 aa, synthetic construct
MPAAKRVKLDGGDKKYSIGLDIGTNSVGWAVITDEYKVPSKKFKVLGNTDRHSIKKNLIGALLFDSGETAEATRLKRTARRRYTRRKNRICYLQEIFSNEMAKVDDSFFHRLEESFLVEEDKKHERHPIFGNIVDEVAYHEKYPTIYHLRKKLVDSTDKADLRLIYLALAHMIKFRGHFLIEGDLNPDNSDVDKLFIQLVQTYNQLFEENPINASGVDAKAILSARLSKSRRLENLIAQLPGEKKNGLFGNLIALSLGLTPNFKSNFDLAEDAKLQLSKDTYDDDLDNLLAQIGDQYADLFLAAKNLSDAILLSDILRVNTEITKAPLSASMIKRYDEHHQDLTLLKALVRQQLPEKYKEIFFDQSKNGYAGYIDGGASQEEFYKFIKPILEKMDGTEELLVKLNREDLLRKQRTFDNGSIPHQIHLGELHAILRRQEDFYPFLKDNREKIEKILTFRIPYYVGPLARGNSRFAWMTRKSEETITPWNFEEVVDKGASAQSFIERMTNFDKNLPNEKVLPKHSLLYEYFTVYNELTKVKYVTEGMRKPAFLSGEQKKAIVDLLFKTNRKVTVKQLKEDYFKKIECFDSVEISGVEDRFNASLGTYHDLLKIIKDKDFLDNEENEDILEDIVLTLTLFEDREMIEERLKTYAHLFDDKVMKQLKRRRYTGWGRLSRKLINGIRDKQSGKTILDFLKSDGFANRNFMQLIHDDSLTFKEDIQKAQVSGQGDSLHEHIANLAGSPAIKKGILQTVKVVDELVKVMGRHKPENIVIEMARENQTTQKGQKNSRERMKRIEEGIKELGSQILKEHPVENTQLQNEKLYLYYLQNGRDMYVDQELDINRLSDYDVDHIVPQSFLKDDSIDNKVLTRSDKARGKSDNVPSEEVVKKMKNYWRQLLNAKLITQRKFDNLTKAERGGLSELDKAGFIKRQLVETRQITKHVAQILDSRMNTKYDENDKLIREVKVITLKSKLVSDFRKDFQFYKVREINNYHHAHDAYLNAVVGTALIKKYPKLESEFVYGDYKVYDVRKMIAKSEQEIGKATAKYFFYSNIMNFFKTEITLANGEIRKRPLIETNGETGEIVWDKGRDFATVRKVLSMPQVNIVKKTEVQTGGFSKESILPKRNSDKLIARKKDWDPKKYGGFDSPTVAYSVLVVAKVEKGKSKKLKSVKELLGITIMERSSFEKNPIDFLEAKGYKEVKKDLIIKLPKYSLFELENGRKRMLASAGELQKGNELALPSKYVNFLYLASHYEKLKGSPEDNEQKQLFVEQHKHYLDEIIEQISEFSKRVILADANLDKVLSAYNKHRDKPIREQAENIIHLFTLTNLGAPAAFKYFDTTIDRKRYTSTKEVLDATLIHQSITGLYETRIDLSQLGGDGGGGSGSSGGGGGTLNIEDEYRLHETSKEPDVPLGSTWLSDFPQAWAETGGMGLAVRQAPLIIPLKATSTPVSIKQYPMSQEARLGIKPHIQRLLDQGILVPCQSPWNTPLLPVKKPGTNDYRPVQDLREVNKRVEDIHPTVPNPYNLLSGLPPSHQWYTVLDLKDAFFCLRLHPTSQPLFAFEWRDPEMGISGQLTWTRLPQGFKNSPTLFNEALHRDLADFRIQHPDLILLQYVDDLLLAATSEQDCQRGTRALLQTLGNLGYRASAKKAQICQKQVKYLGYLLKEGQRWLTEARKETVMGQPTPKTPRQLREFLGTAGFCRLWIPGFAEMAAPLYPLTKPGTLFNWGPDQQKAYQEIKQALLTAPALGLPDLTKPFELFVDEKQGYAKGVLTQKLGPWRRPVAYLSKKLDPVAAGWPPCLRMVAAIAVLTKDAGKLTMGQPLVILAPHAVEALVKQPPDRWLSNARMTHYQAMLLDTDRVQFGPVVALNPATLLPLPEKEAPHDCLEILAETHGTRPDLTDQPIPDADYTWYTDGSSFLQEGQRRAGAAVTTETEVIWARALPAGTSAQRAELIALTQALKMAEGKKLNVYTDSRYAFATAHVHGEIYRRRGWLTSEGREIKNKNEILALLKALFLPKRLSIIHCPGHQKGNSAEARGNRMADQAAREAAMKAVLETSTLLAGKRTADGSEFEKRTADGSEFESPKKKAKVE

SEQ ID NO: 996 - protein, 2100 aa, synthetic construct
MPAAKRVKLDGGDKKYSIGLDIGTNSVGWAVITDEYKVPSKKFKVLGNTDRHSIKKNLIGALLFDSGETAEATRLKRTARRRYTRRKNRICYLQEIFSNEMAKVDDSFFHRLEESFLVEEDKKHERHPIFGNIVDEVAYHEKYPTIYHLRKKLVDSTDKADLRLIYLALAHMIKFRGHFLIEGDLNPDNSDVDKLFIQLVQTYNQLFEENPINASGVDAKAILSARLSKSRRLENLIAQLPGEKKNGLFGNLIALSLGLTPNFKSNFDLAEDAKLQLSKDTYDDDLDNLLAQIGDQYADLFLAAKNLSDAILLSDILRVNTEITKAPLSASMIKRYDEHHQDLTLLKALVRQQLPEKYKEIFFDQSKNGYAGYIDGGASQEEFYKFIKPILEKMDGTEELLVKLNREDLLRKQRTFDNGSIPHQIHLGELHAILRRQEDFYPFLKDNREKIEKILTFRIPYYVGPLARGNSRFAWMTRKSEETITPWNFEEVVDKGASAQSFIERMTNFDKNLPNEKVLPKHSLLYEYFTVYNELTKVKYVTEGMRKPAFLSGEQKKAIVDLLFKTNRKVTVKQLKEDYFKKIECFDSVEISGVEDRFNASLGTYHDLLKIIKDKDFLDNEENEDILEDIVLTLTLFEDREMIEERLKTYAHLFDDKVMKQLKRRRYTGWGRLSRKLINGIRDKQSGKTILDFLKSDGFANRNFMQLIHDDSLTFKEDIQKAQVSGQGDSLHEHIANLAGSPAIKKGILQTVKVVDELVKVMGRHKPENIVIEMARENQTTQKGQKNSRERMKRIEEGIKELGSQILKEHPVENTQLQNEKLYLYYLQNGRDMYVDQELDINRLSDYDVDHIVPQSFLKDDSIDNKVLTRSDKARGKSDNVPSEEVVKKMKNYWRQLLNAKLITQRKFDNLTKAERGGLSELDKAGFIKRQLVETRQITKHVAQILDSRMNTKYDENDKLIREVKVITLKSKLVSDFRKDFQFYKVREINNYHHAHDAYLNAVVGTALIKKYPKLESEFVYGDYKVYDVRKMIAKSEQEIGKATAKYFFYSNIMNFFKTEITLANGEIRKRPLIETNGETGEIVWDKGRDFATVRKVLSMPQVNIVKKTEVQTGGFSKESILPKRNSDKLIARKKDWDPKKYGGFDSPTVAYSVLVVAKVEKGKSKKLKSVKELLGITIMERSSFEKNPIDFLEAKGYKEVKKDLIIKLPKYSLFELENGRKRMLASAGELQKGNELALPSKYVNFLYLASHYEKLKGSPEDNEQKQLFVEQHKHYLDEIIEQISEFSKRVILADANLDKVLSAYNKHRDKPIREQAENIIHLFTLTNLGAPAAFKYFDTTIDRKRYTSTKEVLDATLIHQSITGLYETRIDLSQLGGDGGEAAAKEAAAKEAAAKGGTLNIEDEYRLHETSKEPDVPLGSTWLSDFPQAWAETGGMGLAVRQAPLIIPLKATSTPVSIKQYPMSQEARLGIKPHIQRLLDQGILVPCQSPWNTPLLPVKKPGTNDYRPVQDLREVNKRVEDIHPTVPNPYNLLSGLPPSHQWYTVLDLKDAFFCLRLHPTSQPLFAFEWRDPEMGISGQLTWTRLPQGFKNSPTLFNEALHRDLADFRIQHPDLILLQYVDDLLLAATSEQDCQRGTRALLQTLGNLGYRASAKKAQICQKQVKYLGYLLKEGQRWLTEARKETVMGQPTPKTPRQLREFLGTAGFCRLWIPGFAEMAAPLYPLTKPGTLFNWGPDQQKAYQEIKQALLTAPALGLPDLTKPFELFVDEKQGYAKGVLTQKLGPWRRPVAYLSKKLDPVAAGWPPCLRMVAAIAVLTKDAGKLTMGQPLVILAPHAVEALVKQPPDRWLSNARMTHYQAMLLDTDRVQFGPVVALNPATLLPLPEKEAPHDCLEILAETHGTRPDLTDQPIPDADYTWYTDGSSFLQEGQRRAGAAVTTETEVIWARALPAGTSAQRAELIALTQALKMAEGKKLNVYTDSRYAFATAHVHGEIYRRRGWLTSEGREIKNKNEILALLKALFLPKRLSIIHCPGHQKGNSAEARGNRMADQAAREAAMKAVLETSTLLAGKRTADGSEFEKRTADGSEFESPKKKAKVE

SEQ ID NO: 997 - protein, 2088 aa, synthetic construct
MPAAKRVKLDGGDKKYSIGLDIGTNSVGWAVITDEYKVPSKKFKVLGNTDRHSIKKNLIGALLFDSGETAEATRLKRTARRRYTRRKNRICYLQEIFSNEMAKVDDSFFHRLEESFLVEEDKKHERHPIFGNIVDEVAYHEKYPTIYHLRKKLVDSTDKADLRLIYLALAHMIKFRGHFLIEGDLNPDNSDVDKLFIQLVQTYNQLFEENPINASGVDAKAILSARLSKSRRLENLIAQLPGEKKNGLFGNLIALSLGLTPNFKSNFDLAEDAKLQLSKDTYDDDLDNLLAQIGDQYADLFLAAKNLSDAILLSDILRVNTEITKAPLSASMIKRYDEHHQDLTLLKALVRQQLPEKYKEIFFDQSKNGYAGYIDGGASQEEFYKFIKPILEKMDGTEELLVKLNREDLLRKQRTFDNGSIPHQIHLGELHAILRRQEDFYPFLKDNREKIEKILTFRIPYYVGPLARGNSRFAWMTRKSEETITPWNFEEVVDKGASAQSFIERMTNFDKNLPNEKVLPKHSLLYEYFTVYNELTKVKYVTEGMRKPAFLSGEQKKAIVDLLFKTNRKVTVKQLKEDYFKKIECFDSVEISGVEDRFNASLGTYHDLLKIIKDKDFLDNEENEDILEDIVLTLTLFEDREMIEERLKTYAHLFDDKVMKQLKRRRYTGWGRLSRKLINGIRDKQSGKTILDFLKSDGFANRNFMQLIHDDSLTFKEDIQKAQVSGQGDSLHEHIANLAGSPAIKKGILQTVKVVDELVKVMGRHKPENIVIEMARENQTTQKGQKNSRERMKRIEEGIKELGSQILKEHPVENTQLQNEKLYLYYLQNGRDMYVDQELDINRLSDYDVDHIVPQSFLKDDSIDNKVLTRSDKARGKSDNVPSEEVVKKMKNYWRQLLNAKLITQRKFDNLTKAERGGLSELDKAGFIKRQLVETRQITKHVAQILDSRMNTKYDENDKLIREVKVITLKSKLVSDFRKDFQFYKVREINNYHHAHDAYLNAVVGTALIKKYPKLESEFVYGDYKVYDVRKMIAKSEQEIGKATAKYFFYSNIMNFFKTEITLANGEIRKRPLIETNGETGEIVWDKGRDFATVRKVLSMPQVNIVKKTEVQTGGFSKESILPKRNSDKLIARKKDWDPKKYGGFDSPTVAYSVLVVAKVEKGKSKKLKSVKELLGITIMERSSFEKNPIDFLEAKGYKEVKKDLIIKLPKYSLFELENGRKRMLASAGELQKGNELALPSKYVNFLYLASHYEKLKGSPEDNEQKQLFVEQHKHYLDEIIEQISEFSKRVILADANLDKVLSAYNKHRDKPIREQAENIIHLFTLTNLGAPAAFKYFDTTIDRKRYTSTKEVLDATLIHQSITGLYETRIDLSQLGGDGGGGGGGTLNIEDEYRLHETSKEPDVPLGSTWLSDFPQAWAETGGMGLAVRQAPLIIPLKATSTPVSIKQYPMSQEARLGIKPHIQRLLDQGILVPCQSPWNTPLLPVKKPGTNDYRPVQDLREVNKRVEDIHPTVPNPYNLLSGLPPSHQWYTVLDLKDAFFCLRLHPTSQPLFAFEWRDPEMGISGQLTWTRLPQGFKNSPTLFNEALHRDLADFRIQHPDLILLQYVDDLLLAATSEQDCQRGTRALLQTLGNLGYRASAKKAQICQKQVKYLGYLLKEGQRWLTEARKETVMGQPTPKTPRQLREFLGTAGFCRLWIPGFAEMAAPLYPLTKPGTLFNWGPDQQKAYQEIKQALLTAPALGLPDLTKPFELFVDEKQGYAKGVLTQKLGPWRRPVAYLSKKLDPVAAGWPPCLRMVAAIAVLTKDAGKLTMGQPLVILAPHAVEALVKQPPDRWLSNARMTHYQAMLLDTDRVQFGPVVALNPATLLPLPEKEAPHDCLEILAETHGTRPDLTDQPIPDADYTWYTDGSSFLQEGQRRAGAAVTTETEVIWARALPAGTSAQRAELIALTQALKMAEGKKLNVYTDSRYAFATAHVHGEIYRRRGWLTSEGREIKNKNEILALLKALFLPKRLSIIHCPGHQKGNSAEARGNRMADQAAREAAMKAVLETSTLLAGKRTADGSEFEKRTADGSEFESPKKKAKVE

SEQ ID NO: 998 - protein, 2090 aa, synthetic construct
MPAAKRVKLDGGDKKYSIGLDIGTNSVGWAVITDEYKVPSKKFKVLGNTDRHSIKKNLIGALLFDSGETAEATRLKRTARRRYTRRKNRICYLQEIFSNEMAKVDDSFFHRLEESFLVEEDKKHERHPIFGNIVDEVAYHEKYPTIYHLRKKLVDSTDKADLRLIYLALAHMIKFRGHFLIEGDLNPDNSDVDKLFIQLVQTYNQLFEENPINASGVDAKAILSARLSKSRRLENLIAQLPGEKKNGLFGNLIALSLGLTPNFKSNFDLAEDAKLQLSKDTYDDDLDNLLAQIGDQYADLFLAAKNLSDAILLSDILRVNTEITKAPLSASMIKRYDEHHQDLTLLKALVRQQLPEKYKEIFFDQSKNGYAGYIDGGASQEEFYKFIKPILEKMDGTEELLVKLNREDLLRKQRTFDNGSIPHQIHLGELHAILRRQEDFYPFLKDNREKIEKILTFRIPYYVGPLARGNSRFAWMTRKSEETITPWNFEEVVDKGASAQSFIERMTNFDKNLPNEKVLPKHSLLYEYFTVYNELTKVKYVTEGMRKPAFLSGEQKKAIVDLLFKTNRKVTVKQLKEDYFKKIECFDSVEISGVEDRFNASLGTYHDLLKIIKDKDFLDNEENEDILEDIVLTLTLFEDREMIEERLKTYAHLFDDKVMKQLKRRRYTGWGRLSRKLINGIRDKQSGKTILDFLKSDGFANRNFMQLIHDDSLTFKEDIQKAQVSGQGDSLHEHIANLAGSPAIKKGILQTVKVVDELVKVMGRHKPENIVIEMARENQTTQKGQKNSRERMKRIEEGIKELGSQILKEHPVENTQLQNEKLYLYYLQNGRDMYVDQELDINRLSDYDVDHIVPQSFLKDDSIDNKVLTRSDKARGKSDNVPSEEVVKKMKNYWRQLLNAKLITQRKFDNLTKAERGGLSELDKAGFIKRQLVETRQITKHVAQILDSRMNTKYDENDKLIREVKVITLKSKLVSDFRKDFQFYKVREINNYHHAHDAYLNAVVGTALIKKYPKLESEFVYGDYKVYDVRKMIAKSEQEIGKATAKYFFYSNIMNFFKTEITLANGEIRKRPLIETNGETGEIVWDKGRDFATVRKVLSMPQVNIVKKTEVQTGGFSKESILPKRNSDKLIARKKDWDPKKYGGFDSPTVAYSVLVVAKVEKGKSKKLKSVKELLGITIMERSSFEKNPIDFLEAKGYKEVKKDLIIKLPKYSLFELENGRKRMLASAGELQKGNELALPSKYVNFLYLASHYEKLKGSPEDNEQKQLFVEQHKHYLDEIIEQISEFSKRVILADANLDKVLSAYNKHRDKPIREQAENIIHLFTLTNLGAPAAFKYFDTTIDRKRYTSTKEVLDATLIHQSITGLYETRIDLSQLGGDGGGGGGSGGTLNIEDEYRLHETSKEPDVPLGSTWLSDFPQAWAETGGMGLAVRQAPLIIPLKATSTPVSIKQYPMSQEARLGIKPHIQRLLDQGILVPCQSPWNTPLLPVKKPGTNDYRPVQDLREVNKRVEDIHPTVPNPYNLLSGLPPSHQWYTVLDLKDAFFCLRLHPTSQPLFAFEWRDPEMGISGQLTWTRLPQGFKNSPTLFNEALHRDLADFRIQHPDLILLQYVDDLLLAATSEQDCQRGTRALLQTLGNLGYRASAKKAQICQKQVKYLGYLLKEGQRWLTEARKETVMGQPTPKTPRQLREFLGTAGFCRLWIPGFAEMAAPLYPLTKPGTLFNWGPDQQKAYQEIKQALLTAPALGLPDLTKPFELFVDEKQGYAKGVLTQKLGPWRRPVAYLSKKLDPVAAGWPPCLRMVAAIAVLTKDAGKLTMGQPLVILAPHAVEALVKQPPDRWLSNARMTHYQAMLLDTDRVQFGPVVALNPATLLPLPEKEAPHDCLEILAETHGTRPDLTDQPIPDADYTWYTDGSSFLQEGQRRAGAAVTTETEVIWARALPAGTSAQRAELIALTQALKMAEGKKLNVYTDSRYAFATAHVHGEIYRRRGWLTSEGREIKNKNEILALLKALFLPKRLSIIHCPGHQKGNSAEARGNRMADQAAREAAMKAVLETSTLLAGKRTADGSEFEKRTADGSEFESPKKKAKVE

SEQ ID NO: 999 - protein, 2094 aa, synthetic construct
MPAAKRVKLDGGDKKYSIGLDIGTNSVGWAVITDEYKVPSKKFKVLGNTDRHSIKKNLIGALLFDSGETAEATRLKRTARRRYTRRKNRICYLQEIFSNEMAKVDDSFFHRLEESFLVEEDKKHERHPIFGNIVDEVAYHEKYPTIYHLRKKLVDSTDKADLRLIYLALAHMIKFRGHFLIEGDLNPDNSDVDKLFIQLVQTYNQLFEENPINASGVDAKAILSARLSKSRRLENLIAQLPGEKKNGLFGNLIALSLGLTPNFKSNFDLAEDAKLQLSKDTYDDDLDNLLAQIGDQYADLFLAAKNLSDAILLSDILRVNTEITKAPLSASMIKRYDEHHQDLTLLKALVRQQLPEKYKEIFFDQSKNGYAGYIDGGASQEEFYKFIKPILEKMDGTEELLVKLNREDLLRKQRTFDNGSIPHQIHLGELHAILRRQEDFYPFLKDNREKIEKILTFRIPYYVGPLARGNSRFAWMTRKSEETITPWNFEEVVDKGASAQSFIERMTNFDKNLPNEKVLPKHSLLYEYFTVYNELTKVKYVTEGMRKPAFLSGEQKKAIVDLLFKTNRKVTVKQLKEDYFKKIECFDSVEISGVEDRFNASLGTYHDLLKIIKDKDFLDNEENEDILEDIVLTLTLFEDREMIEERLKTYAHLFDDKVMKQLKRRRYTGWGRLSRKLINGIRDKQSGKTILDFLKSDGFANRNFMQLIHDDSLTFKEDIQKAQVSGQGDSLHEHIANLAGSPAIKKGILQTVKVVDELVKVMGRHKPENIVIEMARENQTTQKGQKNSRERMKRIEEGIKELGSQILKEHPVENTQLQNEKLYLYYLQNGRDMYVDQELDINRLSDYDVDHIVPQSFLKDDSIDNKVLTRSDKARGKSDNVPSEEVVKKMKNYWRQLLNAKLITQRKFDNLTKAERGGLSELDKAGFIKRQLVETRQITKHVAQILDSRMNTKYDENDKLIREVKVITLKSKLVSDFRKDFQFYKVREINNYHHAHDAYLNAVVGTALIKKYPKLESEFVYGDYKVYDVRKMIAKSEQEIGKATAKYFFYSNIMNFFKTEITLANGEIRKRPLIETNGETGEIVWDKGRDFATVRKVLSMPQVNIVKKTEVQTGGFSKESILPKRNSDKLIARKKDWDPKKYGGFDSPTVAYSVLVVAKVEKGKSKKLKSVKELLGITIMERSSFEKNPIDFLEAKGYKEVKKDLIIKLPKYSLFELENGRKRMLASAGELQKGNELALPSKYVNFLYLASHYEKLKGSPEDNEQKQLFVEQHKHYLDEIIEQISEFSKRVILADANLDKVLSAYNKHRDKPIREQAENIIHLFTLTNLGAPAAFKYFDTTIDRKRYTSTKEVLDATLIHQSITGLYETRIDLSQLGGDGGGGGGGSPAPGGTLNIEDEYRLHETSKEPDVPLGSTWLSDFPQAWAETGGMGLAVRQAPLIIPLKATSTPVSIKQYPMSQEARLGIKPHIQRLLDQGILVPCQSPWNTPLLPVKKPGTNDYRPVQDLREVNKRVEDIHPTVPNPYNLLSGLPPSHQWYTVLDLKDAFFCLRLHPTSQPLFAFEWRDPEMGISGQLTWTRLPQGFKNSPTLFNEALHRDLADFRIQHPDLILLQYVDDLLLAATSEQDCQRGTRALLQTLGNLGYRASAKKAQICQKQVKYLGYLLKEGQRWLTEARKETVMGQPTPKTPRQLREFLGTAGFCRLWIPGFAEMAAPLYPLTKPGTLFNWGPDQQKAYQEIKQALLTAPALGLPDLTKPFELFVDEKQGYAKGVLTQKLGPWRRPVAYLSKKLDPVAAGWPPCLRMVAAIAVLTKDAGKLTMGQPLVILAPHAVEALVKQPPDRWLSNARMTHYQAMLLDTDRVQFGPVVALNPATLLPLPEKEAPHDCLEILAETHGTRPDLTDQPIPDADYTWYTDGSSFLQEGQRRAGAAVTTETEVIWARALPAGTSAQRAELIALTQALKMAEGKKLNVYTDSRYAFATAHVHGEIYRRRGWLTSEGREIKNKNEILALLKALFLPKRLSIIHCPGHQKGNSAEARGNRMADQAAREAAMKAVLETSTLLAGKRTADGSEFEKRTADGSEFESPKKKAKVE

SEQ ID NO: 1000 - protein, 2094 aa, synthetic construct
MPAAKRVKLDGGDKKYSIGLDIGTNSVGWAVITDEYKVPSKKFKVLGNTDRHSIKKNLIGALLFDSGETAEATRLKRTARRRYTRRKNRICYLQEIFSNEMAKVDDSFFHRLEESFLVEEDKKHERHPIFGNIVDEVAYHEKYPTIYHLRKKLVDSTDKADLRLIYLALAHMIKFRGHFLIEGDLNPDNSDVDKLFIQLVQTYNQLFEENPINASGVDAKAILSARLSKSRRLENLIAQLPGEKKNGLFGNLIALSLGLTPNFKSNFDLAEDAKLQLSKDTYDDDLDNLLAQIGDQYADLFLAAKNLSDAILLSDILRVNTEITKAPLSASMIKRYDEHHQDLTLLKALVRQQLPEKYKEIFFDQSKNGYAGYIDGGASQEEFYKFIKPILEKMDGTEELLVKLNREDLLRKQRTFDNGSIPHQIHLGELHAILRRQEDFYPFLKDNREKIEKILTFRIPYYVGPLARGNSRFAWMTRKSEETITPWNFEEVVDKGASAQSFIERMTNFDKNLPNEKVLPKHSLLYEYFTVYNELTKVKYVTEGMRKPAFLSGEQKKAIVDLLFKTNRKVTVKQLKEDYFKKIECFDSVEISGVEDRFNASLGTYHDLLKIIKDKDFLDNEENEDILEDIVLTLTLFEDREMIEERLKTYAHLFDDKVMKQLKRRRYTGWGRLSRKLINGIRDKQSGKTILDFLKSDGFANRNFMQLIHDDSLTFKEDIQKAQVSGQGDSLHEHIANLAGSPAIKKGILQTVKVVDELVKVMGRHKPENIVIEMARENQTTQKGQKNSRERMKRIEEGIKELGSQILKEHPVENTQLQNEKLYLYYLQNGRDMYVDQELDINRLSDYDVDHIVPQSFLKDDSIDNKVLTRSDKARGKSDNVPSEEVVKKMKNYWRQLLNAKLITQRKFDNLTKAERGGLSELDKAGFIKRQLVETRQITKHVAQILDSRMNTKYDENDKLIREVKVITLKSKLVSDFRKDFQFYKVREINNYHHAHDAYLNAVVGTALIKKYPKLESEFVYGDYKVYDVRKMIAKSEQEIGKATAKYFFYSNIMNFFKTEITLANGEIRKRPLIETNGETGEIVWDKGRDFATVRKVLSMPQVNIVKKTEVQTGGFSKESILPKRNSDKLIARKKDWDPKKYGGFDSPTVAYSVLVVAKVEKGKSKKLKSVKELLGITIMERSSFEKNPIDFLEAKGYKEVKKDLIIKLPKYSLFELENGRKRMLASAGELQKGNELALPSKYVNFLYLASHYEKLKGSPEDNEQKQLFVEQHKHYLDEIIEQISEFSKRVILADANLDKVLSAYNKHRDKPIREQAENIIHLFTLTNLGAPAAFKYFDTTIDRKRYTSTKEVLDATLIHQSITGLYETRIDLSQLGGDGGGSSPAPGGGGGTLNIEDEYRLHETSKEPDVPLGSTWLSDFPQAWAETGGMGLAVRQAPLIIPLKATSTPVSIKQYPMSQEARLGIKPHIQRLLDQGILVPCQSPWNTPLLPVKKPGTNDYRPVQDLREVNKRVEDIHPTVPNPYNLLSGLPPSHQWYTVLDLKDAFFCLRLHPTSQPLFAFEWRDPEMGISGQLTWTRLPQGFKNSPTLFNEALHRDLADFRIQHPDLILLQYVDDLLLAATSEQDCQRGTRALLQTLGNLGYRASAKKAQICQKQVKYLGYLLKEGQRWLTEARKETVMGQPTPKTPRQLREFLGTAGFCRLWIPGFAEMAAPLYPLTKPGTLFNWGPDQQKAYQEIKQALLTAPALGLPDLTKPFELFVDEKQGYAKGVLTQKLGPWRRPVAYLSKKLDPVAAGWPPCLRMVAAIAVLTKDAGKLTMGQPLVILAPHAVEALVKQPPDRWLSNARMTHYQAMLLDTDRVQFGPVVALNPATLLPLPEKEAPHDCLEILAETHGTRPDLTDQPIPDADYTWYTDGSSFLQEGQRRAGAAVTTETEVIWARALPAGTSAQRAELIALTQALKMAEGKKLNVYTDSRYAFATAHVHGEIYRRRGWLTSEGREIKNKNEILALLKALFLPKRLSIIHCPGHQKGNSAEARGNRMADQAAREAAMKAVLETSTLLAGKRTADGSEFEKRTADGSEFESPKKKAKVE

SEQ ID NO: 1001 - protein, 2094 aa, synthetic construct
MPAAKRVKLDGGDKKYSIGLDIGTNSVGWAVITDEYKVPSKKFKVLGNTDRHSIKKNLIGALLFDSGETAEATRLKRTARRRYTRRKNRICYLQEIFSNEMAKVDDSFFHRLEESFLVEEDKKHERHPIFGNIVDEVAYHEKYPTIYHLRKKLVDSTDKADLRLIYLALAHMIKFRGHFLIEGDLNPDNSDVDKLFIQLVQTYNQLFEENPINASGVDAKAILSARLSKSRRLENLIAQLPGEKKNGLFGNLIALSLGLTPNFKSNFDLAEDAKLQLSKDTYDDDLDNLLAQIGDQYADLFLAAKNLSDAILLSDILRVNTEITKAPLSASMIKRYDEHHQDLTLLKALVRQQLPEKYKEIFFDQSKNGYAGYIDGGASQEEFYKFIKPILEKMDGTEELLVKLNREDLLRKQRTFDNGSIPHQIHLGELHAILRRQEDFYPFLKDNREKIEKILTFRIPYYVGPLARGNSRFAWMTRKSEETITPWNFEEVVDKGASAQSFIERMTNFDKNLPNEKVLPKHSLLYEYFTVYNELTKVKYVTEGMRKPAFLSGEQKKAIVDLLFKTNRKVTVKQLKEDYFKKIECFDSVEISGVEDRFNASLGTYHDLLKIIKDKDFLDNEENEDILEDIVLTLTLFEDREMIEERLKTYAHLFDDKVMKQLKRRRYTGWGRLSRKLINGIRDKQSGKTILDFLKSDGFANRNFMQLIHDDSLTFKEDIQKAQVSGQGDSLHEHIANLAGSPAIKKGILQTVKVVDELVKVMGRHKPENIVIEMARENQTTQKGQKNSRERMKRIEEGIKELGSQILKEHPVENTQLQNEKLYLYYLQNGRDMYVDQELDINRLSDYDVDHIVPQSFLKDDSIDNKVLTRSDKARGKSDNVPSEEVVKKMKNYWRQLLNAKLITQRKFDNLTKAERGGLSELDKAGFIKRQLVETRQITKHVAQILDSRMNTKYDENDKLIREVKVITLKSKLVSDFRKDFQFYKVREINNYHHAHDAYLNAVVGTALIKKYPKLESEFVYGDYKVYDVRKMIAKSEQEIGKATAKYFFYSNIMNFFKTEITLANGEIRKRPLIETNGETGEIVWDKGRDFATVRKVLSMPQVNIVKKTEVQTGGFSKESILPKRNSDKLIARKKDWDPKKYGGFDSPTVAYSVLVVAKVEKGKSKKLKSVKELLGITIMERSSFEKNPIDFLEAKGYKEVKKDLIIKLPKYSLFELENGRKRMLASAGELQKGNELALPSKYVNFLYLASHYEKLKGSPEDNEQKQLFVEQHKHYLDEIIEQISEFSKRVILADANLDKVLSAYNKHRDKPIREQAENIIHLFTLTNLGAPAAFKYFDTTIDRKRYTSTKEVLDATLIHQSITGLYETRIDLSQLGGDGGGGSPAPGGGGGTLNIEDEYRLHETSKEPDVPLGSTWLSDFPQAWAETGGMGLAVRQAPLIIPLKATSTPVSIKQYPMSQEARLGIKPHIQRLLDQGILVPCQSPWNTPLLPVKKPGTNDYRPVQDLREVNKRVEDIHPTVPNPYNLLSGLPPSHQWYTVLDLKDAFFCLRLHPTSQPLFAFEWRDPEMGISGQLTWTRLPQGFKNSPTLFNEALHRDLADFRIQHPDLILLQYVDDLLLAATSEQDCQRGTRALLQTLGNLGYRASAKKAQICQKQVKYLGYLLKEGQRWLTEARKETVMGQPTPKTPRQLREFLGTAGFCRLWIPGFAEMAAPLYPLTKPGTLFNWGPDQQKAYQEIKQALLTAPALGLPDLTKPFELFVDEKQGYAKGVLTQKLGPWRRPVAYLSKKLDPVAAGWPPCLRMVAAIAVLTKDAGKLTMGQPLVILAPHAVEALVKQPPDRWLSNARMTHYQAMLLDTDRVQFGPVVALNPATLLPLPEKEAPHDCLEILAETHGTRPDLTDQPIPDADYTWYTDGSSFLQEGQRRAGAAVTTETEVIWARALPAGTSAQRAELIALTQALKMAEGKKLNVYTDSRYAFATAHVHGEIYRRRGWLTSEGREIKNKNEILALLKALFLPKRLSIIHCPGHQKGNSAEARGNRMADQAAREAAMKAVLETSTLLAGKRTADGSEFEKRTADGSEFESPKKKAKVE

SEQ ID NO: 1002 - protein, 2095 aa, synthetic construct
MPAAKRVKLDGGDKKYSIGLDIGTNSVGWAVITDEYKVPSKKFKVLGNTDRHSIKKNLIGALLFDSGETAEATRLKRTARRRYTRRKNRICYLQEIFSNEMAKVDDSFFHRLEESFLVEEDKKHERHPIFGNIVDEVAYHEKYPTIYHLRKKLVDSTDKADLRLIYLALAHMIKFRGHFLIEGDLNPDNSDVDKLFIQLVQTYNQLFEENPINASGVDAKAILSARLSKSRRLENLIAQLPGEKKNGLFGNLIALSLGLTPNFKSNFDLAEDAKLQLSKDTYDDDLDNLLAQIGDQYADLFLAAKNLSDAILLSDILRVNTEITKAPLSASMIKRYDEHHQDLTLLKALVRQQLPEKYKEIFFDQSKNGYAGYIDGGASQEEFYKFIKPILEKMDGTEELLVKLNREDLLRKQRTFDNGSIPHQIHLGELHAILRRQEDFYPFLKDNREKIEKILTFRIPYYVGPLARGNSRFAWMTRKSEETITPWNFEEVVDKGASAQSFIERMTNFDKNLPNEKVLPKHSLLYEYFTVYNELTKVKYVTEGMRKPAFLSGEQKKAIVDLLFKTNRKVTVKQLKEDYFKKIECFDSVEISGVEDRFNASLGTYHDLLKIIKDKDFLDNEENEDILEDIVLTLTLFEDREMIEERLKTYAHLFDDKVMKQLKRRRYTGWGRLSRKLINGIRDKQSGKTILDFLKSDGFANRNFMQLIHDDSLTFKEDIQKAQVSGQGDSLHEHIANLAGSPAIKKGILQTVKVVDELVKVMGRHKPENIVIEMARENQTTQKGQKNSRERMKRIEEGIKELGSQILKEHPVENTQLQNEKLYLYYLQNGRDMYVDQELDINRLSDYDVDHIVPQSFLKDDSIDNKVLTRSDKARGKSDNVPSEEVVKKMKNYWRQLLNAKLITQRKFDNLTKAERGGLSELDKAGFIKRQLVETRQITKHVAQILDSRMNTKYDENDKLIREVKVITLKSKLVSDFRKDFQFYKVREINNYHHAHDAYLNAVVGTALIKKYPKLESEFVYGDYKVYDVRKMIAKSEQEIGKATAKYFFYSNIMNFFKTEITLANGEIRKRPLIETNGETGEIVWDKGRDFATVRKVLSMPQVNIVKKTEVQTGGFSKESILPKRNSDKLIARKKDWDPKKYGGFDSPTVAYSVLVVAKVEKGKSKKLKSVKELLGITIMERSSFEKNPIDFLEAKGYKEVKKDLIIKLPKYSLFELENGRKRMLASAGELQKGNELALPSKYVNFLYLASHYEKLKGSPEDNEQKQLFVEQHKHYLDEIIEQISEFSKRVILADANLDKVLSAYNKHRDKPIREQAENIIHLFTLTNLGAPAAFKYFDTTIDRKRYTSTKEVLDATLIHQSITGLYETRIDLSQLGGDGGGGGGSGGGGSGGTLNIEDEYRLHETSKEPDVPLGSTWLSDFPQAWAETGGMGLAVRQAPLIIPLKATSTPVSIKQYPMSQEARLGIKPHIQRLLDQGILVPCQSPWNTPLLPVKKPGTNDYRPVQDLREVNKRVEDIHPTVPNPYNLLSGLPPSHQWYTVLDLKDAFFCLRLHPTSQPLFAFEWRDPEMGISGQLTWTRLPQGFKNSPTLFNEALHRDLADFRIQHPDLILLQYVDDLLLAATSEQDCQRGTRALLQTLGNLGYRASAKKAQICQKQVKYLGYLLKEGQRWLTEARKETVMGQPTPKTPRQLREFLGTAGFCRLWIPGFAEMAAPLYPLTKPGTLFNWGPDQQKAYQEIKQALLTAPALGLPDLTKPFELFVDEKQGYAKGVLTQKLGPWRRPVAYLSKKLDPVAAGWPPCLRMVAAIAVLTKDAGKLTMGQPLVILAPHAVEALVKQPPDRWLSNARMTHYQAMLLDTDRVQFGPVVALNPATLLPLPEKEAPHDCLEILAETHGTRPDLTDQPIPDADYTWYTDGSSFLQEGQRRAGAAVTTETEVIWARALPAGTSAQRAELIALTQALKMAEGKKLNVYTDSRYAFATAHVHGEIYRRRGWLTSEGREIKNKNEILALLKALFLPKRLSIIHCPGHQKGNSAEARGNRMADQAAREAAMKAVLETSTLLAGKRTADGSEFEKRTADGSEFESPKKKAKVE

SEQ ID NO: 1003 - protein, 2088 aa, synthetic construct
MPAAKRVKLDGGDKKYSIGLDIGTNSVGWAVITDEYKVPSKKFKVLGNTDRHSIKKNLIGALLFDSGETAEATRLKRTARRRYTRRKNRICYLQEIFSNEMAKVDDSFFHRLEESFLVEEDKKHERHPIFGNIVDEVAYHEKYPTIYHLRKKLVDSTDKADLRLIYLALAHMIKFRGHFLIEGDLNPDNSDVDKLFIQLVQTYNQLFEENPINASGVDAKAILSARLSKSRRLENLIAQLPGEKKNGLFGNLIALSLGLTPNFKSNFDLAEDAKLQLSKDTYDDDLDNLLAQIGDQYADLFLAAKNLSDAILLSDILRVNTEITKAPLSASMIKRYDEHHQDLTLLKALVRQQLPEKYKEIFFDQSKNGYAGYIDGGASQEEFYKFIKPILEKMDGTEELLVKLNREDLLRKQRTFDNGSIPHQIHLGELHAILRRQEDFYPFLKDNREKIEKILTFRIPYYVGPLARGNSRFAWMTRKSEETITPWNFEEVVDKGASAQSFIERMTNFDKNLPNEKVLPKHSLLYEYFTVYNELTKVKYVTEGMRKPAFLSGEQKKAIVDLLFKTNRKVTVKQLKEDYFKKIECFDSVEISGVEDRFNASLGTYHDLLKIIKDKDFLDNEENEDILEDIVLTLTLFEDREMIEERLKTYAHLFDDKVMKQLKRRRYTGWGRLSRKLINGIRDKQSGKTILDFLKSDGFANRNFMQLIHDDSLTFKEDIQKAQVSGQGDSLHEHIANLAGSPAIKKGILQTVKVVDELVKVMGRHKPENIVIEMARENQTTQKGQKNSRERMKRIEEGIKELGSQILKEHPVENTQLQNEKLYLYYLQNGRDMYVDQELDINRLSDYDVDHIVPQSFLKDDSIDNKVLTRSDKARGKSDNVPSEEVVKKMKNYWRQLLNAKLITQRKFDNLTKAERGGLSELDKAGFIKRQLVETRQITKHVAQILDSRMNTKYDENDKLIREVKVITLKSKLVSDFRKDFQFYKVREINNYHHAHDAYLNAVVGTALIKKYPKLESEFVYGDYKVYDVRKMIAKSEQEIGKATAKYFFYSNIMNFFKTEITLANGEIRKRPLIETNGETGEIVWDKGRDFATVRKVLSMPQVNIVKKTEVQTGGFSKESILPKRNSDKLIARKKDWDPKKYGGFDSPTVAYSVLVVAKVEKGKSKKLKSVKELLGITIMERSSFEKNPIDFLEAKGYKEVKKDLIIKLPKYSLFELENGRKRMLASAGELQKGNELALPSKYVNFLYLASHYEKLKGSPEDNEQKQLFVEQHKHYLDEIIEQISEFSKRVILADANLDKVLSAYNKHRDKPIREQAENIIHLFTLTNLGAPAAFKYFDTTIDRKRYTSTKEVLDATLIHQSITGLYETRIDLSQLGGDGGGGSGGTLNIEDEYRLHETSKEPDVPLGSTWLSDFPQAWAETGGMGLAVRQAPLIIPLKATSTPVSIKQYPMSQEARLGIKPHIQRLLDQGILVPCQSPWNTPLLPVKKPGTNDYRPVQDLREVNKRVEDIHPTVPNPYNLLSGLPPSHQWYTVLDLKDAFFCLRLHPTSQPLFAFEWRDPEMGISGQLTWTRLPQGFKNSPTLFNEALHRDLADFRIQHPDLILLQYVDDLLLAATSEQDCQRGTRALLQTLGNLGYRASAKKAQICQKQVKYLGYLLKEGQRWLTEARKETVMGQPTPKTPRQLREFLGTAGFCRLWIPGFAEMAAPLYPLTKPGTLFNWGPDQQKAYQEIKQALLTAPALGLPDLTKPFELFVDEKQGYAKGVLTQKLGPWRRPVAYLSKKLDPVAAGWPPCLRMVAAIAVLTKDAGKLTMGQPLVILAPHAVEALVKQPPDRWLSNARMTHYQAMLLDTDRVQFGPVVALNPATLLPLPEKEAPHDCLEILAETHGTRPDLTDQPIPDADYTWYTDGSSFLQEGQRRAGAAVTTETEVIWARALPAGTSAQRAELIALTQALKMAEGKKLNVYTDSRYAFATAHVHGEIYRRRGWLTSEGREIKNKNEILALLKALFLPKRLSIIHCPGHQKGNSAEARGNRMADQAAREAAMKAVLETSTLLAGKRTADGSEFEKRTADGSEFESPKKKAKVE

SEQ ID NO: 1004 - protein, 2094 aa, synthetic construct
MPAAKRVKLDGGDKKYSIGLDIGTNSVGWAVITDEYKVPSKKFKVLGNTDRHSIKKNLIGALLFDSGETAEATRLKRTARRRYTRRKNRICYLQEIFSNEMAKVDDSFFHRLEESFLVEEDKKHERHPIFGNIVDEVAYHEKYPTIYHLRKKLVDSTDKADLRLIYLALAHMIKFRGHFLIEGDLNPDNSDVDKLFIQLVQTYNQLFEENPINASGVDAKAILSARLSKSRRLENLIAQLPGEKKNGLFGNLIALSLGLTPNFKSNFDLAEDAKLQLSKDTYDDDLDNLLAQIGDQYADLFLAAKNLSDAILLSDILRVNTEITKAPLSASMIKRYDEHHQDLTLLKALVRQQLPEKYKEIFFDQSKNGYAGYIDGGASQEEFYKFIKPILEKMDGTEELLVKLNREDLLRKQRTFDNGSIPHQIHLGELHAILRRQEDFYPFLKDNREKIEKILTFRIPYYVGPLARGNSRFAWMTRKSEETITPWNFEEVVDKGASAQSFIERMTNFDKNLPNEKVLPKHSLLYEYFTVYNELTKVKYVTEGMRKPAFLSGEQKKAIVDLLFKTNRKVTVKQLKEDYFKKIECFDSVEISGVEDRFNASLGTYHDLLKIIKDKDFLDNEENEDILEDIVLTLTLFEDREMIEERLKTYAHLFDDKVMKQLKRRRYTGWGRLSRKLINGIRDKQSGKTILDFLKSDGFANRNFMQLIHDDSLTFKEDIQKAQVSGQGDSLHEHIANLAGSPAIKKGILQTVKVVDELVKVMGRHKPENIVIEMARENQTTQKGQKNSRERMKRIEEGIKELGSQILKEHPVENTQLQNEKLYLYYLQNGRDMYVDQELDINRLSDYDVDHIVPQSFLKDDSIDNKVLTRSDKARGKSDNVPSEEVVKKMKNYWRQLLNAKLITQRKFDNLTKAERGGLSELDKAGFIKRQLVETRQITKHVAQILDSRMNTKYDENDKLIREVKVITLKSKLVSDFRKDFQFYKVREINNYHHAHDAYLNAVVGTALIKKYPKLESEFVYGDYKVYDVRKMIAKSEQEIGKATAKYFFYSNIMNFFKTEITLANGEIRKRPLIETNGETGEIVWDKGRDFATVRKVLSMPQVNIVKKTEVQTGGFSKESILPKRNSDKLIARKKDWDPKKYGGFDSPTVAYSVLVVAKVEKGKSKKLKSVKELLGITIMERSSFEKNPIDFLEAKGYKEVKKDLIIKLPKYSLFELENGRKRMLASAGELQKGNELALPSKYVNFLYLASHYEKLKGSPEDNEQKQLFVEQHKHYLDEIIEQISEFSKRVILADANLDKVLSAYNKHRDKPIREQAENIIHLFTLTNLGAPAAFKYFDTTIDRKRYTSTKEVLDATLIHQSITGLYETRIDLSQLGGDGGGSSGGSGGGGGTLNIEDEYRLHETSKEPDVPLGSTWLSDFPQAWAETGGMGLAVRQAPLIIPLKATSTPVSIKQYPMSQEARLGIKPHIQRLLDQGILVPCQSPWNTPLLPVKKPGTNDYRPVQDLREVNKRVEDIHPTVPNPYNLLSGLPPSHQWYTVLDLKDAFFCLRLHPTSQPLFAFEWRDPEMGISGQLTWTRLPQGFKNSPTLFNEALHRDLADFRIQHPDLILLQYVDDLLLAATSEQDCQRGTRALLQTLGNLGYRASAKKAQICQKQVKYLGYLLKEGQRWLTEARKETVMGQPTPKTPRQLREFLGTAGFCRLWIPGFAEMAAPLYPLTKPGTLFNWGPDQQKAYQEIKQALLTAPALGLPDLTKPFELFVDEKQGYAKGVLTQKLGPWRRPVAYLSKKLDPVAAGWPPCLRMVAAIAVLTKDAGKLTMGQPLVILAPHAVEALVKQPPDRWLSNARMTHYQAMLLDTDRVQFGPVVALNPATLLPLPEKEAPHDCLEILAETHGTRPDLTDQPIPDADYTWYTDGSSFLQEGQRRAGAAVTTETEVIWARALPAGTSAQRAELIALTQALKMAEGKKLNVYTDSRYAFATAHVHGEIYRRRGWLTSEGREIKNKNEILALLKALFLPKRLSIIHCPGHQKGNSAEARGNRMADQAAREAAMKAVLETSTLLAGKRTADGSEFEKRTADGSEFESPKKKAKVE

SEQ ID NO: 1005 - protein, 2096 aa, synthetic construct
MPAAKRVKLDGGDKKYSIGLDIGTNSVGWAVITDEYKVPSKKFKVLGNTDRHSIKKNLIGALLFDSGETAEATRLKRTARRRYTRRKNRICYLQEIFSNEMAKVDDSFFHRLEESFLVEEDKKHERHPIFGNIVDEVAYHEKYPTIYHLRKKLVDSTDKADLRLIYLALAHMIKFRGHFLIEGDLNPDNSDVDKLFIQLVQTYNQLFEENPINASGVDAKAILSARLSKSRRLENLIAQLPGEKKNGLFGNLIALSLGLTPNFKSNFDLAEDAKLQLSKDTYDDDLDNLLAQIGDQYADLFLAAKNLSDAILLSDILRVNTEITKAPLSASMIKRYDEHHQDLTLLKALVRQQLPEKYKEIFFDQSKNGYAGYIDGGASQEEFYKFIKPILEKMDGTEELLVKLNREDLLRKQRTFDNGSIPHQIHLGELHAILRRQEDFYPFLKDNREKIEKILTFRIPYYVGPLARGNSRFAWMTRKSEETITPWNFEEVVDKGASAQSFIERMTNFDKNLPNEKVLPKHSLLYEYFTVYNELTKVKYVTEGMRKPAFLSGEQKKAIVDLLFKTNRKVTVKQLKEDYFKKIECFDSVEISGVEDRFNASLGTYHDLLKIIKDKDFLDNEENEDILEDIVLTLTLFEDREMIEERLKTYAHLFDDKVMKQLKRRRYTGWGRLSRKLINGIRDKQSGKTILDFLKSDGFANRNFMQLIHDDSLTFKEDIQKAQVSGQGDSLHEHIANLAGSPAIKKGILQTVKVVDELVKVMGRHKPENIVIEMARENQTTQKGQKNSRERMKRIEEGIKELGSQILKEHPVENTQLQNEKLYLYYLQNGRDMYVDQELDINRLSDYDVDHIVPQSFLKDDSIDNKVLTRSDKARGKSDNVPSEEVVKKMKNYWRQLLNAKLITQRKFDNLTKAERGGLSELDKAGFIKRQLVETRQITKHVAQILDSRMNTKYDENDKLIREVKVITLKSKLVSDFRKDFQFYKVREINNYHHAHDAYLNAVVGTALIKKYPKLESEFVYGDYKVYDVRKMIAKSEQEIGKATAKYFFYSNIMNFFKTEITLANGEIRKRPLIETNGETGEIVWDKGRDFATVRKVLSMPQVNIVKKTEVQTGGFSKESILPKRNSDKLIARKKDWDPKKYGGFDSPTVAYSVLVVAKVEKGKSKKLKSVKELLGITIMERSSFEKNPIDFLEAKGYKEVKKDLIIKLPKYSLFELENGRKRMLASAGELQKGNELALPSKYVNFLYLASHYEKLKGSPEDNEQKQLFVEQHKHYLDEIIEQISEFSKRVILADANLDKVLSAYNKHRDKPIREQAENIIHLFTLTNLGAPAAFKYFDTTIDRKRYTSTKEVLDATLIHQSITGLYETRIDLSQLGGDGGGGSGSSEAAAKGGTLNIEDEYRLHETSKEPDVPLGSTWLSDFPQAWAETGGMGLAVRQAPLIIPLKATSTPVSIKQYPMSQEARLGIKPHIQRLLDQGILVPCQSPWNTPLLPVKKPGTNDYRPVQDLREVNKRVEDIHPTVPNPYNLLSGLPPSHQWYTVLDLKDAFFCLRLHPTSQPLFAFEWRDPEMGISGQLTWTRLPQGFKNSPTLFNEALHRDLADFRIQHPDLILLQYVDDLLLAATSEQDCQRGTRALLQTLGNLGYRASAKKAQICQKQVKYLGYLLKEGQRWLTEARKETVMGQPTPKTPRQLREFLGTAGFCRLWIPGFAEMAAPLYPLTKPGTLFNWGPDQQKAYQEIKQALLTAPALGLPDLTKPFELFVDEKQGYAKGVLTQKLGPWRRPVAYLSKKLDPVAAGWPPCLRMVAAIAVLTKDAGKLTMGQPLVILAPHAVEALVKQPPDRWLSNARMTHYQAMLLDTDRVQFGPVVALNPATLLPLPEKEAPHDCLEILAETHGTRPDLTDQPIPDADYTWYTDGSSFLQEGQRRAGAAVTTETEVIWARALPAGTSAQRAELIALTQALKMAEGKKLNVYTDSRYAFATAHVHGEIYRRRGWLTSEGREIKNKNEILALLKALFLPKRLSIIHCPGHQKGNSAEARGNRMADQAAREAAMKAVLETSTLLAGKRTADGSEFEKRTADGSEFESPKKKAKVE

SEQ ID NO: 1006 - protein, 2131 aa, synthetic construct
MPAAKRVKLDGGDKKYSIGLDIGTNSVGWAVITDEYKVPSKKFKVLGNTDRHSIKKNLIGALLFDSGETAEATRLKRTARRRYTRRKNRICYLQEIFSNEMAKVDDSFFHRLEESFLVEEDKKHERHPIFGNIVDEVAYHEKYPTIYHLRKKLVDSTDKADLRLIYLALAHMIKFRGHFLIEGDLNPDNSDVDKLFIQLVQTYNQLFEENPINASGVDAKAILSARLSKSRRLENLIAQLPGEKKNGLFGNLIALSLGLTPNFKSNFDLAEDAKLQLSKDTYDDDLDNLLAQIGDQYADLFLAAKNLSDAILLSDILRVNTEITKAPLSASMIKRYDEHHQDLTLLKALVRQQLPEKYKEIFFDQSKNGYAGYIDGGASQEEFYKFIKPILEKMDGTEELLVKLNREDLLRKQRTFDNGSIPHQIHLGELHAILRRQEDFYPFLKDNREKIEKILTFRIPYYVGPLARGNSRFAWMTRKSEETITPWNFEEVVDKGASAQSFIERMTNFDKNLPNEKVLPKHSLLYEYFTVYNELTKVKYVTEGMRKPAFLSGEQKKAIVDLLFKTNRKVTVKQLKEDYFKKIECFDSVEISGVEDRFNASLGTYHDLLKIIKDKDFLDNEENEDILEDIVLTLTLFEDREMIEERLKTYAHLFDDKVMKQLKRRRYTGWGRLSRKLINGIRDKQSGKTILDFLKSDGFANRNFMQLIHDDSLTFKEDIQKAQVSGQGDSLHEHIANLAGSPAIKKGILQTVKVVDELVKVMGRHKPENIVIEMARENQTTQKGQKNSRERMKRIEEGIKELGSQILKEHPVENTQLQNEKLYLYYLQNGRDMYVDQELDINRLSDYDVDHIVPQSFLKDDSIDNKVLTRSDKARGKSDNVPSEEVVKKMKNYWRQLLNAKLITQRKFDNLTKAERGGLSELDKAGFIKRQLVETRQITKHVAQILDSRMNTKYDENDKLIREVKVITLKSKLVSDFRKDFQFYKVREINNYHHAHDAYLNAVVGTALIKKYPKLESEFVYGDYKVYDVRKMIAKSEQEIGKATAKYFFYSNIMNFFKTEITLANGEIRKRPLIETNGETGEIVWDKGRDFATVRKVLSMPQVNIVKKTEVQTGGFSKESILPKRNSDKLIARKKDWDPKKYGGFDSPTVAYSVLVVAKVEKGKSKKLKSVKELLGITIMERSSFEKNPIDFLEAKGYKEVKKDLIIKLPKYSLFELENGRKRMLASAGELQKGNELALPSKYVNFLYLASHYEKLKGSPEDNEQKQLFVEQHKHYLDEIIEQISEFSKRVILADANLDKVLSAYNKHRDKPIREQAENIIHLFTLTNLGAPAAFKYFDTTIDRKRYTSTKEVLDATLIHQSITGLYETRIDLSQLGGDGGAEAAAKEAAAKEAAAKEAAAKALEAEAAAKEAAAKEAAAKEAAAKAGGTLNIEDEYRLHETSKEPDVPLGSTWLSDFPQAWAETGGMGLAVRQAPLIIPLKATSTPVSIKQYPMSQEARLGIKPHIQRLLDQGILVPCQSPWNTPLLPVKKPGTNDYRPVQDLREVNKRVEDIHPTVPNPYNLLSGLPPSHQWYTVLDLKDAFFCLRLHPTSQPLFAFEWRDPEMGISGQLTWTRLPQGFKNSPTLFNEALHRDLADFRIQHPDLILLQYVDDLLLAATSEQDCQRGTRALLQTLGNLGYRASAKKAQICQKQVKYLGYLLKEGQRWLTEARKETVMGQPTPKTPRQLREFLGKAGFCRLFIPGFAEMAAPLYPLTKPGTLFNWGPDQQKAYQEIKQALLTAPALGLPDLTKPFELFVDEKQGYAKGVLTQKLGPWRRPVAYLSKKLDPVAAGWPPCLRMVAAIAVLTKDAGKLTMGQPLVILAPHAVEALVKQPPDRWLSNARMTHYQAMLLDTDRVQFGPVVALNPATLLPLPEKEAPHDCLEILAETHGTRPDLTDQPIPDADYTWYTDGSSFLQEGQRRAGAAVTTETEVIWARALPAGTSAQRAELIALTQALKMAEGKKLNVYTDSRYAFATAHVHGEIYRRRGWLTSEGREIKNKNEILALLKALFLPKRLSIIHCPGHQKGNSAEARGNRMADQAAREAAMKAVLETSTLLAGKRTADGSEFEKRTADGSEFESPKKKAKVE

SEQ ID NO: 1007 - protein, 2096 aa, synthetic construct
MPAAKRVKLDGGDKKYSIGLDIGTNSVGWAVITDEYKVPSKKFKVLGNTDRHSIKKNLIGALLFDSGETAEATRLKRTARRRYTRRKNRICYLQEIFSNEMAKVDDSFFHRLEESFLVEEDKKHERHPIFGNIVDEVAYHEKYPTIYHLRKKLVDSTDKADLRLIYLALAHMIKFRGHFLIEGDLNPDNSDVDKLFIQLVQTYNQLFEENPINASGVDAKAILSARLSKSRRLENLIAQLPGEKKNGLFGNLIALSLGLTPNFKSNFDLAEDAKLQLSKDTYDDDLDNLLAQIGDQYADLFLAAKNLSDAILLSDILRVNTEITKAPLSASMIKRYDEHHQDLTLLKALVRQQLPEKYKEIFFDQSKNGYAGYIDGGASQEEFYKFIKPILEKMDGTEELLVKLNREDLLRKQRTFDNGSIPHQIHLGELHAILRRQEDFYPFLKDNREKIEKILTFRIPYYVGPLARGNSRFAWMTRKSEETITPWNFEEVVDKGASAQSFIERMTNFDKNLPNEKVLPKHSLLYEYFTVYNELTKVKYVTEGMRKPAFLSGEQKKAIVDLLFKTNRKVTVKQLKEDYFKKIECFDSVEISGVEDRFNASLGTYHDLLKIIKDKDFLDNEENEDILEDIVLTLTLFEDREMIEERLKTYAHLFDDKVMKQLKRRRYTGWGRLSRKLINGIRDKQSGKTILDFLKSDGFANRNFMQLIHDDSLTFKEDIQKAQVSGQGDSLHEHIANLAGSPAIKKGILQTVKVVDELVKVMGRHKPENIVIEMARENQTTQKGQKNSRERMKRIEEGIKELGSQILKEHPVENTQLQNEKLYLYYLQNGRDMYVDQELDINRLSDYDVDHIVPQSFLKDDSIDNKVLTRSDKARGKSDNVPSEEVVKKMKNYWRQLLNAKLITQRKFDNLTKAERGGLSELDKAGFIKRQLVETRQITKHVAQILDSRMNTKYDENDKLIREVKVITLKSKLVSDFRKDFQFYKVREINNYHHAHDAYLNAVVGTALIKKYPKLESEFVYGDYKVYDVRKMIAKSEQEIGKATAKYFFYSNIMNFFKTEITLANGEIRKRPLIETNGETGEIVWDKGRDFATVRKVLSMPQVNIVKKTEVQTGGFSKESILPKRNSDKLIARKKDWDPKKYGGFDSPTVAYSVLVVAKVEKGKSKKLKSVKELLGITIMERSSFEKNPIDFLEAKGYKEVKKDLIIKLPKYSLFELENGRKRMLASAGELQKGNELALPSKYVNFLYLASHYEKLKGSPEDNEQKQLFVEQHKHYLDEIIEQISEFSKRVILADANLDKVLSAYNKHRDKPIREQAENIIHLFTLTNLGAPAAFKYFDTTIDRKRYTSTKEVLDATLIHQSITGLYETRIDLSQLGGDGGPAPEAAAKGSSGGTLNIEDEYRLHETSKEPDVPLGSTWLSDFPQAWAETGGMGLAVRQAPLIIPLKATSTPVSIKQYPMSQEARLGIKPHIQRLLDQGILVPCQSPWNTPLLPVKKPGTNDYRPVQDLREVNKRVEDIHPTVPNPYNLLSGLPPSHQWYTVLDLKDAFFCLRLHPTSQPLFAFEWRDPEMGISGQLTWTRLPQGFKNSPTLFNEALHRDLADFRIQHPDLILLQYVDDLLLAATSEQDCQRGTRALLQTLGNLGYRASAKKAQICQKQVKYLGYLLKEGQRWLTEARKETVMGQPTPKTPRQLREFLGKAGFCRLFIPGFAEMAAPLYPLTKPGTLFNWGPDQQKAYQEIKQALLTAPALGLPDLTKPFELFVDEKQGYAKGVLTQKLGPWRRPVAYLSKKLDPVAAGWPPCLRMVAAIAVLTKDAGKLTMGQPLVILAPHAVEALVKQPPDRWLSNARMTHYQAMLLDTDRVQFGPVVALNPATLLPLPEKEAPHDCLEILAETHGTRPDLTDQPIPDADYTWYTDGSSFLQEGQRRAGAAVTTETEVIWARALPAGTSAQRAELIALTQALKMAEGKKLNVYTDSRYAFATAHVHGEIYRRRGWLTSEGREIKNKNEILALLKALFLPKRLSIIHCPGHQKGNSAEARGNRMADQAAREAAMKAVLETSTLLAGKRTADGSEFEKRTADGSEFESPKKKAKVE

SEQ ID NO: 1008 - protein, 2105 aa, synthetic construct
MPAAKRVKLDGGDKKYSIGLDIGTNSVGWAVITDEYKVPSKKFKVLGNTDRHSIKKNLIGALLFDSGETAEATRLKRTARRRYTRRKNRICYLQEIFSNEMAKVDDSFFHRLEESFLVEEDKKHERHPIFGNIVDEVAYHEKYPTIYHLRKKLVDSTDKADLRLIYLALAHMIKFRGHFLIEGDLNPDNSDVDKLFIQLVQTYNQLFEENPINASGVDAKAILSARLSKSRRLENLIAQLPGEKKNGLFGNLIALSLGLTPNFKSNFDLAEDAKLQLSKDTYDDDLDNLLAQIGDQYADLFLAAKNLSDAILLSDILRVNTEITKAPLSASMIKRYDEHHQDLTLLKALVRQQLPEKYKEIFFDQSKNGYAGYIDGGASQEEFYKFIKPILEKMDGTEELLVKLNREDLLRKQRTFDNGSIPHQIHLGELHAILRRQEDFYPFLKDNREKIEKILTFRIPYYVGPLARGNSRFAWMTRKSEETITPWNFEEVVDKGASAQSFIERMTNFDKNLPNEKVLPKHSLLYEYFTVYNELTKVKYVTEGMRKPAFLSGEQKKAIVDLLFKTNRKVTVKQLKEDYFKKIECFDSVEISGVEDRFNASLGTYHDLLKIIKDKDFLDNEENEDILEDIVLTLTLFEDREMIEERLKTYAHLFDDKVMKQLKRRRYTGWGRLSRKLINGIRDKQSGKTILDFLKSDGFANRNFMQLIHDDSLTFKEDIQKAQVSGQGDSLHEHIANLAGSPAIKKGILQTVKVVDELVKVMGRHKPENIVIEMARENQTTQKGQKNSRERMKRIEEGIKELGSQILKEHPVENTQLQNEKLYLYYLQNGRDMYVDQELDINRLSDYDVDHIVPQSFLKDDSIDNKVLTRSDKARGKSDNVPSEEVVKKMKNYWRQLLNAKLITQRKFDNLTKAERGGLSELDKAGFIKRQLVETRQITKHVAQILDSRMNTKYDENDKLIREVKVITLKSKLVSDFRKDFQFYKVREINNYHHAHDAYLNAVVGTALIKKYPKLESEFVYGDYKVYDVRKMIAKSEQEIGKATAKYFFYSNIMNFFKTEITLANGEIRKRPLIETNGETGEIVWDKGRDFATVRKVLSMPQVNIVKKTEVQTGGFSKESILPKRNSDKLIARKKDWDPKKYGGFDSPTVAYSVLVVAKVEKGKSKKLKSVKELLGITIMERSSFEKNPIDFLEAKGYKEVKKDLIIKLPKYSLFELENGRKRMLASAGELQKGNELALPSKYVNFLYLASHYEKLKGSPEDNEQKQLFVEQHKHYLDEIIEQISEFSKRVILADANLDKVLSAYNKHRDKPIREQAENIIHLFTLTNLGAPAAFKYFDTTIDRKRYTSTKEVLDATLIHQSITGLYETRIDLSQLGGDGGEAAAKEAAAKEAAAKEAAAKGGTLNIEDEYRLHETSKEPDVPLGSTWLSDFPQAWAETGGMGLAVRQAPLIIPLKATSTPVSIKQYPMSQEARLGIKPHIQRLLDQGILVPCQSPWNTPLLPVKKPGTNDYRPVQDLREVNKRVEDIHPTVPNPYNLLSGLPPSHQWYTVLDLKDAFFCLRLHPTSQPLFAFEWRDPEMGISGQLTWTRLPQGFKNSPTLFNEALHRDLADFRIQHPDLILLQYVDDLLLAATSEQDCQRGTRALLQTLGNLGYRASAKKAQICQKQVKYLGYLLKEGQRWLTEARKETVMGQPTPKTPRQLREFLGKAGFCRLFIPGFAEMAAPLYPLTKPGTLFNWGPDQQKAYQEIKQALLTAPALGLPDLTKPFELFVDEKQGYAKGVLTQKLGPWRRPVAYLSKKLDPVAAGWPPCLRMVAAIAVLTKDAGKLTMGQPLVILAPHAVEALVKQPPDRWLSNARMTHYQAMLLDTDRVQFGPVVALNPATLLPLPEKEAPHDCLEILAETHGTRPDLTDQPIPDADYTWYTDGSSFLQEGQRRAGAAVTTETEVIWARALPAGTSAQRAELIALTQALKMAEGKKLNVYTDSRYAFATAHVHGEIYRRRGWLTSEGREIKNKNEILALLKALFLPKRLSIIHCPGHQKGNSAEARGNRMADQAAREAAMKAVLETSTLLAGKRTADGSEFEKRTADGSEFESPKKKAKVE

SEQ ID NO: 1009 - protein, 2090 aa, synthetic construct
MPAAKRVKLDGGDKKYSIGLDIGTNSVGWAVITDEYKVPSKKFKVLGNTDRHSIKKNLIGALLFDSGETAEATRLKRTARRRYTRRKNRICYLQEIFSNEMAKVDDSFFHRLEESFLVEEDKKHERHPIFGNIVDEVAYHEKYPTIYHLRKKLVDSTDKADLRLIYLALAHMIKFRGHFLIEGDLNPDNSDVDKLFIQLVQTYNQLFEENPINASGVDAKAILSARLSKSRRLENLIAQLPGEKKNGLFGNLIALSLGLTPNFKSNFDLAEDAKLQLSKDTYDDDLDNLLAQIGDQYADLFLAAKNLSDAILLSDILRVNTEITKAPLSASMIKRYDEHHQDLTLLKALVRQQLPEKYKEIFFDQSKNGYAGYIDGGASQEEFYKFIKPILEKMDGTEELLVKLNREDLLRKQRTFDNGSIPHQIHLGELHAILRRQEDFYPFLKDNREKIEKILTFRIPYYVGPLARGNSRFAWMTRKSEETITPWNFEEVVDKGASAQSFIERMTNFDKNLPNEKVLPKHSLLYEYFTVYNELTKVKYVTEGMRKPAFLSGEQKKAIVDLLFKTNRKVTVKQLKEDYFKKIECFDSVEISGVEDRFNASLGTYHDLLKIIKDKDFLDNEENEDILEDIVLTLTLFEDREMIEERLKTYAHLFDDKVMKQLKRRRYTGWGRLSRKLINGIRDKQSGKTILDFLKSDGFANRNFMQLIHDDSLTFKEDIQKAQVSGQGDSLHEHIANLAGSPAIKKGILQTVKVVDELVKVMGRHKPENIVIEMARENQTTQKGQKNSRERMKRIEEGIKELGSQILKEHPVENTQLQNEKLYLYYLQNGRDMYVDQELDINRLSDYDVDHIVPQSFLKDDSIDNKVLTRSDKARGKSDNVPSEEVVKKMKNYWRQLLNAKLITQRKFDNLTKAERGGLSELDKAGFIKRQLVETRQITKHVAQILDSRMNTKYDENDKLIREVKVITLKSKLVSDFRKDFQFYKVREINNYHHAHDAYLNAVVGTALIKKYPKLESEFVYGDYKVYDVRKMIAKSEQEIGKATAKYFFYSNIMNFFKTEITLANGEIRKRPLIETNGETGEIVWDKGRDFATVRKVLSMPQVNIVKKTEVQTGGFSKESILPKRNSDKLIARKKDWDPKKYGGFDSPTVAYSVLVVAKVEKGKSKKLKSVKELLGITIMERSSFEKNPIDFLEAKGYKEVKKDLIIKLPKYSLFELENGRKRMLASAGELQKGNELALPSKYVNFLYLASHYEKLKGSPEDNEQKQLFVEQHKHYLDEIIEQISEFSKRVILADANLDKVLSAYNKHRDKPIREQAENIIHLFTLTNLGAPAAFKYFDTTIDRKRYTSTKEVLDATLIHQSITGLYETRIDLSQLGGDGGEAAAKGGTLNIEDEYRLHETSKEPDVPLGSTWLSDFPQAWAETGGMGLAVRQAPLIIPLKATSTPVSIKQYPMSQEARLGIKPHIQRLLDQGILVPCQSPWNTPLLPVKKPGTNDYRPVQDLREVNKRVEDIHPTVPNPYNLLSGLPPSHQWYTVLDLKDAFFCLRLHPTSQPLFAFEWRDPEMGISGQLTWTRLPQGFKNSPTLFNEALHRDLADFRIQHPDLILLQYVDDLLLAATSEQDCQRGTRALLQTLGNLGYRASAKKAQICQKQVKYLGYLLKEGQRWLTEARKETVMGQPTPKTPRQLREFLGKAGFCRLFIPGFAEMAAPLYPLTKPGTLFNWGPDQQKAYQEIKQALLTAPALGLPDLTKPFELFVDEKQGYAKGVLTQKLGPWRRPVAYLSKKLDPVAAGWPPCLRMVAAIAVLTKDAGKLTMGQPLVILAPHAVEALVKQPPDRWLSNARMTHYQAMLLDTDRVQFGPVVALNPATLLPLPEKEAPHDCLEILAETHGTRPDLTDQPIPDADYTWYTDGSSFLQEGQRRAGAAVTTETEVIWARALPAGTSAQRAELIALTQALKMAEGKKLNVYTDSRYAFATAHVHGEIYRRRGWLTSEGREIKNKNEILALLKALFLPKRLSIIHCPGHQKGNSAEARGNRMADQAAREAAMKAVLETSTLLAGKRTADGSEFEKRTADGSEFESPKKKAKVE

SEQ ID NO: 1010 - protein, 2096 aa, synthetic construct
MPAAKRVKLDGGDKKYSIGLDIGTNSVGWAVITDEYKVPSKKFKVLGNTDRHSIKKNLIGALLFDSGETAEATRLKRTARRRYTRRKNRICYLQEIFSNEMAKVDDSFFHRLEESFLVEEDKKHERHPIFGNIVDEVAYHEKYPTIYHLRKKLVDSTDKADLRLIYLALAHMIKFRGHFLIEGDLNPDNSDVDKLFIQLVQTYNQLFEENPINASGVDAKAILSARLSKSRRLENLIAQLPGEKKNGLFGNLIALSLGLTPNFKSNFDLAEDAKLQLSKDTYDDDLDNLLAQIGDQYADLFLAAKNLSDAILLSDILRVNTEITKAPLSASMIKRYDEHHQDLTLLKALVRQQLPEKYKEIFFDQSKNGYAGYIDGGASQEEFYKFIKPILEKMDGTEELLVKLNREDLLRKQRTFDNGSIPHQIHLGELHAILRRQEDFYPFLKDNREKIEKILTFRIPYYVGPLARGNSRFAWMTRKSEETITPWNFEEVVDKGASAQSFIERMTNFDKNLPNEKVLPKHSLLYEYFTVYNELTKVKYVTEGMRKPAFLSGEQKKAIVDLLFKTNRKVTVKQLKEDYFKKIECFDSVEISGVEDRFNASLGTYHDLLKIIKDKDFLDNEENEDILEDIVLTLTLFEDREMIEERLKTYAHLFDDKVMKQLKRRRYTGWGRLSRKLINGIRDKQSGKTILDFLKSDGFANRNFMQLIHDDSLTFKEDIQKAQVSGQGDSLHEHIANLAGSPAIKKGILQTVKVVDELVKVMGRHKPENIVIEMARENQTTQKGQKNSRERMKRIEEGIKELGSQILKEHPVENTQLQNEKLYLYYLQNGRDMYVDQELDINRLSDYDVDHIVPQSFLKDDSIDNKVLTRSDKARGKSDNVPSEEVVKKMKNYWRQLLNAKLITQRKFDNLTKAERGGLSELDKAGFIKRQLVETRQITKHVAQILDSRMNTKYDENDKLIREVKVITLKSKLVSDFRKDFQFYKVREINNYHHAHDAYLNAVVGTALIKKYPKLESEFVYGDYKVYDVRKMIAKSEQEIGKATAKYFFYSNIMNFFKTEITLANGEIRKRPLIETNGETGEIVWDKGRDFATVRKVLSMPQVNIVKKTEVQTGGFSKESILPKRNSDKLIARKKDWDPKKYGGFDSPTVAYSVLVVAKVEKGKSKKLKSVKELLGITIMERSSFEKNPIDFLEAKGYKEVKKDLIIKLPKYSLFELENGRKRMLASAGELQKGNELALPSKYVNFLYLASHYEKLKGSPEDNEQKQLFVEQHKHYLDEIIEQISEFSKRVILADANLDKVLSAYNKHRDKPIREQAENIIHLFTLTNLGAPAAFKYFDTTIDRKRYTSTKEVLDATLIHQSITGLYETRIDLSQLGGDGGGSSPAPEAAAKGGTLNIEDEYRLHETSKEPDVPLGSTWLSDFPQAWAETGGMGLAVRQAPLIIPLKATSTPVSIKQYPMSQEARLGIKPHIQRLLDQGILVPCQSPWNTPLLPVKKPGTNDYRPVQDLREVNKRVEDIHPTVPNPYNLLSGLPPSHQWYTVLDLKDAFFCLRLHPTSQPLFAFEWRDPEMGISGQLTWTRLPQGFKNSPTLFNEALHRDLADFRIQHPDLILLQYVDDLLLAATSEQDCQRGTRALLQTLGNLGYRASAKKAQICQKQVKYLGYLLKEGQRWLTEARKETVMGQPTPKTPRQLREFLGKAGFCRLFIPGFAEMAAPLYPLTKPGTLFNWGPDQQKAYQEIKQALLTAPALGLPDLTKPFELFVDEKQGYAKGVLTQKLGPWRRPVAYLSKKLDPVAAGWPPCLRMVAAIAVLTKDAGKLTMGQPLVILAPHAVEALVKQPPDRWLSNARMTHYQAMLLDTDRVQFGPVVALNPATLLPLPEKEAPHDCLEILAETHGTRPDLTDQPIPDADYTWYTDGSSFLQEGQRRAGAAVTTETEVIWARALPAGTSAQRAELIALTQALKMAEGKKLNVYTDSRYAFATAHVHGEIYRRRGWLTSEGREIKNKNEILALLKALFLPKRLSIIHCPGHQKGNSAEARGNRMADQAAREAAMKAVLETSTLLAGKRTADGSEFEKRTADGSEFESPKKKAKVE

SEQ ID NO: 1011 - protein, 2088 aa, synthetic construct
MPAAKRVKLDGGDKKYSIGLDIGTNSVGWAVITDEYKVPSKKFKVLGNTDRHSIKKNLIGALLFDSGETAEATRLKRTARRRYTRRKNRICYLQEIFSNEMAKVDDSFFHRLEESFLVEEDKKHERHPIFGNIVDEVAYHEKYPTIYHLRKKLVDSTDKADLRLIYLALAHMIKFRGHFLIEGDLNPDNSDVDKLFIQLVQTYNQLFEENPINASGVDAKAILSARLSKSRRLENLIAQLPGEKKNGLFGNLIALSLGLTPNFKSNFDLAEDAKLQLSKDTYDDDLDNLLAQIGDQYADLFLAAKNLSDAILLSDILRVNTEITKAPLSASMIKRYDEHHQDLTLLKALVRQQLPEKYKEIFFDQSKNGYAGYIDGGASQEEFYKFIKPILEKMDGTEELLVKLNREDLLRKQRTFDNGSIPHQIHLGELHAILRRQEDFYPFLKDNREKIEKILTFRIPYYVGPLARGNSRFAWMTRKSEETITPWNFEEVVDKGASAQSFIERMTNFDKNLPNEKVLPKHSLLYEYFTVYNELTKVKYVTEGMRKPAFLSGEQKKAIVDLLFKTNRKVTVKQLKEDYFKKIECFDSVEISGVEDRFNASLGTYHDLLKIIKDKDFLDNEENEDILEDIVLTLTLFEDREMIEERLKTYAHLFDDKVMKQLKRRRYTGWGRLSRKLINGIRDKQSGKTILDFLKSDGFANRNFMQLIHDDSLTFKEDIQKAQVSGQGDSLHEHIANLAGSPAIKKGILQTVKVVDELVKVMGRHKPENIVIEMARENQTTQKGQKNSRERMKRIEEGIKELGSQILKEHPVENTQLQNEKLYLYYLQNGRDMYVDQELDINRLSDYDVDHIVPQSFLKDDSIDNKVLTRSDKARGKSDNVPSEEVVKKMKNYWRQLLNAKLITQRKFDNLTKAERGGLSELDKAGFIKRQLVETRQITKHVAQILDSRMNTKYDENDKLIREVKVITLKSKLVSDFRKDFQFYKVREINNYHHAHDAYLNAVVGTALIKKYPKLESEFVYGDYKVYDVRKMIAKSEQEIGKATAKYFFYSNIMNFFKTEITLANGEIRKRPLIETNGETGEIVWDKGRDFATVRKVLSMPQVNIVKKTEVQTGGFSKESILPKRNSDKLIARKKDWDPKKYGGFDSPTVAYSVLVVAKVEKGKSKKLKSVKELLGITIMERSSFEKNPIDFLEAKGYKEVKKDLIIKLPKYSLFELENGRKRMLASAGELQKGNELALPSKYVNFLYLASHYEKLKGSPEDNEQKQLFVEQHKHYLDEIIEQISEFSKRVILADANLDKVLSAYNKHRDKPIREQAENIIHLFTLTNLGAPAAFKYFDTTIDRKRYTSTKEVLDATLIHQSITGLYETRIDLSQLGGDGGGSSGGTLNIEDEYRLHETSKEPDVPLGSTWLSDFPQAWAETGGMGLAVRQAPLIIPLKATSTPVSIKQYPMSQEARLGIKPHIQRLLDQGILVPCQSPWNTPLLPVKKPGTNDYRPVQDLREVNKRVEDIHPTVPNPYNLLSGLPPSHQWYTVLDLKDAFFCLRLHPTSQPLFAFEWRDPEMGISGQLTWTRLPQGFKNSPTLFNEALHRDLADFRIQHPDLILLQYVDDLLLAATSEQDCQRGTRALLQTLGNLGYRASAKKAQICQKQVKYLGYLLKEGQRWLTEARKETVMGQPTPKTPRQLREFLGKAGFCRLFIPGFAEMAAPLYPLTKPGTLFNWGPDQQKAYQEIKQALLTAPALGLPDLTKPFELFVDEKQGYAKGVLTQKLGPWRRPVAYLSKKLDPVAAGWPPCLRMVAAIAVLTKDAGKLTMGQPLVILAPHAVEALVKQPPDRWLSNARMTHYQAMLLDTDRVQFGPVVALNPATLLPLPEKEAPHDCLEILAETHGTRPDLTDQPIPDADYTWYTDGSSFLQEGQRRAGAAVTTETEVIWARALPAGTSAQRAELIALTQALKMAEGKKLNVYTDSRYAFATAHVHGEIYRRRGWLTSEGREIKNKNEILALLKALFLPKRLSIIHCPGHQKGNSAEARGNRMADQAAREAAMKAVLETSTLLAGKRTADGSEFEKRTADGSEFESPKKKAKVE

SEQ ID NO: 1012 - protein, 2096 aa, synthetic construct
MPAAKRVKLDGGDKKYSIGLDIGTNSVGWAVITDEYKVPSKKFKVLGNTDRHSIKKNLIGALLFDSGETAEATRLKRTARRRYTRRKNRICYLQEIFSNEMAKVDDSFFHRLEESFLVEEDKKHERHPIFGNIVDEVAYHEKYPTIYHLRKKLVDSTDKADLRLIYLALAHMIKFRGHFLIEGDLNPDNSDVDKLFIQLVQTYNQLFEENPINASGVDAKAILSARLSKSRRLENLIAQLPGEKKNGLFGNLIALSLGLTPNFKSNFDLAEDAKLQLSKDTYDDDLDNLLAQIGDQYADLFLAAKNLSDAILLSDILRVNTEITKAPLSASMIKRYDEHHQDLTLLKALVRQQLPEKYKEIFFDQSKNGYAGYIDGGASQEEFYKFIKPILEKMDGTEELLVKLNREDLLRKQRTFDNGSIPHQIHLGELHAILRRQEDFYPFLKDNREKIEKILTFRIPYYVGPLARGNSRFAWMTRKSEETITPWNFEEVVDKGASAQSFIERMTNFDKNLPNEKVLPKHSLLYEYFTVYNELTKVKYVTEGMRKPAFLSGEQKKAIVDLLFKTNRKVTVKQLKEDYFKKIECFDSVEISGVEDRFNASLGTYHDLLKIIKDKDFLDNEENEDILEDIVLTLTLFEDREMIEERLKTYAHLFDDKVMKQLKRRRYTGWGRLSRKLINGIRDKQSGKTILDFLKSDGFANRNFMQLIHDDSLTFKEDIQKAQVSGQGDSLHEHIANLAGSPAIKKGILQTVKVVDELVKVMGRHKPENIVIEMARENQTTQKGQKNSRERMKRIEEGIKELGSQILKEHPVENTQLQNEKLYLYYLQNGRDMYVDQELDINRLSDYDVDHIVPQSFLKDDSIDNKVLTRSDKARGKSDNVPSEEVVKKMKNYWRQLLNAKLITQRKFDNLTKAERGGLSELDKAGFIKRQLVETRQITKHVAQILDSRMNTKYDENDKLIREVKVITLKSKLVSDFRKDFQFYKVREINNYHHAHDAYLNAVVGTALIKKYPKLESEFVYGDYKVYDVRKMIAKSEQEIGKATAKYFFYSNIMNFFKTEITLANGEIRKRPLIETNGETGEIVWDKGRDFATVRKVLSMPQVNIVKKTEVQTGGFSKESILPKRNSDKLIARKKDWDPKKYGGFDSPTVAYSVLVVAKVEKGKSKKLKSVKELLGITIMERSSFEKNPIDFLEAKGYKEVKKDLIIKLPKYSLFELENGRKRMLASAGELQKGNELALPSKYVNFLYLASHYEKLKGSPEDNEQKQLFVEQHKHYLDEIIEQISEFSKRVILADANLDKVLSAYNKHRDKPIREQAENIIHLFTLTNLGAPAAFKYFDTTIDRKRYTSTKEVLDATLIHQSITGLYETRIDLSQLGGDGGEAAAKGSSGGGGGTLNIEDEYRLHETSKEPDVPLGSTWLSDFPQAWAETGGMGLAVRQAPLIIPLKATSTPVSIKQYPMSQEARLGIKPHIQRLLDQGILVPCQSPWNTPLLPVKKPGTNDYRPVQDLREVNKRVEDIHPTVPNPYNLLSGLPPSHQWYTVLDLKDAFFCLRLHPTSQPLFAFEWRDPEMGISGQLTWTRLPQGFKNSPTLFNEALHRDLADFRIQHPDLILLQYVDDLLLAATSEQDCQRGTRALLQTLGNLGYRASAKKAQICQKQVKYLGYLLKEGQRWLTEARKETVMGQPTPKTPRQLREFLGKAGFCRLFIPGFAEMAAPLYPLTKPGTLFNWGPDQQKAYQEIKQALLTAPALGLPDLTKPFELFVDEKQGYAKGVLTQKLGPWRRPVAYLSKKLDPVAAGWPPCLRMVAAIAVLTKDAGKLTMGQPLVILAPHAVEALVKQPPDRWLSNARMTHYQAMLLDTDRVQFGPVVALNPATLLPLPEKEAPHDCLEILAETHGTRPDLTDQPIPDADYTWYTDGSSFLQEGQRRAGAAVTTETEVIWARALPAGTSAQRAELIALTQALKMAEGKKLNVYTDSRYAFATAHVHGEIYRRRGWLTSEGREIKNKNEILALLKALFLPKRLSIIHCPGHQKGNSAEARGNRMADQAAREAAMKAVLETSTLLAGKRTADGSEFEKRTADGSEFESPKKKAKVE

SEQ ID NO: 1013 - protein, 2094 aa, synthetic construct
MPAAKRVKLDGGDKKYSIGLDIGTNSVGWAVITDEYKVPSKKFKVLGNTDRHSIKKNLIGALLFDSGETAEATRLKRTARRRYTRRKNRICYLQEIFSNEMAKVDDSFFHRLEESFLVEEDKKHERHPIFGNIVDEVAYHEKYPTIYHLRKKLVDSTDKADLRLIYLALAHMIKFRGHFLIEGDLNPDNSDVDKLFIQLVQTYNQLFEENPINASGVDAKAILSARLSKSRRLENLIAQLPGEKKNGLFGNLIALSLGLTPNFKSNFDLAEDAKLQLSKDTYDDDLDNLLAQIGDQYADLFLAAKNLSDAILLSDILRVNTEITKAPLSASMIKRYDEHHQDLTLLKALVRQQLPEKYKEIFFDQSKNGYAGYIDGGASQEEFYKFIKPILEKMDGTEELLVKLNREDLLRKQRTFDNGSIPHQIHLGELHAILRRQEDFYPFLKDNREKIEKILTFRIPYYVGPLARGNSRFAWMTRKSEETITPWNFEEVVDKGASAQSFIERMTNFDKNLPNEKVLPKHSLLYEYFTVYNELTKVKYVTEGMRKPAFLSGEQKKAIVDLLFKTNRKVTVKQLKEDYFKKIECFDSVEISGVEDRFNASLGTYHDLLKIIKDKDFLDNEENEDILEDIVLTLTLFEDREMIEERLKTYAHLFDDKVMKQLKRRRYTGWGRLSRKLINGIRDKQSGKTILDFLKSDGFANRNFMQLIHDDSLTFKEDIQKAQVSGQGDSLHEHIANLAGSPAIKKGILQTVKVVDELVKVMGRHKPENIVIEMARENQTTQKGQKNSRERMKRIEEGIKELGSQILKEHPVENTQLQNEKLYLYYLQNGRDMYVDQELDINRLSDYDVDHIVPQSFLKDDSIDNKVLTRSDKARGKSDNVPSEEVVKKMKNYWRQLLNAKLITQRKFDNLTKAERGGLSELDKAGFIKRQLVETRQITKHVAQILDSRMNTKYDENDKLIREVKVITLKSKLVSDFRKDFQFYKVREINNYHHAHDAYLNAVVGTALIKKYPKLESEFVYGDYKVYDVRKMIAKSEQEIGKATAKYFFYSNIMNFFKTEITLANGEIRKRPLIETNGETGEIVWDKGRDFATVRKVLSMPQVNIVKKTEVQTGGFSKESILPKRNSDKLIARKKDWDPKKYGGFDSPTVAYSVLVVAKVEKGKSKKLKSVKELLGITIMERSSFEKNPIDFLEAKGYKEVKKDLIIKLPKYSLFELENGRKRMLASAGELQKGNELALPSKYVNFLYLASHYEKLKGSPEDNEQKQLFVEQHKHYLDEIIEQISEFSKRVILADANLDKVLSAYNKHRDKPIREQAENIIHLFTLTNLGAPAAFKYFDTTIDRKRYTSTKEVLDATLIHQSITGLYETRIDLSQLGGDGGGGGPAPGSSGGTLNIEDEYRLHETSKEPDVPLGSTWLSDFPQAWAETGGMGLAVRQAPLIIPLKATSTPVSIKQYPMSQEARLGIKPHIQRLLDQGILVPCQSPWNTPLLPVKKPGTNDYRPVQDLREVNKRVEDIHPTVPNPYNLLSGLPPSHQWYTVLDLKDAFFCLRLHPTSQPLFAFEWRDPEMGISGQLTWTRLPQGFKNSPTLFNEALHRDLADFRIQHPDLILLQYVDDLLLAATSEQDCQRGTRALLQTLGNLGYRASAKKAQICQKQVKYLGYLLKEGQRWLTEARKETVMGQPTPKTPRQLREFLGKAGFCRLFIPGFAEMAAPLYPLTKPGTLFNWGPDQQKAYQEIKQALLTAPALGLPDLTKPFELFVDEKQGYAKGVLTQKLGPWRRPVAYLSKKLDPVAAGWPPCLRMVAAIAVLTKDAGKLTMGQPLVILAPHAVEALVKQPPDRWLSNARMTHYQAMLLDTDRVQFGPVVALNPATLLPLPEKEAPHDCLEILAETHGTRPDLTDQPIPDADYTWYTDGSSFLQEGQRRAGAAVTTETEVIWARALPAGTSAQRAELIALTQALKMAEGKKLNVYTDSRYAFATAHVHGEIYRRRGWLTSEGREIKNKNEILALLKALFLPKRLSIIHCPGHQKGNSAEARGNRMADQAAREAAMKAVLETSTLLAGKRTADGSEFEKRTADGSEFESPKKKAKVE

SEQ ID NO: 1014 - protein, 2094 aa, synthetic construct
MPAAKRVKLDGGDKKYSIGLDIGTNSVGWAVITDEYKVPSKKFKVLGNTDRHSIKKNLIGALLFDSGETAEATRLKRTARRRYTRRKNRICYLQEIFSNEMAKVDDSFFHRLEESFLVEEDKKHERHPIFGNIVDEVAYHEKYPTIYHLRKKLVDSTDKADLRLIYLALAHMIKFRGHFLIEGDLNPDNSDVDKLFIQLVQTYNQLFEENPINASGVDAKAILSARLSKSRRLENLIAQLPGEKKNGLFGNLIALSLGLTPNFKSNFDLAEDAKLQLSKDTYDDDLDNLLAQIGDQYADLFLAAKNLSDAILLSDILRVNTEITKAPLSASMIKRYDEHHQDLTLLKALVRQQLPEKYKEIFFDQSKNGYAGYIDGGASQEEFYKFIKPILEKMDGTEELLVKLNREDLLRKQRTFDNGSIPHQIHLGELHAILRRQEDFYPFLKDNREKIEKILTFRIPYYVGPLARGNSRFAWMTRKSEETITPWNFEEVVDKGASAQSFIERMTNFDKNLPNEKVLPKHSLLYEYFTVYNELTKVKYVTEGMRKPAFLSGEQKKAIVDLLFKTNRKVTVKQLKEDYFKKIECFDSVEISGVEDRFNASLGTYHDLLKIIKDKDFLDNEENEDILEDIVLTLTLFEDREMIEERLKTYAHLFDDKVMKQLKRRRYTGWGRLSRKLINGIRDKQSGKTILDFLKSDGFANRNFMQLIHDDSLTFKEDIQKAQVSGQGDSLHEHIANLAGSPAIKKGILQTVKVVDELVKVMGRHKPENIVIEMARENQTTQKGQKNSRERMKRIEEGIKELGSQILKEHPVENTQLQNEKLYLYYLQNGRDMYVDQELDINRLSDYDVDHIVPQSFLKDDSIDNKVLTRSDKARGKSDNVPSEEVVKKMKNYWRQLLNAKLITQRKFDNLTKAERGGLSELDKAGFIKRQLVETRQITKHVAQILDSRMNTKYDENDKLIREVKVITLKSKLVSDFRKDFQFYKVREINNYHHAHDAYLNAVVGTALIKKYPKLESEFVYGDYKVYDVRKMIAKSEQEIGKATAKYFFYSNIMNFFKTEITLANGEIRKRPLIETNGETGEIVWDKGRDFATVRKVLSMPQVNIVKKTEVQTGGFSKESILPKRNSDKLIARKKDWDPKKYGGFDSPTVAYSVLVVAKVEKGKSKKLKSVKELLGITIMERSSFEKNPIDFLEAKGYKEVKKDLIIKLPKYSLFELENGRKRMLASAGELQKGNELALPSKYVNFLYLASHYEKLKGSPEDNEQKQLFVEQHKHYLDEIIEQISEFSKRVILADANLDKVLSAYNKHRDKPIREQAENIIHLFTLTNLGAPAAFKYFDTTIDRKRYTSTKEVLDATLIHQSITGLYETRIDLSQLGGDGGGSSPAPGGSGGTLNIEDEYRLHETSKEPDVPLGSTWLSDFPQAWAETGGMGLAVRQAPLIIPLKATSTPVSIKQYPMSQEARLGIKPHIQRLLDQGILVPCQSPWNTPLLPVKKPGTNDYRPVQDLREVNKRVEDIHPTVPNPYNLLSGLPPSHQWYTVLDLKDAFFCLRLHPTSQPLFAFEWRDPEMGISGQLTWTRLPQGFKNSPTLFNEALHRDLADFRIQHPDLILLQYVDDLLLAATSEQDCQRGTRALLQTLGNLGYRASAKKAQICQKQVKYLGYLLKEGQRWLTEARKETVMGQPTPKTPRQLREFLGKAGFCRLFIPGFAEMAAPLYPLTKPGTLFNWGPDQQKAYQEIKQALLTAPALGLPDLTKPFELFVDEKQGYAKGVLTQKLGPWRRPVAYLSKKLDPVAAGWPPCLRMVAAIAVLTKDAGKLTMGQPLVILAPHAVEALVKQPPDRWLSNARMTHYQAMLLDTDRVQFGPVVALNPATLLPLPEKEAPHDCLEILAETHGTRPDLTDQPIPDADYTWYTDGSSFLQEGQRRAGAAVTTETEVIWARALPAGTSAQRAELIALTQALKMAEGKKLNVYTDSRYAFATAHVHGEIYRRRGWLTSEGREIKNKNEILALLKALFLPKRLSIIHCPGHQKGNSAEARGNRMADQAAREAAMKAVLETSTLLAGKRTADGSEFEKRTADGSEFESPKKKAKVE

SEQ ID NO: 1015 - protein, 2094 aa, synthetic construct
MPAAKRVKLDGGDKKYSIGLDIGTNSVGWAVITDEYKVPSKKFKVLGNTDRHSIKKNLIGALLFDSGETAEATRLKRTARRRYTRRKNRICYLQEIFSNEMAKVDDSFFHRLEESFLVEEDKKHERHPIFGNIVDEVAYHEKYPTIYHLRKKLVDSTDKADLRLIYLALAHMIKFRGHFLIEGDLNPDNSDVDKLFIQLVQTYNQLFEENPINASGVDAKAILSARLSKSRRLENLIAQLPGEKKNGLFGNLIALSLGLTPNFKSNFDLAEDAKLQLSKDTYDDDLDNLLAQIGDQYADLFLAAKNLSDAILLSDILRVNTEITKAPLSASMIKRYDEHHQDLTLLKALVRQQLPEKYKEIFFDQSKNGYAGYIDGGASQEEFYKFIKPILEKMDGTEELLVKLNREDLLRKQRTFDNGSIPHQIHLGELHAILRRQEDFYPFLKDNREKIEKILTFRIPYYVGPLARGNSRFAWMTRKSEETITPWNFEEVVDKGASAQSFIERMTNFDKNLPNEKVLPKHSLLYEYFTVYNELTKVKYVTEGMRKPAFLSGEQKKAIVDLLFKTNRKVTVKQLKEDYFKKIECFDSVEISGVEDRFNASLGTYHDLLKIIKDKDFLDNEENEDILEDIVLTLTLFEDREMIEERLKTYAHLFDDKVMKQLKRRRYTGWGRLSRKLINGIRDKQSGKTILDFLKSDGFANRNFMQLIHDDSLTFKEDIQKAQVSGQGDSLHEHIANLAGSPAIKKGILQTVKVVDELVKVMGRHKPENIVIEMARENQTTQKGQKNSRERMKRIEEGIKELGSQILKEHPVENTQLQNEKLYLYYLQNGRDMYVDQELDINRLSDYDVDHIVPQSFLKDDSIDNKVLTRSDKARGKSDNVPSEEVVKKMKNYWRQLLNAKLITQRKFDNLTKAERGGLSELDKAGFIKRQLVETRQITKHVAQILDSRMNTKYDENDKLIREVKVITLKSKLVSDFRKDFQFYKVREINNYHHAHDAYLNAVVGTALIKKYPKLESEFVYGDYKVYDVRKMIAKSEQEIGKATAKYFFYSNIMNFFKTEITLANGEIRKRPLIETNGETGEIVWDKGRDFATVRKVLSMPQVNIVKKTEVQTGGFSKESILPKRNSDKLIARKKDWDPKKYGGFDSPTVAYSVLVVAKVEKGKSKKLKSVKELLGITIMERSSFEKNPIDFLEAKGYKEVKKDLIIKLPKYSLFELENGRKRMLASAGELQKGNELALPSKYVNFLYLASHYEKLKGSPEDNEQKQLFVEQHKHYLDEIIEQISEFSKRVILADANLDKVLSAYNKHRDKPIREQAENIIHLFTLTNLGAPAAFKYFDTTIDRKRYTSTKEVLDATLIHQSITGLYETRIDLSQLGGDGGGGGGGSPAPGGTLNIEDEYRLHETSKEPDVPLGSTWLSDFPQAWAETGGMGLAVRQAPLIIPLKATSTPVSIKQYPMSQEARLGIKPHIQRLLDQGILVPCQSPWNTPLLPVKKPGTNDYRPVQDLREVNKRVEDIHPTVPNPYNLLSGLPPSHQWYTVLDLKDAFFCLRLHPTSQPLFAFEWRDPEMGISGQLTWTRLPQGFKNSPTLFNEALHRDLADFRIQHPDLILLQYVDDLLLAATSEQDCQRGTRALLQTLGNLGYRASAKKAQICQKQVKYLGYLLKEGQRWLTEARKETVMGQPTPKTPRQLREFLGKAGFCRLFIPGFAEMAAPLYPLTKPGTLFNWGPDQQKAYQEIKQALLTAPALGLPDLTKPFELFVDEKQGYAKGVLTQKLGPWRRPVAYLSKKLDPVAAGWPPCLRMVAAIAVLTKDAGKLTMGQPLVILAPHAVEALVKQPPDRWLSNARMTHYQAMLLDTDRVQFGPVVALNPATLLPLPEKEAPHDCLEILAETHGTRPDLTDQPIPDADYTWYTDGSSFLQEGQRRAGAAVTTETEVIWARALPAGTSAQRAELIALTQALKMAEGKKLNVYTDSRYAFATAHVHGEIYRRRGWLTSEGREIKNKNEILALLKALFLPKRLSIIHCPGHQKGNSAEARGNRMADQAAREAAMKAVLETSTLLAGKRTADGSEFEKRTADGSEFESPKKKAKVE

SEQ ID NO: 1016 - protein, 2091 aa, synthetic construct
MPAAKRVKLDGGDKKYSIGLDIGTNSVGWAVITDEYKVPSKKFKVLGNTDRHSIKKNLIGALLFDSGETAEATRLKRTARRRYTRRKNRICYLQEIFSNEMAKVDDSFFHRLEESFLVEEDKKHERHPIFGNIVDEVAYHEKYPTIYHLRKKLVDSTDKADLRLIYLALAHMIKFRGHFLIEGDLNPDNSDVDKLFIQLVQTYNQLFEENPINASGVDAKAILSARLSKSRRLENLIAQLPGEKKNGLFGNLIALSLGLTPNFKSNFDLAEDAKLQLSKDTYDDDLDNLLAQIGDQYADLFLAAKNLSDAILLSDILRVNTEITKAPLSASMIKRYDEHHQDLTLLKALVRQQLPEKYKEIFFDQSKNGYAGYIDGGASQEEFYKFIKPILEKMDGTEELLVKLNREDLLRKQRTFDNGSIPHQIHLGELHAILRRQEDFYPFLKDNREKIEKILTFRIPYYVGPLARGNSRFAWMTRKSEETITPWNFEEVVDKGASAQSFIERMTNFDKNLPNEKVLPKHSLLYEYFTVYNELTKVKYVTEGMRKPAFLSGEQKKAIVDLLFKTNRKVTVKQLKEDYFKKIECFDSVEISGVEDRFNASLGTYHDLLKIIKDKDFLDNEENEDILEDIVLTLTLFEDREMIEERLKTYAHLFDDKVMKQLKRRRYTGWGRLSRKLINGIRDKQSGKTILDFLKSDGFANRNFMQLIHDDSLTFKEDIQKAQVSGQGDSLHEHIANLAGSPAIKKGILQTVKVVDELVKVMGRHKPENIVIEMARENQTTQKGQKNSRERMKRIEEGIKELGSQILKEHPVENTQLQNEKLYLYYLQNGRDMYVDQELDINRLSDYDVDHIVPQSFLKDDSIDNKVLTRSDKARGKSDNVPSEEVVKKMKNYWRQLLNAKLITQRKFDNLTKAERGGLSELDKAGFIKRQLVETRQITKHVAQILDSRMNTKYDENDKLIREVKVITLKSKLVSDFRKDFQFYKVREINNYHHAHDAYLNAVVGTALIKKYPKLESEFVYGDYKVYDVRKMIAKSEQEIGKATAKYFFYSNIMNFFKTEITLANGEIRKRPLIETNGETGEIVWDKGRDFATVRKVLSMPQVNIVKKTEVQTGGFSKESILPKRNSDKLIARKKDWDPKKYGGFDSPTVAYSVLVVAKVEKGKSKKLKSVKELLGITIMERSSFEKNPIDFLEAKGYKEVKKDLIIKLPKYSLFELENGRKRMLASAGELQKGNELALPSKYVNFLYLASHYEKLKGSPEDNEQKQLFVEQHKHYLDEIIEQISEFSKRVILADANLDKVLSAYNKHRDKPIREQAENIIHLFTLTNLGAPAAFKYFDTTIDRKRYTSTKEVLDATLIHQSITGLYETRIDLSQLGGDGGGGSGSSGGTLNIEDEYRLHETSKEPDVPLGSTWLSDFPQAWAETGGMGLAVRQAPLIIPLKATSTPVSIKQYPMSQEARLGIKPHIQRLLDQGILVPCQSPWNTPLLPVKKPGTNDYRPVQDLREVNKRVEDIHPTVPNPYNLLSGLPPSHQWYTVLDLKDAFFCLRLHPTSQPLFAFEWRDPEMGISGQLTWTRLPQGFKNSPTLFNEALHRDLADFRIQHPDLILLQYVDDLLLAATSEQDCQRGTRALLQTLGNLGYRASAKKAQICQKQVKYLGYLLKEGQRWLTEARKETVMGQPTPKTPRQLREFLGKAGFCRLFIPGFAEMAAPLYPLTKPGTLFNWGPDQQKAYQEIKQALLTAPALGLPDLTKPFELFVDEKQGYAKGVLTQKLGPWRRPVAYLSKKLDPVAAGWPPCLRMVAAIAVLTKDAGKLTMGQPLVILAPHAVEALVKQPPDRWLSNARMTHYQAMLLDTDRVQFGPVVALNPATLLPLPEKEAPHDCLEILAETHGTRPDLTDQPIPDADYTWYTDGSSFLQEGQRRAGAAVTTETEVIWARALPAGTSAQRAELIALTQALKMAEGKKLNVYTDSRYAFATAHVHGEIYRRRGWLTSEGREIKNKNEILALLKALFLPKRLSIIHCPGHQKGNSAEARGNRMADQAAREAAMKAVLETSTLLAGKRTADGSEFEKRTADGSEFESPKKKAKVE

SEQ ID NO: 1017 - protein, 2091 aa, synthetic construct
MPAAKRVKLDGGDKKYSIGLDIGTNSVGWAVITDEYKVPSKKFKVLGNTDRHSIKKNLIGALLFDSGETAEATRLKRTARRRYTRRKNRICYLQEIFSNEMAKVDDSFFHRLEESFLVEEDKKHERHPIFGNIVDEVAYHEKYPTIYHLRKKLVDSTDKADLRLIYLALAHMIKFRGHFLIEGDLNPDNSDVDKLFIQLVQTYNQLFEENPINASGVDAKAILSARLSKSRRLENLIAQLPGEKKNGLFGNLIALSLGLTPNFKSNFDLAEDAKLQLSKDTYDDDLDNLLAQIGDQYADLFLAAKNLSDAILLSDILRVNTEITKAPLSASMIKRYDEHHQDLTLLKALVRQQLPEKYKEIFFDQSKNGYAGYIDGGASQEEFYKFIKPILEKMDGTEELLVKLNREDLLRKQRTFDNGSIPHQIHLGELHAILRRQEDFYPFLKDNREKIEKILTFRIPYYVGPLARGNSRFAWMTRKSEETITPWNFEEVVDKGASAQSFIERMTNFDKNLPNEKVLPKHSLLYEYFTVYNELTKVKYVTEGMRKPAFLSGEQKKAIVDLLFKTNRKVTVKQLKEDYFKKIECFDSVEISGVEDRFNASLGTYHDLLKIIKDKDFLDNEENEDILEDIVLTLTLFEDREMIEERLKTYAHLFDDKVMKQLKRRRYTGWGRLSRKLINGIRDKQSGKTILDFLKSDGFANRNFMQLIHDDSLTFKEDIQKAQVSGQGDSLHEHIANLAGSPAIKKGILQTVKVVDELVKVMGRHKPENIVIEMARENQTTQKGQKNSRERMKRIEEGIKELGSQILKEHPVENTQLQNEKLYLYYLQNGRDMYVDQELDINRLSDYDVDHIVPQSFLKDDSIDNKVLTRSDKARGKSDNVPSEEVVKKMKNYWRQLLNAKLITQRKFDNLTKAERGGLSELDKAGFIKRQLVETRQITKHVAQILDSRMNTKYDENDKLIREVKVITLKSKLVSDFRKDFQFYKVREINNYHHAHDAYLNAVVGTALIKKYPKLESEFVYGDYKVYDVRKMIAKSEQEIGKATAKYFFYSNIMNFFKTEITLANGEIRKRPLIETNGETGEIVWDKGRDFATVRKVLSMPQVNIVKKTEVQTGGFSKESILPKRNSDKLIARKKDWDPKKYGGFDSPTVAYSVLVVAKVEKGKSKKLKSVKELLGITIMERSSFEKNPIDFLEAKGYKEVKKDLIIKLPKYSLFELENGRKRMLASAGELQKGNELALPSKYVNFLYLASHYEKLKGSPEDNEQKQLFVEQHKHYLDEIIEQISEFSKRVILADANLDKVLSAYNKHRDKPIREQAENIIHLFTLTNLGAPAAFKYFDTTIDRKRYTSTKEVLDATLIHQSITGLYETRIDLSQLGGDGGGGSPAPGGTLNIEDEYRLHETSKEPDVPLGSTWLSDFPQAWAETGGMGLAVRQAPLIIPLKATSTPVSIKQYPMSQEARLGIKPHIQRLLDQGILVPCQSPWNTPLLPVKKPGTNDYRPVQDLREVNKRVEDIHPTVPNPYNLLSGLPPSHQWYTVLDLKDAFFCLRLHPTSQPLFAFEWRDPEMGISGQLTWTRLPQGFKNSPTLFNEALHRDLADFRIQHPDLILLQYVDDLLLAATSEQDCQRGTRALLQTLGNLGYRASAKKAQICQKQVKYLGYLLKEGQRWLTEARKETVMGQPTPKTPRQLREFLGKAGFCRLFIPGFAEMAAPLYPLTKPGTLFNWGPDQQKAYQEIKQALLTAPALGLPDLTKPFELFVDEKQGYAKGVLTQKLGPWRRPVAYLSKKLDPVAAGWPPCLRMVAAIAVLTKDAGKLTMGQPLVILAPHAVEALVKQPPDRWLSNARMTHYQAMLLDTDRVQFGPVVALNPATLLPLPEKEAPHDCLEILAETHGTRPDLTDQPIPDADYTWYTDGSSFLQEGQRRAGAAVTTETEVIWARALPAGTSAQRAELIALTQALKMAEGKKLNVYTDSRYAFATAHVHGEIYRRRGWLTSEGREIKNKNEILALLKALFLPKRLSIIHCPGHQKGNSAEARGNRMADQAAREAAMKAVLETSTLLAGKRTADGSEFEKRTADGSEFESPKKKAKVE

SEQ ID NO: 1018 - protein, 2096 aa, synthetic construct
MPAAKRVKLDGGDKKYSIGLDIGTNSVGWAVITDEYKVPSKKFKVLGNTDRHSIKKNLIGALLFDSGETAEATRLKRTARRRYTRRKNRICYLQEIFSNEMAKVDDSFFHRLEESFLVEEDKKHERHPIFGNIVDEVAYHEKYPTIYHLRKKLVDSTDKADLRLIYLALAHMIKFRGHFLIEGDLNPDNSDVDKLFIQLVQTYNQLFEENPINASGVDAKAILSARLSKSRRLENLIAQLPGEKKNGLFGNLIALSLGLTPNFKSNFDLAEDAKLQLSKDTYDDDLDNLLAQIGDQYADLFLAAKNLSDAILLSDILRVNTEITKAPLSASMIKRYDEHHQDLTLLKALVRQQLPEKYKEIFFDQSKNGYAGYIDGGASQEEFYKFIKPILEKMDGTEELLVKLNREDLLRKQRTFDNGSIPHQIHLGELHAILRRQEDFYPFLKDNREKIEKILTFRIPYYVGPLARGNSRFAWMTRKSEETITPWNFEEVVDKGASAQSFIERMTNFDKNLPNEKVLPKHSLLYEYFTVYNELTKVKYVTEGMRKPAFLSGEQKKAIVDLLFKTNRKVTVKQLKEDYFKKIECFDSVEISGVEDRFNASLGTYHDLLKIIKDKDFLDNEENEDILEDIVLTLTLFEDREMIEERLKTYAHLFDDKVMKQLKRRRYTGWGRLSRKLINGIRDKQSGKTILDFLKSDGFANRNFMQLIHDDSLTFKEDIQKAQVSGQGDSLHEHIANLAGSPAIKKGILQTVKVVDELVKVMGRHKPENIVIEMARENQTTQKGQKNSRERMKRIEEGIKELGSQILKEHPVENTQLQNEKLYLYYLQNGRDMYVDQELDINRLSDYDVDHIVPQSFLKDDSIDNKVLTRSDKARGKSDNVPSEEVVKKMKNYWRQLLNAKLITQRKFDNLTKAERGGLSELDKAGFIKRQLVETRQITKHVAQILDSRMNTKYDENDKLIREVKVITLKSKLVSDFRKDFQFYKVREINNYHHAHDAYLNAVVGTALIKKYPKLESEFVYGDYKVYDVRKMIAKSEQEIGKATAKYFFYSNIMNFFKTEITLANGEIRKRPLIETNGETGEIVWDKGRDFATVRKVLSMPQVNIVKKTEVQTGGFSKESILPKRNSDKLIARKKDWDPKKYGGFDSPTVAYSVLVVAKVEKGKSKKLKSVKELLGITIMERSSFEKNPIDFLEAKGYKEVKKDLIIKLPKYSLFELENGRKRMLASAGELQKGNELALPSKYVNFLYLASHYEKLKGSPEDNEQKQLFVEQHKHYLDEIIEQISEFSKRVILADANLDKVLSAYNKHRDKPIREQAENIIHLFTLTNLGAPAAFKYFDTTIDRKRYTSTKEVLDATLIHQSITGLYETRIDLSQLGGDGGGGGEAAAKGGSGGTLNIEDEYRLHETSKEPDVPLGSTWLSDFPQAWAETGGMGLAVRQAPLIIPLKATSTPVSIKQYPMSQEARLGIKPHIQRLLDQGILVPCQSPWNTPLLPVKKPGTNDYRPVQDLREVNKRVEDIHPTVPNPYNLLSGLPPSHQWYTVLDLKDAFFCLRLHPTSQPLFAFEWRDPEMGISGQLTWTRLPQGFKNSPTLFNEALHRDLADFRIQHPDLILLQYVDDLLLAATSEQDCQRGTRALLQTLGNLGYRASAKKAQICQKQVKYLGYLLKEGQRWLTEARKETVMGQPTPKTPRQLREFLGKAGFCRLFIPGFAEMAAPLYPLTKPGTLFNWGPDQQKAYQEIKQALLTAPALGLPDLTKPFELFVDEKQGYAKGVLTQKLGPWRRPVAYLSKKLDPVAAGWPPCLRMVAAIAVLTKDAGKLTMGQPLVILAPHAVEALVKQPPDRWLSNARMTHYQAMLLDTDRVQFGPVVALNPATLLPLPEKEAPHDCLEILAETHGTRPDLTDQPIPDADYTWYTDGSSFLQEGQRRAGAAVTTETEVIWARALPAGTSAQRAELIALTQALKMAEGKKLNVYTDSRYAFATAHVHGEIYRRRGWLTSEGREIKNKNEILALLKALFLPKRLSIIHCPGHQKGNSAEARGNRMADQAAREAAMKAVLETSTLLAGKRTADGSEFEKRTADGSEFESPKKKAKVE

SEQ ID NO: 1019 - protein, 2097 aa, synthetic construct
MPAAKRVKLDGGDKKYSIGLDIGTNSVGWAVITDEYKVPSKKFKVLGNTDRHSIKKNLIGALLFDSGETAEATRLKRTARRRYTRRKNRICYLQEIFSNEMAKVDDSFFHRLEESFLVEEDKKHERHPIFGNIVDEVAYHEKYPTIYHLRKKLVDSTDKADLRLIYLALAHMIKFRGHFLIEGDLNPDNSDVDKLFIQLVQTYNQLFEENPINASGVDAKAILSARLSKSRRLENLIAQLPGEKKNGLFGNLIALSLGLTPNFKSNFDLAEDAKLQLSKDTYDDDLDNLLAQIGDQYADLFLAAKNLSDAILLSDILRVNTEITKAPLSASMIKRYDEHHQDLTLLKALVRQQLPEKYKEIFFDQSKNGYAGYIDGGASQEEFYKFIKPILEKMDGTEELLVKLNREDLLRKQRTFDNGSIPHQIHLGELHAILRRQEDFYPFLKDNREKIEKILTFRIPYYVGPLARGNSRFAWMTRKSEETITPWNFEEVVDKGASAQSFIERMTNFDKNLPNEKVLPKHSLLYEYFTVYNELTKVKYVTEGMRKPAFLSGEQKKAIVDLLFKTNRKVTVKQLKEDYFKKIECFDSVEISGVEDRFNASLGTYHDLLKIIKDKDFLDNEENEDILEDIVLTLTLFEDREMIEERLKTYAHLFDDKVMKQLKRRRYTGWGRLSRKLINGIRDKQSGKTILDFLKSDGFANRNFMQLIHDDSLTFKEDIQKAQVSGQGDSLHEHIANLAGSPAIKKGILQTVKVVDELVKVMGRHKPENIVIEMARENQTTQKGQKNSRERMKRIEEGIKELGSQILKEHPVENTQLQNEKLYLYYLQNGRDMYVDQELDINRLSDYDVDHIVPQSFLKDDSIDNKVLTRSDKARGKSDNVPSEEVVKKMKNYWRQLLNAKLITQRKFDNLTKAERGGLSELDKAGFIKRQLVETRQITKHVAQILDSRMNTKYDENDKLIREVKVITLKSKLVSDFRKDFQFYKVREINNYHHAHDAYLNAVVGTALIKKYPKLESEFVYGDYKVYDVRKMIAKSEQEIGKATAKYFFYSNIMNFFKTEITLANGEIRKRPLIETNGETGEIVWDKGRDFATVRKVLSMPQVNIVKKTEVQTGGFSKESILPKRNSDKLIARKKDWDPKKYGGFDSPTVAYSVLVVAKVEKGKSKKLKSVKELLGITIMERSSFEKNPIDFLEAKGYKEVKKDLIIKLPKYSLFELENGRKRMLASAGELQKGNELALPSKYVNFLYLASHYEKLKGSPEDNEQKQLFVEQHKHYLDEIIEQISEFSKRVILADANLDKVLSAYNKHRDKPIREQAENIIHLFTLTNLGAPAAFKYFDTTIDRKRYTSTKEVLDATLIHQSITGLYETRIDLSQLGGDGGGGSGGSGGSGGSGGTLNIEDEYRLHETSKEPDVPLGSTWLSDFPQAWAETGGMGLAVRQAPLIIPLKATSTPVSIKQYPMSQEARLGIKPHIQRLLDQGILVPCQSPWNTPLLPVKKPGTNDYRPVQDLREVNKRVEDIHPTVPNPYNLLSGLPPSHQWYTVLDLKDAFFCLRLHPTSQPLFAFEWRDPEMGISGQLTWTRLPQGFKNSPTLFNEALHRDLADFRIQHPDLILLQYVDDLLLAATSEQDCQRGTRALLQTLGNLGYRASAKKAQICQKQVKYLGYLLKEGQRWLTEARKETVMGQPTPKTPRQLREFLGKAGFCRLFIPGFAEMAAPLYPLTKPGTLFNWGPDQQKAYQEIKQALLTAPALGLPDLTKPFELFVDEKQGYAKGVLTQKLGPWRRPVAYLSKKLDPVAAGWPPCLRMVAAIAVLTKDAGKLTMGQPLVILAPHAVEALVKQPPDRWLSNARMTHYQAMLLDTDRVQFGPVVALNPATLLPLPEKEAPHDCLEILAETHGTRPDLTDQPIPDADYTWYTDGSSFLQEGQRRAGAAVTTETEVIWARALPAGTSAQRAELIALTQALKMAEGKKLNVYTDSRYAFATAHVHGEIYRRRGWLTSEGREIKNKNEILALLKALFLPKRLSIIHCPGHQKGNSAEARGNRMADQAAREAAMKAVLETSTLLAGKRTADGSEFEKRTADGSEFESPKKKAKVE

SEQ ID NO: 1020 - protein, 2098 aa, synthetic construct
MPAAKRVKLDGGDKKYSIGLDIGTNSVGWAVITDEYKVPSKKFKVLGNTDRHSIKKNLIGALLFDSGETAEATRLKRTARRRYTRRKNRICYLQEIFSNEMAKVDDSFFHRLEESFLVEEDKKHERHPIFGNIVDEVAYHEKYPTIYHLRKKLVDSTDKADLRLIYLALAHMIKFRGHFLIEGDLNPDNSDVDKLFIQLVQTYNQLFEENPINASGVDAKAILSARLSKSRRLENLIAQLPGEKKNGLFGNLIALSLGLTPNFKSNFDLAEDAKLQLSKDTYDDDLDNLLAQIGDQYADLFLAAKNLSDAILLSDILRVNTEITKAPLSASMIKRYDEHHQDLTLLKALVRQQLPEKYKEIFFDQSKNGYAGYIDGGASQEEFYKFIKPILEKMDGTEELLVKLNREDLLRKQRTFDNGSIPHQIHLGELHAILRRQEDFYPFLKDNREKIEKILTFRIPYYVGPLARGNSRFAWMTRKSEETITPWNFEEVVDKGASAQSFIERMTNFDKNLPNEKVLPKHSLLYEYFTVYNELTKVKYVTEGMRKPAFLSGEQKKAIVDLLFKTNRKVTVKQLKEDYFKKIECFDSVEISGVEDRFNASLGTYHDLLKIIKDKDFLDNEENEDILEDIVLTLTLFEDREMIEERLKTYAHLFDDKVMKQLKRRRYTGWGRLSRKLINGIRDKQSGKTILDFLKSDGFANRNFMQLIHDDSLTFKEDIQKAQVSGQGDSLHEHIANLAGSPAIKKGILQTVKVVDELVKVMGRHKPENIVIEMARENQTTQKGQKNSRERMKRIEEGIKELGSQILKEHPVENTQLQNEKLYLYYLQNGRDMYVDQELDINRLSDYDVDHIVPQSFLKDDSIDNKVLTRSDKARGKSDNVPSEEVVKKMKNYWRQLLNAKLITQRKFDNLTKAERGGLSELDKAGFIKRQLVETRQITKHVAQILDSRMNTKYDENDKLIREVKVITLKSKLVSDFRKDFQFYKVREINNYHHAHDAYLNAVVGTALIKKYPKLESEFVYGDYKVYDVRKMIAKSEQEIGKATAKYFFYSNIMNFFKTEITLANGEIRKRPLIETNGETGEIVWDKGRDFATVRKVLSMPQVNIVKKTEVQTGGFSKESILPKRNSDKLIARKKDWDPKKYGGFDSPTVAYSVLVVAKVEKGKSKKLKSVKELLGITIMERSSFEKNPIDFLEAKGYKEVKKDLIIKLPKYSLFELENGRKRMLASAGELQKGNELALPSKYVNFLYLASHYEKLKGSPEDNEQKQLFVEQHKHYLDEIIEQISEFSKRVILADANLDKVLSAYNKHRDKPIREQAENIIHLFTLTNLGAPAAFKYFDTTIDRKRYTSTKEVLDATLIHQSITGLYETRIDLSQLGGDGGPAPAPAPAPAPAPGGTLNIEDEYRLHETSKEPDVPLGSTWLSDFPQAWAETGGMGLAVRQAPLIIPLKATSTPVSIKQYPMSQEARLGIKPHIQRLLDQGILVPCQSPWNTPLLPVKKPGTNDYRPVQDLREVNKRVEDIHPTVPNPYNLLSGLPPSHQWYTVLDLKDAFFCLRLHPTSQPLFAFEWRDPEMGISGQLTWTRLPQGFKNSPTLFNEALHRDLADFRIQHPDLILLQYVDDLLLAATSEQDCQRGTRALLQTLGNLGYRASAKKAQICQKQVKYLGYLLKEGQRWLTEARKETVMGQPTPKTPRQLREFLGKAGFCRLFIPGFAEMAAPLYPLTKPGTLFNWGPDQQKAYQEIKQALLTAPALGLPDLTKPFELFVDEKQGYAKGVLTQKLGPWRRPVAYLSKKLDPVAAGWPPCLRMVAAIAVLTKDAGKLTMGQPLVILAPHAVEALVKQPPDRWLSNARMTHYQAMLLDTDRVQFGPVVALNPATLLPLPEKEAPHDCLEILAETHGTRPDLTDQPIPDADYTWYTDGSSFLQEGQRRAGAAVTTETEVIWARALPAGTSAQRAELIALTQALKMAEGKKLNVYTDSRYAFATAHVHGEIYRRRGWLTSEGREIKNKNEILALLKALFLPKRLSIIHCPGHQKGNSAEARGNRMADQAAREAAMKAVLETSTLLAGKRTADGSEFEKRTADGSEFESPKKKAKVE

SEQ ID NO: 1021 - protein, 2115 aa, synthetic construct
MPAAKRVKLDGGDKKYSIGLDIGTNSVGWAVITDEYKVPSKKFKVLGNTDRHSIKKNLIGALLFDSGETAEATRLKRTARRRYTRRKNRICYLQEIFSNEMAKVDDSFFHRLEESFLVEEDKKHERHPIFGNIVDEVAYHEKYPTIYHLRKKLVDSTDKADLRLIYLALAHMIKFRGHFLIEGDLNPDNSDVDKLFIQLVQTYNQLFEENPINASGVDAKAILSARLSKSRRLENLIAQLPGEKKNGLFGNLIALSLGLTPNFKSNFDLAEDAKLQLSKDTYDDDLDNLLAQIGDQYADLFLAAKNLSDAILLSDILRVNTEITKAPLSASMIKRYDEHHQDLTLLKALVRQQLPEKYKEIFFDQSKNGYAGYIDGGASQEEFYKFIKPILEKMDGTEELLVKLNREDLLRKQRTFDNGSIPHQIHLGELHAILRRQEDFYPFLKDNREKIEKILTFRIPYYVGPLARGNSRFAWMTRKSEETITPWNFEEVVDKGASAQSFIERMTNFDKNLPNEKVLPKHSLLYEYFTVYNELTKVKYVTEGMRKPAFLSGEQKKAIVDLLFKTNRKVTVKQLKEDYFKKIECFDSVEISGVEDRFNASLGTYHDLLKIIKDKDFLDNEENEDILEDIVLTLTLFEDREMIEERLKTYAHLFDDKVMKQLKRRRYTGWGRLSRKLINGIRDKQSGKTILDFLKSDGFANRNFMQLIHDDSLTFKEDIQKAQVSGQGDSLHEHIANLAGSPAIKKGILQTVKVVDELVKVMGRHKPENIVIEMARENQTTQKGQKNSRERMKRIEEGIKELGSQILKEHPVENTQLQNEKLYLYYLQNGRDMYVDQELDINRLSDYDVDHIVPQSFLKDDSIDNKVLTRSDKARGKSDNVPSEEVVKKMKNYWRQLLNAKLITQRKFDNLTKAERGGLSELDKAGFIKRQLVETRQITKHVAQILDSRMNTKYDENDKLIREVKVITLKSKLVSDFRKDFQFYKVREINNYHHAHDAYLNAVVGTALIKKYPKLESEFVYGDYKVYDVRKMIAKSEQEIGKATAKYFFYSNIMNFFKTEITLANGEIRKRPLIETNGETGEIVWDKGRDFATVRKVLSMPQVNIVKKTEVQTGGFSKESILPKRNSDKLIARKKDWDPKKYGGFDSPTVAYSVLVVAKVEKGKSKKLKSVKELLGITIMERSSFEKNPIDFLEAKGYKEVKKDLIIKLPKYSLFELENGRKRMLASAGELQKGNELALPSKYVNFLYLASHYEKLKGSPEDNEQKQLFVEQHKHYLDEIIEQISEFSKRVILADANLDKVLSAYNKHRDKPIREQAENIIHLFTLTNLGAPAAFKYFDTTIDRKRYTSTKEVLDATLIHQSITGLYETRIDLSQLGGDGGGGGGSGGGGSGGGGSGGGGSGGGGSGGGGSGGTLNIEDEYRLHETSKEPDVPLGSTWLSDFPQAWAETGGMGLAVRQAPLIIPLKATSTPVSIKQYPMSQEARLGIKPHIQRLLDQGILVPCQSPWNTPLLPVKKPGTNDYRPVQDLREVNKRVEDIHPTVPNPYNLLSGLPPSHQWYTVLDLKDAFFCLRLHPTSQPLFAFEWRDPEMGISGQLTWTRLPQGFKNSPTLFNEALHRDLADFRIQHPDLILLQYVDDLLLAATSEQDCQRGTRALLQTLGNLGYRASAKKAQICQKQVKYLGYLLKEGQRWLTEARKETVMGQPTPKTPRQLREFLGKAGFCRLFIPGFAEMAAPLYPLTKPGTLFNWGPDQQKAYQEIKQALLTAPALGLPDLTKPFELFVDEKQGYAKGVLTQKLGPWRRPVAYLSKKLDPVAAGWPPCLRMVAAIAVLTKDAGKLTMGQPLVILAPHAVEALVKQPPDRWLSNARMTHYQAMLLDTDRVQFGPVVALNPATLLPLPEKEAPHDCLEILAETHGTRPDLTDQPIPDADYTWYTDGSSFLQEGQRRAGAAVTTETEVIWARALPAGTSAQRAELIALTQALKMAEGKKLNVYTDSRYAFATAHVHGEIYRRRGWLTSEGREIKNKNEILALLKALFLPKRLSIIHCPGHQKGNSAEARGNRMADQAAREAAMKAVLETSTLLAGKRTADGSEFEKRTADGSEFESPKKKAKVE

SEQ ID NO: 1022 - protein, 2094 aa, synthetic construct
MPAAKRVKLDGGDKKYSIGLDIGTNSVGWAVITDEYKVPSKKFKVLGNTDRHSIKKNLIGALLFDSGETAEATRLKRTARRRYTRRKNRICYLQEIFSNEMAKVDDSFFHRLEESFLVEEDKKHERHPIFGNIVDEVAYHEKYPTIYHLRKKLVDSTDKADLRLIYLALAHMIKFRGHFLIEGDLNPDNSDVDKLFIQLVQTYNQLFEENPINASGVDAKAILSARLSKSRRLENLIAQLPGEKKNGLFGNLIALSLGLTPNFKSNFDLAEDAKLQLSKDTYDDDLDNLLAQIGDQYADLFLAAKNLSDAILLSDILRVNTEITKAPLSASMIKRYDEHHQDLTLLKALVRQQLPEKYKEIFFDQSKNGYAGYIDGGASQEEFYKFIKPILEKMDGTEELLVKLNREDLLRKQRTFDNGSIPHQIHLGELHAILRRQEDFYPFLKDNREKIEKILTFRIPYYVGPLARGNSRFAWMTRKSEETITPWNFEEVVDKGASAQSFIERMTNFDKNLPNEKVLPKHSLLYEYFTVYNELTKVKYVTEGMRKPAFLSGEQKKAIVDLLFKTNRKVTVKQLKEDYFKKIECFDSVEISGVEDRFNASLGTYHDLLKIIKDKDFLDNEENEDILEDIVLTLTLFEDREMIEERLKTYAHLFDDKVMKQLKRRRYTGWGRLSRKLINGIRDKQSGKTILDFLKSDGFANRNFMQLIHDDSLTFKEDIQKAQVSGQGDSLHEHIANLAGSPAIKKGILQTVKVVDELVKVMGRHKPENIVIEMARENQTTQKGQKNSRERMKRIEEGIKELGSQILKEHPVENTQLQNEKLYLYYLQNGRDMYVDQELDINRLSDYDVDHIVPQSFLKDDSIDNKVLTRSDKARGKSDNVPSEEVVKKMKNYWRQLLNAKLITQRKFDNLTKAERGGLSELDKAGFIKRQLVETRQITKHVAQILDSRMNTKYDENDKLIREVKVITLKSKLVSDFRKDFQFYKVREINNYHHAHDAYLNAVVGTALIKKYPKLESEFVYGDYKVYDVRKMIAKSEQEIGKATAKYFFYSNIMNFFKTEITLANGEIRKRPLIETNGETGEIVWDKGRDFATVRKVLSMPQVNIVKKTEVQTGGFSKESILPKRNSDKLIARKKDWDPKKYGGFDSPTVAYSVLVVAKVEKGKSKKLKSVKELLGITIMERSSFEKNPIDFLEAKGYKEVKKDLIIKLPKYSLFELENGRKRMLASAGELQKGNELALPSKYVNFLYLASHYEKLKGSPEDNEQKQLFVEQHKHYLDEIIEQISEFSKRVILADANLDKVLSAYNKHRDKPIREQAENIIHLFTLTNLGAPAAFKYFDTTIDRKRYTSTKEVLDATLIHQSITGLYETRIDLSQLGGDGGGGSGSSGGGGGTLNIEDEYRLHETSKEPDVPLGSTWLSDFPQAWAETGGMGLAVRQAPLIIPLKATSTPVSIKQYPMSQEARLGIKPHIQRLLDQGILVPCQSPWNTPLLPVKKPGTNDYRPVQDLREVNKRVEDIHPTVPNPYNLLSGLPPSHQWYTVLDLKDAFFCLRLHPTSQPLFAFEWRDPEMGISGQLTWTRLPQGFKNSPTLFNEALHRDLADFRIQHPDLILLQYVDDLLLAATSEQDCQRGTRALLQTLGNLGYRASAKKAQICQKQVKYLGYLLKEGQRWLTEARKETVMGQPTPKTPRQLREFLGKAGFCRLFIPGFAEMAAPLYPLTKPGTLFNWGPDQQKAYQEIKQALLTAPALGLPDLTKPFELFVDEKQGYAKGVLTQKLGPWRRPVAYLSKKLDPVAAGWPPCLRMVAAIAVLTKDAGKLTMGQPLVILAPHAVEALVKQPPDRWLSNARMTHYQAMLLDTDRVQFGPVVALNPATLLPLPEKEAPHDCLEILAETHGTRPDLTDQPIPDADYTWYTDGSSFLQEGQRRAGAAVTTETEVIWARALPAGTSAQRAELIALTQALKMAEGKKLNVYTDSRYAFATAHVHGEIYRRRGWLTSEGREIKNKNEILALLKALFLPKRLSIIHCPGHQKGNSAEARGNRMADQAAREAAMKAVLETSTLLAGKRTADGSEFEKRTADGSEFESPKKKAKVE

SEQ ID NO: 1023 - protein, 2093 aa, synthetic construct
MPAAKRVKLDGGDKKYSIGLDIGTNSVGWAVITDEYKVPSKKFKVLGNTDRHSIKKNLIGALLFDSGETAEATRLKRTARRRYTRRKNRICYLQEIFSNEMAKVDDSFFHRLEESFLVEEDKKHERHPIFGNIVDEVAYHEKYPTIYHLRKKLVDSTDKADLRLIYLALAHMIKFRGHFLIEGDLNPDNSDVDKLFIQLVQTYNQLFEENPINASGVDAKAILSARLSKSRRLENLIAQLPGEKKNGLFGNLIALSLGLTPNFKSNFDLAEDAKLQLSKDTYDDDLDNLLAQIGDQYADLFLAAKNLSDAILLSDILRVNTEITKAPLSASMIKRYDEHHQDLTLLKALVRQQLPEKYKEIFFDQSKNGYAGYIDGGASQEEFYKFIKPILEKMDGTEELLVKLNREDLLRKQRTFDNGSIPHQIHLGELHAILRRQEDFYPFLKDNREKIEKILTFRIPYYVGPLARGNSRFAWMTRKSEETITPWNFEEVVDKGASAQSFIERMTNFDKNLPNEKVLPKHSLLYEYFTVYNELTKVKYVTEGMRKPAFLSGEQKKAIVDLLFKTNRKVTVKQLKEDYFKKIECFDSVEISGVEDRFNASLGTYHDLLKIIKDKDFLDNEENEDILEDIVLTLTLFEDREMIEERLKTYAHLFDDKVMKQLKRRRYTGWGRLSRKLINGIRDKQSGKTILDFLKSDGFANRNFMQLIHDDSLTFKEDIQKAQVSGQGDSLHEHIANLAGSPAIKKGILQTVKVVDELVKVMGRHKPENIVIEMARENQTTQKGQKNSRERMKRIEEGIKELGSQILKEHPVENTQLQNEKLYLYYLQNGRDMYVDQELDINRLSDYDVDHIVPQSFLKDDSIDNKVLTRSDKARGKSDNVPSEEVVKKMKNYWRQLLNAKLITQRKFDNLTKAERGGLSELDKAGFIKRQLVETRQITKHVAQILDSRMNTKYDENDKLIREVKVITLKSKLVSDFRKDFQFYKVREINNYHHAHDAYLNAVVGTALIKKYPKLESEFVYGDYKVYDVRKMIAKSEQEIGKATAKYFFYSNIMNFFKTEITLANGEIRKRPLIETNGETGEIVWDKGRDFATVRKVLSMPQVNIVKKTEVQTGGFSKESILPKRNSDKLIARKKDWDPKKYGGFDSPTVAYSVLVVAKVEKGKSKKLKSVKELLGITIMERSSFEKNPIDFLEAKGYKEVKKDLIIKLPKYSLFELENGRKRMLASAGELQKGNELALPSKYVNFLYLASHYEKLKGSPEDNEQKQLFVEQHKHYLDEIIEQISEFSKRVILADANLDKVLSAYNKHRDKPIREQAENIIHLFTLTNLGAPAAFKYFDTTIDRKRYTSTKEVLDATLIHQSITGLYETRIDLSQLGGDGGEAAAKGGSGGTLNIEDEYRLHETSKEPDVPLGSTWLSDFPQAWAETGGMGLAVRQAPLIIPLKATSTPVSIKQYPMSQEARLGIKPHIQRLLDQGILVPCQSPWNTPLLPVKKPGTNDYRPVQDLREVNKRVEDIHPTVPNPYNLLSGLPPSHQWYTVLDLKDAFFCLRLHPTSQPLFAFEWRDPEMGISGQLTWTRLPQGFKNSPTLFNEALHRDLADFRIQHPDLILLQYVDDLLLAATSEQDCQRGTRALLQTLGNLGYRASAKKAQICQKQVKYLGYLLKEGQRWLTEARKETVMGQPTPKTPRQLREFLGKAGFCRLFIPGFAEMAAPLYPLTKPGTLFNWGPDQQKAYQEIKQALLTAPALGLPDLTKPFELFVDEKQGYAKGVLTQKLGPWRRPVAYLSKKLDPVAAGWPPCLRMVAAIAVLTKDAGKLTMGQPLVILAPHAVEALVKQPPDRWLSNARMTHYQAMLLDTDRVQFGPVVALNPATLLPLPEKEAPHDCLEILAETHGTRPDLTDQPIPDADYTWYTDGSSFLQEGQRRAGAAVTTETEVIWARALPAGTSAQRAELIALTQALKMAEGKKLNVYTDSRYAFATAHVHGEIYRRRGWLTSEGREIKNKNEILALLKALFLPKRLSIIHCPGHQKGNSAEARGNRMADQAAREAAMKAVLETSTLLAGKRTADGSEFEKRTADGSEFESPKKKAKVE

SEQ ID NO: 1024 - protein, 2094 aa, synthetic construct
MPAAKRVKLDGGDKKYSIGLDIGTNSVGWAVITDEYKVPSKKFKVLGNTDRHSIKKNLIGALLFDSGETAEATRLKRTARRRYTRRKNRICYLQEIFSNEMAKVDDSFFHRLEESFLVEEDKKHERHPIFGNIVDEVAYHEKYPTIYHLRKKLVDSTDKADLRLIYLALAHMIKFRGHFLIEGDLNPDNSDVDKLFIQLVQTYNQLFEENPINASGVDAKAILSARLSKSRRLENLIAQLPGEKKNGLFGNLIALSLGLTPNFKSNFDLAEDAKLQLSKDTYDDDLDNLLAQIGDQYADLFLAAKNLSDAILLSDILRVNTEITKAPLSASMIKRYDEHHQDLTLLKALVRQQLPEKYKEIFFDQSKNGYAGYIDGGASQEEFYKFIKPILEKMDGTEELLVKLNREDLLRKQRTFDNGSIPHQIHLGELHAILRRQEDFYPFLKDNREKIEKILTFRIPYYVGPLARGNSRFAWMTRKSEETITPWNFEEVVDKGASAQSFIERMTNFDKNLPNEKVLPKHSLLYEYFTVYNELTKVKYVTEGMRKPAFLSGEQKKAIVDLLFKTNRKVTVKQLKEDYFKKIECFDSVEISGVEDRFNASLGTYHDLLKIIKDKDFLDNEENEDILEDIVLTLTLFEDREMIEERLKTYAHLFDDKVMKQLKRRRYTGWGRLSRKLINGIRDKQSGKTILDFLKSDGFANRNFMQLIHDDSLTFKEDIQKAQVSGQGDSLHEHIANLAGSPAIKKGILQTVKVVDELVKVMGRHKPENIVIEMARENQTTQKGQKNSRERMKRIEEGIKELGSQILKEHPVENTQLQNEKLYLYYLQNGRDMYVDQELDINRLSDYDVDHIVPQSFLKDDSIDNKVLTRSDKARGKSDNVPSEEVVKKMKNYWRQLLNAKLITQRKFDNLTKAERGGLSELDKAGFIKRQLVETRQITKHVAQILDSRMNTKYDENDKLIREVKVITLKSKLVSDFRKDFQFYKVREINNYHHAHDAYLNAVVGTALIKKYPKLESEFVYGDYKVYDVRKMIAKSEQEIGKATAKYFFYSNIMNFFKTEITLANGEIRKRPLIETNGETGEIVWDKGRDFATVRKVLSMPQVNIVKKTEVQTGGFSKESILPKRNSDKLIARKKDWDPKKYGGFDSPTVAYSVLVVAKVEKGKSKKLKSVKELLGITIMERSSFEKNPIDFLEAKGYKEVKKDLIIKLPKYSLFELENGRKRMLASAGELQKGNELALPSKYVNFLYLASHYEKLKGSPEDNEQKQLFVEQHKHYLDEIIEQISEFSKRVILADANLDKVLSAYNKHRDKPIREQAENIIHLFTLTNLGAPAAFKYFDTTIDRKRYTSTKEVLDATLIHQSITGLYETRIDLSQLGGDGGGGGGGSGSSGGTLNIEDEYRLHETSKEPDVPLGSTWLSDFPQAWAETGGMGLAVRQAPLIIPLKATSTPVSIKQYPMSQEARLGIKPHIQRLLDQGILVPCQSPWNTPLLPVKKPGTNDYRPVQDLREVNKRVEDIHPTVPNPYNLLSGLPPSHQWYTVLDLKDAFFCLRLHPTSQPLFAFEWRDPEMGISGQLTWTRLPQGFKNSPTLFNEALHRDLADFRIQHPDLILLQYVDDLLLAATSEQDCQRGTRALLQTLGNLGYRASAKKAQICQKQVKYLGYLLKEGQRWLTEARKETVMGQPTPKTPRQLREFLGKAGFCRLFIPGFAEMAAPLYPLTKPGTLFNWGPDQQKAYQEIKQALLTAPALGLPDLTKPFELFVDEKQGYAKGVLTQKLGPWRRPVAYLSKKLDPVAAGWPPCLRMVAAIAVLTKDAGKLTMGQPLVILAPHAVEALVKQPPDRWLSNARMTHYQAMLLDTDRVQFGPVVALNPATLLPLPEKEAPHDCLEILAETHGTRPDLTDQPIPDADYTWYTDGSSFLQEGQRRAGAAVTTETEVIWARALPAGTSAQRAELIALTQALKMAEGKKLNVYTDSRYAFATAHVHGEIYRRRGWLTSEGREIKNKNEILALLKALFLPKRLSIIHCPGHQKGNSAEARGNRMADQAAREAAMKAVLETSTLLAGKRTADGSEFEKRTADGSEFESPKKKAKVE

SEQ ID NO: 1025 - protein, 2094 aa, synthetic construct
MPAAKRVKLDGGDKKYSIGLDIGTNSVGWAVITDEYKVPSKKFKVLGNTDRHSIKKNLIGALLFDSGETAEATRLKRTARRRYTRRKNRICYLQEIFSNEMAKVDDSFFHRLEESFLVEEDKKHERHPIFGNIVDEVAYHEKYPTIYHLRKKLVDSTDKADLRLIYLALAHMIKFRGHFLIEGDLNPDNSDVDKLFIQLVQTYNQLFEENPINASGVDAKAILSARLSKSRRLENLIAQLPGEKKNGLFGNLIALSLGLTPNFKSNFDLAEDAKLQLSKDTYDDDLDNLLAQIGDQYADLFLAAKNLSDAILLSDILRVNTEITKAPLSASMIKRYDEHHQDLTLLKALVRQQLPEKYKEIFFDQSKNGYAGYIDGGASQEEFYKFIKPILEKMDGTEELLVKLNREDLLRKQRTFDNGSIPHQIHLGELHAILRRQEDFYPFLKDNREKIEKILTFRIPYYVGPLARGNSRFAWMTRKSEETITPWNFEEVVDKGASAQSFIERMTNFDKNLPNEKVLPKHSLLYEYFTVYNELTKVKYVTEGMRKPAFLSGEQKKAIVDLLFKTNRKVTVKQLKEDYFKKIECFDSVEISGVEDRFNASLGTYHDLLKIIKDKDFLDNEENEDILEDIVLTLTLFEDREMIEERLKTYAHLFDDKVMKQLKRRRYTGWGRLSRKLINGIRDKQSGKTILDFLKSDGFANRNFMQLIHDDSLTFKEDIQKAQVSGQGDSLHEHIANLAGSPAIKKGILQTVKVVDELVKVMGRHKPENIVIEMARENQTTQKGQKNSRERMKRIEEGIKELGSQILKEHPVENTQLQNEKLYLYYLQNGRDMYVDQELDINRLSDYDVDHIVPQSFLKDDSIDNKVLTRSDKARGKSDNVPSEEVVKKMKNYWRQLLNAKLITQRKFDNLTKAERGGLSELDKAGFIKRQLVETRQITKHVAQILDSRMNTKYDENDKLIREVKVITLKSKLVSDFRKDFQFYKVREINNYHHAHDAYLNAVVGTALIKKYPKLESEFVYGDYKVYDVRKMIAKSEQEIGKATAKYFFYSNIMNFFKTEITLANGEIRKRPLIETNGETGEIVWDKGRDFATVRKVLSMPQVNIVKKTEVQTGGFSKESILPKRNSDKLIARKKDWDPKKYGGFDSPTVAYSVLVVAKVEKGKSKKLKSVKELLGITIMERSSFEKNPIDFLEAKGYKEVKKDLIIKLPKYSLFELENGRKRMLASAGELQKGNELALPSKYVNFLYLASHYEKLKGSPEDNEQKQLFVEQHKHYLDEIIEQISEFSKRVILADANLDKVLSAYNKHRDKPIREQAENIIHLFTLTNLGAPAAFKYFDTTIDRKRYTSTKEVLDATLIHQSITGLYETRIDLSQLGGDGGGGGPAPGGSGGTLNIEDEYRLHETSKEPDVPLGSTWLSDFPQAWAETGGMGLAVRQAPLIIPLKATSTPVSIKQYPMSQEARLGIKPHIQRLLDQGILVPCQSPWNTPLLPVKKPGTNDYRPVQDLREVNKRVEDIHPTVPNPYNLLSGLPPSHQWYTVLDLKDAFFCLRLHPTSQPLFAFEWRDPEMGISGQLTWTRLPQGFKNSPTLFNEALHRDLADFRIQHPDLILLQYVDDLLLAATSEQDCQRGTRALLQTLGNLGYRASAKKAQICQKQVKYLGYLLKEGQRWLTEARKETVMGQPTPKTPRQLREFLGKAGFCRLFIPGFAEMAAPLYPLTKPGTLFNWGPDQQKAYQEIKQALLTAPALGLPDLTKPFELFVDEKQGYAKGVLTQKLGPWRRPVAYLSKKLDPVAAGWPPCLRMVAAIAVLTKDAGKLTMGQPLVILAPHAVEALVKQPPDRWLSNARMTHYQAMLLDTDRVQFGPVVALNPATLLPLPEKEAPHDCLEILAETHGTRPDLTDQPIPDADYTWYTDGSSFLQEGQRRAGAAVTTETEVIWARALPAGTSAQRAELIALTQALKMAEGKKLNVYTDSRYAFATAHVHGEIYRRRGWLTSEGREIKNKNEILALLKALFLPKRLSIIHCPGHQKGNSAEARGNRMADQAAREAAMKAVLETSTLLAGKRTADGSEFEKRTADGSEFESPKKKAKVE

SEQ ID NO: 1026 - protein, 2110 aa, synthetic construct
MPAAKRVKLDGGDKKYSIGLDIGTNSVGWAVITDEYKVPSKKFKVLGNTDRHSIKKNLIGALLFDSGETAEATRLKRTARRRYTRRKNRICYLQEIFSNEMAKVDDSFFHRLEESFLVEEDKKHERHPIFGNIVDEVAYHEKYPTIYHLRKKLVDSTDKADLRLIYLALAHMIKFRGHFLIEGDLNPDNSDVDKLFIQLVQTYNQLFEENPINASGVDAKAILSARLSKSRRLENLIAQLPGEKKNGLFGNLIALSLGLTPNFKSNFDLAEDAKLQLSKDTYDDDLDNLLAQIGDQYADLFLAAKNLSDAILLSDILRVNTEITKAPLSASMIKRYDEHHQDLTLLKALVRQQLPEKYKEIFFDQSKNGYAGYIDGGASQEEFYKFIKPILEKMDGTEELLVKLNREDLLRKQRTFDNGSIPHQIHLGELHAILRRQEDFYPFLKDNREKIEKILTFRIPYYVGPLARGNSRFAWMTRKSEETITPWNFEEVVDKGASAQSFIERMTNFDKNLPNEKVLPKHSLLYEYFTVYNELTKVKYVTEGMRKPAFLSGEQKKAIVDLLFKTNRKVTVKQLKEDYFKKIECFDSVEISGVEDRFNASLGTYHDLLKIIKDKDFLDNEENEDILEDIVLTLTLFEDREMIEERLKTYAHLFDDKVMKQLKRRRYTGWGRLSRKLINGIRDKQSGKTILDFLKSDGFANRNFMQLIHDDSLTFKEDIQKAQVSGQGDSLHEHIANLAGSPAIKKGILQTVKVVDELVKVMGRHKPENIVIEMARENQTTQKGQKNSRERMKRIEEGIKELGSQILKEHPVENTQLQNEKLYLYYLQNGRDMYVDQELDINRLSDYDVDHIVPQSFLKDDSIDNKVLTRSDKARGKSDNVPSEEVVKKMKNYWRQLLNAKLITQRKFDNLTKAERGGLSELDKAGFIKRQLVETRQITKHVAQILDSRMNTKYDENDKLIREVKVITLKSKLVSDFRKDFQFYKVREINNYHHAHDAYLNAVVGTALIKKYPKLESEFVYGDYKVYDVRKMIAKSEQEIGKATAKYFFYSNIMNFFKTEITLANGEIRKRPLIETNGETGEIVWDKGRDFATVRKVLSMPQVNIVKKTEVQTGGFSKESILPKRNSDKLIARKKDWDPKKYGGFDSPTVAYSVLVVAKVEKGKSKKLKSVKELLGITIMERSSFEKNPIDFLEAKGYKEVKKDLIIKLPKYSLFELENGRKRMLASAGELQKGNELALPSKYVNFLYLASHYEKLKGSPEDNEQKQLFVEQHKHYLDEIIEQISEFSKRVILADANLDKVLSAYNKHRDKPIREQAENIIHLFTLTNLGAPAAFKYFDTTIDRKRYTSTKEVLDATLIHQSITGLYETRIDLSQLGGDGGGGGGSGGGGSGGGGSGGGGSGGGGSGGTLNIEDEYRLHETSKEPDVPLGSTWLSDFPQAWAETGGMGLAVRQAPLIIPLKATSTPVSIKQYPMSQEARLGIKPHIQRLLDQGILVPCQSPWNTPLLPVKKPGTNDYRPVQDLREVNKRVEDIHPTVPNPYNLLSGLPPSHQWYTVLDLKDAFFCLRLHPTSQPLFAFEWRDPEMGISGQLTWTRLPQGFKNSPTLFNEALHRDLADFRIQHPDLILLQYVDDLLLAATSEQDCQRGTRALLQTLGNLGYRASAKKAQICQKQVKYLGYLLKEGQRWLTEARKETVMGQPTPKTPRQLREFLGKAGFCRLFIPGFAEMAAPLYPLTKPGTLFNWGPDQQKAYQEIKQALLTAPALGLPDLTKPFELFVDEKQGYAKGVLTQKLGPWRRPVAYLSKKLDPVAAGWPPCLRMVAAIAVLTKDAGKLTMGQPLVILAPHAVEALVKQPPDRWLSNARMTHYQAMLLDTDRVQFGPVVALNPATLLPLPEKEAPHDCLEILAETHGTRPDLTDQPIPDADYTWYTDGSSFLQEGQRRAGAAVTTETEVIWARALPAGTSAQRAELIALTQALKMAEGKKLNVYTDSRYAFATAHVHGEIYRRRGWLTSEGREIKNKNEILALLKALFLPKRLSIIHCPGHQKGNSAEARGNRMADQAAREAAMKAVLETSTLLAGKRTADGSEFEKRTADGSEFESPKKKAKVE

SEQ ID NO: 1027 - protein, 2096 aa, synthetic construct
MPAAKRVKLDGGDKKYSIGLDIGTNSVGWAVITDEYKVPSKKFKVLGNTDRHSIKKNLIGALLFDSGETAEATRLKRTARRRYTRRKNRICYLQEIFSNEMAKVDDSFFHRLEESFLVEEDKKHERHPIFGNIVDEVAYHEKYPTIYHLRKKLVDSTDKADLRLIYLALAHMIKFRGHFLIEGDLNPDNSDVDKLFIQLVQTYNQLFEENPINASGVDAKAILSARLSKSRRLENLIAQLPGEKKNGLFGNLIALSLGLTPNFKSNFDLAEDAKLQLSKDTYDDDLDNLLAQIGDQYADLFLAAKNLSDAILLSDILRVNTEITKAPLSASMIKRYDEHHQDLTLLKALVRQQLPEKYKEIFFDQSKNGYAGYIDGGASQEEFYKFIKPILEKMDGTEELLVKLNREDLLRKQRTFDNGSIPHQIHLGELHAILRRQEDFYPFLKDNREKIEKILTFRIPYYVGPLARGNSRFAWMTRKSEETITPWNFEEVVDKGASAQSFIERMTNFDKNLPNEKVLPKHSLLYEYFTVYNELTKVKYVTEGMRKPAFLSGEQKKAIVDLLFKTNRKVTVKQLKEDYFKKIECFDSVEISGVEDRFNASLGTYHDLLKIIKDKDFLDNEENEDILEDIVLTLTLFEDREMIEERLKTYAHLFDDKVMKQLKRRRYTGWGRLSRKLINGIRDKQSGKTILDFLKSDGFANRNFMQLIHDDSLTFKEDIQKAQVSGQGDSLHEHIANLAGSPAIKKGILQTVKVVDELVKVMGRHKPENIVIEMARENQTTQKGQKNSRERMKRIEEGIKELGSQILKEHPVENTQLQNEKLYLYYLQNGRDMYVDQELDINRLSDYDVDHIVPQSFLKDDSIDNKVLTRSDKARGKSDNVPSEEVVKKMKNYWRQLLNAKLITQRKFDNLTKAERGGLSELDKAGFIKRQLVETRQITKHVAQILDSRMNTKYDENDKLIREVKVITLKSKLVSDFRKDFQFYKVREINNYHHAHDAYLNAVVGTALIKKYPKLESEFVYGDYKVYDVRKMIAKSEQEIGKATAKYFFYSNIMNFFKTEITLANGEIRKRPLIETNGETGEIVWDKGRDFATVRKVLSMPQVNIVKKTEVQTGGFSKESILPKRNSDKLIARKKDWDPKKYGGFDSPTVAYSVLVVAKVEKGKSKKLKSVKELLGITIMERSSFEKNPIDFLEAKGYKEVKKDLIIKLPKYSLFELENGRKRMLASAGELQKGNELALPSKYVNFLYLASHYEKLKGSPEDNEQKQLFVEQHKHYLDEIIEQISEFSKRVILADANLDKVLSAYNKHRDKPIREQAENIIHLFTLTNLGAPAAFKYFDTTIDRKRYTSTKEVLDATLIHQSITGLYETRIDLSQLGGDGGGSSEAAAKPAPGGTLNIEDEYRLHETSKEPDVPLGSTWLSDFPQAWAETGGMGLAVRQAPLIIPLKATSTPVSIKQYPMSQEARLGIKPHIQRLLDQGILVPCQSPWNTPLLPVKKPGTNDYRPVQDLREVNKRVEDIHPTVPNPYNLLSGLPPSHQWYTVLDLKDAFFCLRLHPTSQPLFAFEWRDPEMGISGQLTWTRLPQGFKNSPTLFNEALHRDLADFRIQHPDLILLQYVDDLLLAATSEQDCQRGTRALLQTLGNLGYRASAKKAQICQKQVKYLGYLLKEGQRWLTEARKETVMGQPTPKTPRQLREFLGKAGFCRLFIPGFAEMAAPLYPLTKPGTLFNWGPDQQKAYQEIKQALLTAPALGLPDLTKPFELFVDEKQGYAKGVLTQKLGPWRRPVAYLSKKLDPVAAGWPPCLRMVAAIAVLTKDAGKLTMGQPLVILAPHAVEALVKQPPDRWLSNARMTHYQAMLLDTDRVQFGPVVALNPATLLPLPEKEAPHDCLEILAETHGTRPDLTDQPIPDADYTWYTDGSSFLQEGQRRAGAAVTTETEVIWARALPAGTSAQRAELIALTQALKMAEGKKLNVYTDSRYAFATAHVHGEIYRRRGWLTSEGREIKNKNEILALLKALFLPKRLSIIHCPGHQKGNSAEARGNRMADQAAREAAMKAVLETSTLLAGKRTADGSEFEKRTADGSEFESPKKKAKVE

SEQ ID NO: 1028 - protein, 2101 aa, synthetic construct
MPAAKRVKLDGGDKKYSIGLDIGTNSVGWAVITDEYKVPSKKFKVLGNTDRHSIKKNLIGALLFDSGETAEATRLKRTARRRYTRRKNRICYLQEIFSNEMAKVDDSFFHRLEESFLVEEDKKHERHPIFGNIVDEVAYHEKYPTIYHLRKKLVDSTDKADLRLIYLALAHMIKFRGHFLIEGDLNPDNSDVDKLFIQLVQTYNQLFEENPINASGVDAKAILSARLSKSRRLENLIAQLPGEKKNGLFGNLIALSLGLTPNFKSNFDLAEDAKLQLSKDTYDDDLDNLLAQIGDQYADLFLAAKNLSDAILLSDILRVNTEITKAPLSASMIKRYDEHHQDLTLLKALVRQQLPEKYKEIFFDQSKNGYAGYIDGGASQEEFYKFIKPILEKMDGTEELLVKLNREDLLRKQRTFDNGSIPHQIHLGELHAILRRQEDFYPFLKDNREKIEKILTFRIPYYVGPLARGNSRFAWMTRKSEETITPWNFEEVVDKGASAQSFIERMTNFDKNLPNEKVLPKHSLLYEYFTVYNELTKVKYVTEGMRKPAFLSGEQKKAIVDLLFKTNRKVTVKQLKEDYFKKIECFDSVEISGVEDRFNASLGTYHDLLKIIKDKDFLDNEENEDILEDIVLTLTLFEDREMIEERLKTYAHLFDDKVMKQLKRRRYTGWGRLSRKLINGIRDKQSGKTILDFLKSDGFANRNFMQLIHDDSLTFKEDIQKAQVSGQGDSLHEHIANLAGSPAIKKGILQTVKVVDELVKVMGRHKPENIVIEMARENQTTQKGQKNSRERMKRIEEGIKELGSQILKEHPVENTQLQNEKLYLYYLQNGRDMYVDQELDINRLSDYDVDHIVPQSFLKDDSIDNKVLTRSDKARGKSDNVPSEEVVKKMKNYWRQLLNAKLITQRKFDNLTKAERGGLSELDKAGFIKRQLVETRQITKHVAQILDSRMNTKYDENDKLIREVKVITLKSKLVSDFRKDFQFYKVREINNYHHAHDAYLNAVVGTALIKKYPKLESEFVYGDYKVYDVRKMIAKSEQEIGKATAKYFFYSNIMNFFKTEITLANGEIRKRPLIETNGETGEIVWDKGRDFATVRKVLSMPQVNIVKKTEVQTGGFSKESILPKRNSDKLIARKKDWDPKKYGGFDSPTVAYSVLVVAKVEKGKSKKLKSVKELLGITIMERSSFEKNPIDFLEAKGYKEVKKDLIIKLPKYSLFELENGRKRMLASAGELQKGNELALPSKYVNFLYLASHYEKLKGSPEDNEQKQLFVEQHKHYLDEIIEQISEFSKRVILADANLDKVLSAYNKHRDKPIREQAENIIHLFTLTNLGAPAAFKYFDTTIDRKRYTSTKEVLDATLIHQSITGLYETRIDLSQLGGDGGSGSETPGTSESATPESGGTLNIEDEYRLHETSKEPDVPLGSTWLSDFPQAWAETGGMGLAVRQAPLIIPLKATSTPVSIKQYPMSQEARLGIKPHIQRLLDQGILVPCQSPWNTPLLPVKKPGTNDYRPVQDLREVNKRVEDIHPTVPNPYNLLSGLPPSHQWYTVLDLKDAFFCLRLHPTSQPLFAFEWRDPEMGISGQLTWTRLPQGFKNSPTLFNEALHRDLADFRIQHPDLILLQYVDDLLLAATSEQDCQRGTRALLQTLGNLGYRASAKKAQICQKQVKYLGYLLKEGQRWLTEARKETVMGQPTPKTPRQLREFLGKAGFCRLFIPGFAEMAAPLYPLTKPGTLFNWGPDQQKAYQEIKQALLTAPALGLPDLTKPFELFVDEKQGYAKGVLTQKLGPWRRPVAYLSKKLDPVAAGWPPCLRMVAAIAVLTKDAGKLTMGQPLVILAPHAVEALVKQPPDRWLSNARMTHYQAMLLDTDRVQFGPVVALNPATLLPLPEKEAPHDCLEILAETHGTRPDLTDQPIPDADYTWYTDGSSFLQEGQRRAGAAVTTETEVIWARALPAGTSAQRAELIALTQALKMAEGKKLNVYTDSRYAFATAHVHGEIYRRRGWLTSEGREIKNKNEILALLKALFLPKRLSIIHCPGHQKGNSAEARGNRMADQAAREAAMKAVLETSTLLAGKRTADGSEFEKRTADGSEFESPKKKAKVE

SEQ ID NO: 1029 - protein, 2110 aa, synthetic construct
MPAAKRVKLDGGDKKYSIGLDIGTNSVGWAVITDEYKVPSKKFKVLGNTDRHSIKKNLIGALLFDSGETAEATRLKRTARRRYTRRKNRICYLQEIFSNEMAKVDDSFFHRLEESFLVEEDKKHERHPIFGNIVDEVAYHEKYPTIYHLRKKLVDSTDKADLRLIYLALAHMIKFRGHFLIEGDLNPDNSDVDKLFIQLVQTYNQLFEENPINASGVDAKAILSARLSKSRRLENLIAQLPGEKKNGLFGNLIALSLGLTPNFKSNFDLAEDAKLQLSKDTYDDDLDNLLAQIGDQYADLFLAAKNLSDAILLSDILRVNTEITKAPLSASMIKRYDEHHQDLTLLKALVRQQLPEKYKEIFFDQSKNGYAGYIDGGASQEEFYKFIKPILEKMDGTEELLVKLNREDLLRKQRTFDNGSIPHQIHLGELHAILRRQEDFYPFLKDNREKIEKILTFRIPYYVGPLARGNSRFAWMTRKSEETITPWNFEEVVDKGASAQSFIERMTNFDKNLPNEKVLPKHSLLYEYFTVYNELTKVKYVTEGMRKPAFLSGEQKKAIVDLLFKTNRKVTVKQLKEDYFKKIECFDSVEISGVEDRFNASLGTYHDLLKIIKDKDFLDNEENEDILEDIVLTLTLFEDREMIEERLKTYAHLFDDKVMKQLKRRRYTGWGRLSRKLINGIRDKQSGKTILDFLKSDGFANRNFMQLIHDDSLTFKEDIQKAQVSGQGDSLHEHIANLAGSPAIKKGILQTVKVVDELVKVMGRHKPENIVIEMARENQTTQKGQKNSRERMKRIEEGIKELGSQILKEHPVENTQLQNEKLYLYYLQNGRDMYVDQELDINRLSDYDVDHIVPQSFLKDDSIDNKVLTRSDKARGKSDNVPSEEVVKKMKNYWRQLLNAKLITQRKFDNLTKAERGGLSELDKAGFIKRQLVETRQITKHVAQILDSRMNTKYDENDKLIREVKVITLKSKLVSDFRKDFQFYKVREINNYHHAHDAYLNAVVGTALIKKYPKLESEFVYGDYKVYDVRKMIAKSEQEIGKATAKYFFYSNIMNFFKTEITLANGEIRKRPLIETNGETGEIVWDKGRDFATVRKVLSMPQVNIVKKTEVQTGGFSKESILPKRNSDKLIARKKDWDPKKYGGFDSPTVAYSVLVVAKVEKGKSKKLKSVKELLGITIMERSSFEKNPIDFLEAKGYKEVKKDLIIKLPKYSLFELENGRKRMLASAGELQKGNELALPSKYVNFLYLASHYEKLKGSPEDNEQKQLFVEQHKHYLDEIIEQISEFSKRVILADANLDKVLSAYNKHRDKPIREQAENIIHLFTLTNLGAPAAFKYFDTTIDRKRYTSTKEVLDATLIHQSITGLYETRIDLSQLGGDGGEAAAKEAAAKEAAAKEAAAKEAAAKGGTLNIEDEYRLHETSKEPDVPLGSTWLSDFPQAWAETGGMGLAVRQAPLIIPLKATSTPVSIKQYPMSQEARLGIKPHIQRLLDQGILVPCQSPWNTPLLPVKKPGTNDYRPVQDLREVNKRVEDIHPTVPNPYNLLSGLPPSHQWYTVLDLKDAFFCLRLHPTSQPLFAFEWRDPEMGISGQLTWTRLPQGFKNSPTLFNEALHRDLADFRIQHPDLILLQYVDDLLLAATSEQDCQRGTRALLQTLGNLGYRASAKKAQICQKQVKYLGYLLKEGQRWLTEARKETVMGQPTPKTPRQLREFLGKAGFCRLFIPGFAEMAAPLYPLTKPGTLFNWGPDQQKAYQEIKQALLTAPALGLPDLTKPFELFVDEKQGYAKGVLTQKLGPWRRPVAYLSKKLDPVAAGWPPCLRMVAAIAVLTKDAGKLTMGQPLVILAPHAVEALVKQPPDRWLSNARMTHYQAMLLDTDRVQFGPVVALNPATLLPLPEKEAPHDCLEILAETHGTRPDLTDQPIPDADYTWYTDGSSFLQEGQRRAGAAVTTETEVIWARALPAGTSAQRAELIALTQALKMAEGKKLNVYTDSRYAFATAHVHGEIYRRRGWLTSEGREIKNKNEILALLKALFLPKRLSIIHCPGHQKGNSAEARGNRMADQAAREAAMKAVLETSTLLAGKRTADGSEFEKRTADGSEFESPKKKAKVE

SEQ ID NO: 1030 - protein, 2091 aa, synthetic construct
MPAAKRVKLDGGDKKYSIGLDIGTNSVGWAVITDEYKVPSKKFKVLGNTDRHSIKKNLIGALLFDSGETAEATRLKRTARRRYTRRKNRICYLQEIFSNEMAKVDDSFFHRLEESFLVEEDKKHERHPIFGNIVDEVAYHEKYPTIYHLRKKLVDSTDKADLRLIYLALAHMIKFRGHFLIEGDLNPDNSDVDKLFIQLVQTYNQLFEENPINASGVDAKAILSARLSKSRRLENLIAQLPGEKKNGLFGNLIALSLGLTPNFKSNFDLAEDAKLQLSKDTYDDDLDNLLAQIGDQYADLFLAAKNLSDAILLSDILRVNTEITKAPLSASMIKRYDEHHQDLTLLKALVRQQLPEKYKEIFFDQSKNGYAGYIDGGASQEEFYKFIKPILEKMDGTEELLVKLNREDLLRKQRTFDNGSIPHQIHLGELHAILRRQEDFYPFLKDNREKIEKILTFRIPYYVGPLARGNSRFAWMTRKSEETITPWNFEEVVDKGASAQSFIERMTNFDKNLPNEKVLPKHSLLYEYFTVYNELTKVKYVTEGMRKPAFLSGEQKKAIVDLLFKTNRKVTVKQLKEDYFKKIECFDSVEISGVEDRFNASLGTYHDLLKIIKDKDFLDNEENEDILEDIVLTLTLFEDREMIEERLKTYAHLFDDKVMKQLKRRRYTGWGRLSRKLINGIRDKQSGKTILDFLKSDGFANRNFMQLIHDDSLTFKEDIQKAQVSGQGDSLHEHIANLAGSPAIKKGILQTVKVVDELVKVMGRHKPENIVIEMARENQTTQKGQKNSRERMKRIEEGIKELGSQILKEHPVENTQLQNEKLYLYYLQNGRDMYVDQELDINRLSDYDVDHIVPQSFLKDDSIDNKVLTRSDKARGKSDNVPSEEVVKKMKNYWRQLLNAKLITQRKFDNLTKAERGGLSELDKAGFIKRQLVETRQITKHVAQILDSRMNTKYDENDKLIREVKVITLKSKLVSDFRKDFQFYKVREINNYHHAHDAYLNAVVGTALIKKYPKLESEFVYGDYKVYDVRKMIAKSEQEIGKATAKYFFYSNIMNFFKTEITLANGEIRKRPLIETNGETGEIVWDKGRDFATVRKVLSMPQVNIVKKTEVQTGGFSKESILPKRNSDKLIARKKDWDPKKYGGFDSPTVAYSVLVVAKVEKGKSKKLKSVKELLGITIMERSSFEKNPIDFLEAKGYKEVKKDLIIKLPKYSLFELENGRKRMLASAGELQKGNELALPSKYVNFLYLASHYEKLKGSPEDNEQKQLFVEQHKHYLDEIIEQISEFSKRVILADANLDKVLSAYNKHRDKPIREQAENIIHLFTLTNLGAPAAFKYFDTTIDRKRYTSTKEVLDATLIHQSITGLYETRIDLSQLGGDGGPAPGGSGGTLNIEDEYRLHETSKEPDVPLGSTWLSDFPQAWAETGGMGLAVRQAPLIIPLKATSTPVSIKQYPMSQEARLGIKPHIQRLLDQGILVPCQSPWNTPLLPVKKPGTNDYRPVQDLREVNKRVEDIHPTVPNPYNLLSGLPPSHQWYTVLDLKDAFFCLRLHPTSQPLFAFEWRDPEMGISGQLTWTRLPQGFKNSPTLFNEALHRDLADFRIQHPDLILLQYVDDLLLAATSEQDCQRGTRALLQTLGNLGYRASAKKAQICQKQVKYLGYLLKEGQRWLTEARKETVMGQPTPKTPRQLREFLGKAGFCRLFIPGFAEMAAPLYPLTKPGTLFNWGPDQQKAYQEIKQALLTAPALGLPDLTKPFELFVDEKQGYAKGVLTQKLGPWRRPVAYLSKKLDPVAAGWPPCLRMVAAIAVLTKDAGKLTMGQPLVILAPHAVEALVKQPPDRWLSNARMTHYQAMLLDTDRVQFGPVVALNPATLLPLPEKEAPHDCLEILAETHGTRPDLTDQPIPDADYTWYTDGSSFLQEGQRRAGAAVTTETEVIWARALPAGTSAQRAELIALTQALKMAEGKKLNVYTDSRYAFATAHVHGEIYRRRGWLTSEGREIKNKNEILALLKALFLPKRLSIIHCPGHQKGNSAEARGNRMADQAAREAAMKAVLETSTLLAGKRTADGSEFEKRTADGSEFESPKKKAKVE

SEQ ID NO: 1031 - protein, 2091 aa, synthetic construct
MPAAKRVKLDGGDKKYSIGLDIGTNSVGWAVITDEYKVPSKKFKVLGNTDRHSIKKNLIGALLFDSGETAEATRLKRTARRRYTRRKNRICYLQEIFSNEMAKVDDSFFHRLEESFLVEEDKKHERHPIFGNIVDEVAYHEKYPTIYHLRKKLVDSTDKADLRLIYLALAHMIKFRGHFLIEGDLNPDNSDVDKLFIQLVQTYNQLFEENPINASGVDAKAILSARLSKSRRLENLIAQLPGEKKNGLFGNLIALSLGLTPNFKSNFDLAEDAKLQLSKDTYDDDLDNLLAQIGDQYADLFLAAKNLSDAILLSDILRVNTEITKAPLSASMIKRYDEHHQDLTLLKALVRQQLPEKYKEIFFDQSKNGYAGYIDGGASQEEFYKFIKPILEKMDGTEELLVKLNREDLLRKQRTFDNGSIPHQIHLGELHAILRRQEDFYPFLKDNREKIEKILTFRIPYYVGPLARGNSRFAWMTRKSEETITPWNFEEVVDKGASAQSFIERMTNFDKNLPNEKVLPKHSLLYEYFTVYNELTKVKYVTEGMRKPAFLSGEQKKAIVDLLFKTNRKVTVKQLKEDYFKKIECFDSVEISGVEDRFNASLGTYHDLLKIIKDKDFLDNEENEDILEDIVLTLTLFEDREMIEERLKTYAHLFDDKVMKQLKRRRYTGWGRLSRKLINGIRDKQSGKTILDFLKSDGFANRNFMQLIHDDSLTFKEDIQKAQVSGQGDSLHEHIANLAGSPAIKKGILQTVKVVDELVKVMGRHKPENIVIEMARENQTTQKGQKNSRERMKRIEEGIKELGSQILKEHPVENTQLQNEKLYLYYLQNGRDMYVDQELDINRLSDYDVDHIVPQSFLKDDSIDNKVLTRSDKARGKSDNVPSEEVVKKMKNYWRQLLNAKLITQRKFDNLTKAERGGLSELDKAGFIKRQLVETRQITKHVAQILDSRMNTKYDENDKLIREVKVITLKSKLVSDFRKDFQFYKVREINNYHHAHDAYLNAVVGTALIKKYPKLESEFVYGDYKVYDVRKMIAKSEQEIGKATAKYFFYSNIMNFFKTEITLANGEIRKRPLIETNGETGEIVWDKGRDFATVRKVLSMPQVNIVKKTEVQTGGFSKESILPKRNSDKLIARKKDWDPKKYGGFDSPTVAYSVLVVAKVEKGKSKKLKSVKELLGITIMERSSFEKNPIDFLEAKGYKEVKKDLIIKLPKYSLFELENGRKRMLASAGELQKGNELALPSKYVNFLYLASHYEKLKGSPEDNEQKQLFVEQHKHYLDEIIEQISEFSKRVILADANLDKVLSAYNKHRDKPIREQAENIIHLFTLTNLGAPAAFKYFDTTIDRKRYTSTKEVLDATLIHQSITGLYETRIDLSQLGGDGGGGGGSSGGTLNIEDEYRLHETSKEPDVPLGSTWLSDFPQAWAETGGMGLAVRQAPLIIPLKATSTPVSIKQYPMSQEARLGIKPHIQRLLDQGILVPCQSPWNTPLLPVKKPGTNDYRPVQDLREVNKRVEDIHPTVPNPYNLLSGLPPSHQWYTVLDLKDAFFCLRLHPTSQPLFAFEWRDPEMGISGQLTWTRLPQGFKNSPTLFNEALHRDLADFRIQHPDLILLQYVDDLLLAATSEQDCQRGTRALLQTLGNLGYRASAKKAQICQKQVKYLGYLLKEGQRWLTEARKETVMGQPTPKTPRQLREFLGKAGFCRLFIPGFAEMAAPLYPLTKPGTLFNWGPDQQKAYQEIKQALLTAPALGLPDLTKPFELFVDEKQGYAKGVLTQKLGPWRRPVAYLSKKLDPVAAGWPPCLRMVAAIAVLTKDAGKLTMGQPLVILAPHAVEALVKQPPDRWLSNARMTHYQAMLLDTDRVQFGPVVALNPATLLPLPEKEAPHDCLEILAETHGTRPDLTDQPIPDADYTWYTDGSSFLQEGQRRAGAAVTTETEVIWARALPAGTSAQRAELIALTQALKMAEGKKLNVYTDSRYAFATAHVHGEIYRRRGWLTSEGREIKNKNEILALLKALFLPKRLSIIHCPGHQKGNSAEARGNRMADQAAREAAMKAVLETSTLLAGKRTADGSEFEKRTADGSEFESPKKKAKVE

SEQ ID NO: 1032 - protein, 2094 aa, synthetic construct
MPAAKRVKLDGGDKKYSIGLDIGTNSVGWAVITDEYKVPSKKFKVLGNTDRHSIKKNLIGALLFDSGETAEATRLKRTARRRYTRRKNRICYLQEIFSNEMAKVDDSFFHRLEESFLVEEDKKHERHPIFGNIVDEVAYHEKYPTIYHLRKKLVDSTDKADLRLIYLALAHMIKFRGHFLIEGDLNPDNSDVDKLFIQLVQTYNQLFEENPINASGVDAKAILSARLSKSRRLENLIAQLPGEKKNGLFGNLIALSLGLTPNFKSNFDLAEDAKLQLSKDTYDDDLDNLLAQIGDQYADLFLAAKNLSDAILLSDILRVNTEITKAPLSASMIKRYDEHHQDLTLLKALVRQQLPEKYKEIFFDQSKNGYAGYIDGGASQEEFYKFIKPILEKMDGTEELLVKLNREDLLRKQRTFDNGSIPHQIHLGELHAILRRQEDFYPFLKDNREKIEKILTFRIPYYVGPLARGNSRFAWMTRKSEETITPWNFEEVVDKGASAQSFIERMTNFDKNLPNEKVLPKHSLLYEYFTVYNELTKVKYVTEGMRKPAFLSGEQKKAIVDLLFKTNRKVTVKQLKEDYFKKIECFDSVEISGVEDRFNASLGTYHDLLKIIKDKDFLDNEENEDILEDIVLTLTLFEDREMIEERLKTYAHLFDDKVMKQLKRRRYTGWGRLSRKLINGIRDKQSGKTILDFLKSDGFANRNFMQLIHDDSLTFKEDIQKAQVSGQGDSLHEHIANLAGSPAIKKGILQTVKVVDELVKVMGRHKPENIVIEMARENQTTQKGQKNSRERMKRIEEGIKELGSQILKEHPVENTQLQNEKLYLYYLQNGRDMYVDQELDINRLSDYDVDHIVPQSFLKDDSIDNKVLTRSDKARGKSDNVPSEEVVKKMKNYWRQLLNAKLITQRKFDNLTKAERGGLSELDKAGFIKRQLVETRQITKHVAQILDSRMNTKYDENDKLIREVKVITLKSKLVSDFRKDFQFYKVREINNYHHAHDAYLNAVVGTALIKKYPKLESEFVYGDYKVYDVRKMIAKSEQEIGKATAKYFFYSNIMNFFKTEITLANGEIRKRPLIETNGETGEIVWDKGRDFATVRKVLSMPQVNIVKKTEVQTGGFSKESILPKRNSDKLIARKKDWDPKKYGGFDSPTVAYSVLVVAKVEKGKSKKLKSVKELLGITIMERSSFEKNPIDFLEAKGYKEVKKDLIIKLPKYSLFELENGRKRMLASAGELQKGNELALPSKYVNFLYLASHYEKLKGSPEDNEQKQLFVEQHKHYLDEIIEQISEFSKRVILADANLDKVLSAYNKHRDKPIREQAENIIHLFTLTNLGAPAAFKYFDTTIDRKRYTSTKEVLDATLIHQSITGLYETRIDLSQLGGDGGPAPAPAPAPGGTLNIEDEYRLHETSKEPDVPLGSTWLSDFPQAWAETGGMGLAVRQAPLIIPLKATSTPVSIKQYPMSQEARLGIKPHIQRLLDQGILVPCQSPWNTPLLPVKKPGTNDYRPVQDLREVNKRVEDIHPTVPNPYNLLSGLPPSHQWYTVLDLKDAFFCLRLHPTSQPLFAFEWRDPEMGISGQLTWTRLPQGFKNSPTLFNEALHRDLADFRIQHPDLILLQYVDDLLLAATSEQDCQRGTRALLQTLGNLGYRASAKKAQICQKQVKYLGYLLKEGQRWLTEARKETVMGQPTPKTPRQLREFLGKAGFCRLFIPGFAEMAAPLYPLTKPGTLFNWGPDQQKAYQEIKQALLTAPALGLPDLTKPFELFVDEKQGYAKGVLTQKLGPWRRPVAYLSKKLDPVAAGWPPCLRMVAAIAVLTKDAGKLTMGQPLVILAPHAVEALVKQPPDRWLSNARMTHYQAMLLDTDRVQFGPVVALNPATLLPLPEKEAPHDCLEILAETHGTRPDLTDQPIPDADYTWYTDGSSFLQEGQRRAGAAVTTETEVIWARALPAGTSAQRAELIALTQALKMAEGKKLNVYTDSRYAFATAHVHGEIYRRRGWLTSEGREIKNKNEILALLKALFLPKRLSIIHCPGHQKGNSAEARGNRMADQAAREAAMKAVLETSTLLAGKRTADGSEFEKRTADGSEFESPKKKAKVE

SEQ ID NO: 1033 - protein, 2094 aa, synthetic construct
MPAAKRVKLDGGDKKYSIGLDIGTNSVGWAVITDEYKVPSKKFKVLGNTDRHSIKKNLIGALLFDSGETAEATRLKRTARRRYTRRKNRICYLQEIFSNEMAKVDDSFFHRLEESFLVEEDKKHERHPIFGNIVDEVAYHEKYPTIYHLRKKLVDSTDKADLRLIYLALAHMIKFRGHFLIEGDLNPDNSDVDKLFIQLVQTYNQLFEENPINASGVDAKAILSARLSKSRRLENLIAQLPGEKKNGLFGNLIALSLGLTPNFKSNFDLAEDAKLQLSKDTYDDDLDNLLAQIGDQYADLFLAAKNLSDAILLSDILRVNTEITKAPLSASMIKRYDEHHQDLTLLKALVRQQLPEKYKEIFFDQSKNGYAGYIDGGASQEEFYKFIKPILEKMDGTEELLVKLNREDLLRKQRTFDNGSIPHQIHLGELHAILRRQEDFYPFLKDNREKIEKILTFRIPYYVGPLARGNSRFAWMTRKSEETITPWNFEEVVDKGASAQSFIERMTNFDKNLPNEKVLPKHSLLYEYFTVYNELTKVKYVTEGMRKPAFLSGEQKKAIVDLLFKTNRKVTVKQLKEDYFKKIECFDSVEISGVEDRFNASLGTYHDLLKIIKDKDFLDNEENEDILEDIVLTLTLFEDREMIEERLKTYAHLFDDKVMKQLKRRRYTGWGRLSRKLINGIRDKQSGKTILDFLKSDGFANRNFMQLIHDDSLTFKEDIQKAQVSGQGDSLHEHIANLAGSPAIKKGILQTVKVVDELVKVMGRHKPENIVIEMARENQTTQKGQKNSRERMKRIEEGIKELGSQILKEHPVENTQLQNEKLYLYYLQNGRDMYVDQELDINRLSDYDVDHIVPQSFLKDDSIDNKVLTRSDKARGKSDNVPSEEVVKKMKNYWRQLLNAKLITQRKFDNLTKAERGGLSELDKAGFIKRQLVETRQITKHVAQILDSRMNTKYDENDKLIREVKVITLKSKLVSDFRKDFQFYKVREINNYHHAHDAYLNAVVGTALIKKYPKLESEFVYGDYKVYDVRKMIAKSEQEIGKATAKYFFYSNIMNFFKTEITLANGEIRKRPLIETNGETGEIVWDKGRDFATVRKVLSMPQVNIVKKTEVQTGGFSKESILPKRNSDKLIARKKDWDPKKYGGFDSPTVAYSVLVVAKVEKGKSKKLKSVKELLGITIMERSSFEKNPIDFLEAKGYKEVKKDLIIKLPKYSLFELENGRKRMLASAGELQKGNELALPSKYVNFLYLASHYEKLKGSPEDNEQKQLFVEQHKHYLDEIIEQISEFSKRVILADANLDKVLSAYNKHRDKPIREQAENIIHLFTLTNLGAPAAFKYFDTTIDRKRYTSTKEVLDATLIHQSITGLYETRIDLSQLGGDGGPAPGSSGGGGGTLNIEDEYRLHETSKEPDVPLGSTWLSDFPQAWAETGGMGLAVRQAPLIIPLKATSTPVSIKQYPMSQEARLGIKPHIQRLLDQGILVPCQSPWNTPLLPVKKPGTNDYRPVQDLREVNKRVEDIHPTVPNPYNLLSGLPPSHQWYTVLDLKDAFFCLRLHPTSQPLFAFEWRDPEMGISGQLTWTRLPQGFKNSPTLFNEALHRDLADFRIQHPDLILLQYVDDLLLAATSEQDCQRGTRALLQTLGNLGYRASAKKAQICQKQVKYLGYLLKEGQRWLTEARKETVMGQPTPKTPRQLREFLGKAGFCRLFIPGFAEMAAPLYPLTKPGTLFNWGPDQQKAYQEIKQALLTAPALGLPDLTKPFELFVDEKQGYAKGVLTQKLGPWRRPVAYLSKKLDPVAAGWPPCLRMVAAIAVLTKDAGKLTMGQPLVILAPHAVEALVKQPPDRWLSNARMTHYQAMLLDTDRVQFGPVVALNPATLLPLPEKEAPHDCLEILAETHGTRPDLTDQPIPDADYTWYTDGSSFLQEGQRRAGAAVTTETEVIWARALPAGTSAQRAELIALTQALKMAEGKKLNVYTDSRYAFATAHVHGEIYRRRGWLTSEGREIKNKNEILALLKALFLPKRLSIIHCPGHQKGNSAEARGNRMADQAAREAAMKAVLETSTLLAGKRTADGSEFEKRTADGSEFESPKKKAKVE

SEQ ID NO: 1034 - protein, 2096 aa, synthetic construct
MPAAKRVKLDGGDKKYSIGLDIGTNSVGWAVITDEYKVPSKKFKVLGNTDRHSIKKNLIGALLFDSGETAEATRLKRTARRRYTRRKNRICYLQEIFSNEMAKVDDSFFHRLEESFLVEEDKKHERHPIFGNIVDEVAYHEKYPTIYHLRKKLVDSTDKADLRLIYLALAHMIKFRGHFLIEGDLNPDNSDVDKLFIQLVQTYNQLFEENPINASGVDAKAILSARLSKSRRLENLIAQLPGEKKNGLFGNLIALSLGLTPNFKSNFDLAEDAKLQLSKDTYDDDLDNLLAQIGDQYADLFLAAKNLSDAILLSDILRVNTEITKAPLSASMIKRYDEHHQDLTLLKALVRQQLPEKYKEIFFDQSKNGYAGYIDGGASQEEFYKFIKPILEKMDGTEELLVKLNREDLLRKQRTFDNGSIPHQIHLGELHAILRRQEDFYPFLKDNREKIEKILTFRIPYYVGPLARGNSRFAWMTRKSEETITPWNFEEVVDKGASAQSFIERMTNFDKNLPNEKVLPKHSLLYEYFTVYNELTKVKYVTEGMRKPAFLSGEQKKAIVDLLFKTNRKVTVKQLKEDYFKKIECFDSVEISGVEDRFNASLGTYHDLLKIIKDKDFLDNEENEDILEDIVLTLTLFEDREMIEERLKTYAHLFDDKVMKQLKRRRYTGWGRLSRKLINGIRDKQSGKTILDFLKSDGFANRNFMQLIHDDSLTFKEDIQKAQVSGQGDSLHEHIANLAGSPAIKKGILQTVKVVDELVKVMGRHKPENIVIEMARENQTTQKGQKNSRERMKRIEEGIKELGSQILKEHPVENTQLQNEKLYLYYLQNGRDMYVDQELDINRLSDYDVDHIVPQSFLKDDSIDNKVLTRSDKARGKSDNVPSEEVVKKMKNYWRQLLNAKLITQRKFDNLTKAERGGLSELDKAGFIKRQLVETRQITKHVAQILDSRMNTKYDENDKLIREVKVITLKSKLVSDFRKDFQFYKVREINNYHHAHDAYLNAVVGTALIKKYPKLESEFVYGDYKVYDVRKMIAKSEQEIGKATAKYFFYSNIMNFFKTEITLANGEIRKRPLIETNGETGEIVWDKGRDFATVRKVLSMPQVNIVKKTEVQTGGFSKESILPKRNSDKLIARKKDWDPKKYGGFDSPTVAYSVLVVAKVEKGKSKKLKSVKELLGITIMERSSFEKNPIDFLEAKGYKEVKKDLIIKLPKYSLFELENGRKRMLASAGELQKGNELALPSKYVNFLYLASHYEKLKGSPEDNEQKQLFVEQHKHYLDEIIEQISEFSKRVILADANLDKVLSAYNKHRDKPIREQAENIIHLFTLTNLGAPAAFKYFDTTIDRKRYTSTKEVLDATLIHQSITGLYETRIDLSQLGGDGGPAPGGSEAAAKGGTLNIEDEYRLHETSKEPDVPLGSTWLSDFPQAWAETGGMGLAVRQAPLIIPLKATSTPVSIKQYPMSQEARLGIKPHIQRLLDQGILVPCQSPWNTPLLPVKKPGTNDYRPVQDLREVNKRVEDIHPTVPNPYNLLSGLPPSHQWYTVLDLKDAFFCLRLHPTSQPLFAFEWRDPEMGISGQLTWTRLPQGFKNSPTLFNEALHRDLADFRIQHPDLILLQYVDDLLLAATSEQDCQRGTRALLQTLGNLGYRASAKKAQICQKQVKYLGYLLKEGQRWLTEARKETVMGQPTPKTPRQLREFLGKAGFCRLFIPGFAEMAAPLYPLTKPGTLFNWGPDQQKAYQEIKQALLTAPALGLPDLTKPFELFVDEKQGYAKGVLTQKLGPWRRPVAYLSKKLDPVAAGWPPCLRMVAAIAVLTKDAGKLTMGQPLVILAPHAVEALVKQPPDRWLSNARMTHYQAMLLDTDRVQFGPVVALNPATLLPLPEKEAPHDCLEILAETHGTRPDLTDQPIPDADYTWYTDGSSFLQEGQRRAGAAVTTETEVIWARALPAGTSAQRAELIALTQALKMAEGKKLNVYTDSRYAFATAHVHGEIYRRRGWLTSEGREIKNKNEILALLKALFLPKRLSIIHCPGHQKGNSAEARGNRMADQAAREAAMKAVLETSTLLAGKRTADGSEFEKRTADGSEFESPKKKAKVE

SEQ ID NO: 1035 - protein, 2096 aa, synthetic construct
MPAAKRVKLDGGDKKYSIGLDIGTNSVGWAVITDEYKVPSKKFKVLGNTDRHSIKKNLIGALLFDSGETAEATRLKRTARRRYTRRKNRICYLQEIFSNEMAKVDDSFFHRLEESFLVEEDKKHERHPIFGNIVDEVAYHEKYPTIYHLRKKLVDSTDKADLRLIYLALAHMIKFRGHFLIEGDLNPDNSDVDKLFIQLVQTYNQLFEENPINASGVDAKAILSARLSKSRRLENLIAQLPGEKKNGLFGNLIALSLGLTPNFKSNFDLAEDAKLQLSKDTYDDDLDNLLAQIGDQYADLFLAAKNLSDAILLSDILRVNTEITKAPLSASMIKRYDEHHQDLTLLKALVRQQLPEKYKEIFFDQSKNGYAGYIDGGASQEEFYKFIKPILEKMDGTEELLVKLNREDLLRKQRTFDNGSIPHQIHLGELHAILRRQEDFYPFLKDNREKIEKILTFRIPYYVGPLARGNSRFAWMTRKSEETITPWNFEEVVDKGASAQSFIERMTNFDKNLPNEKVLPKHSLLYEYFTVYNELTKVKYVTEGMRKPAFLSGEQKKAIVDLLFKTNRKVTVKQLKEDYFKKIECFDSVEISGVEDRFNASLGTYHDLLKIIKDKDFLDNEENEDILEDIVLTLTLFEDREMIEERLKTYAHLFDDKVMKQLKRRRYTGWGRLSRKLINGIRDKQSGKTILDFLKSDGFANRNFMQLIHDDSLTFKEDIQKAQVSGQGDSLHEHIANLAGSPAIKKGILQTVKVVDELVKVMGRHKPENIVIEMARENQTTQKGQKNSRERMKRIEEGIKELGSQILKEHPVENTQLQNEKLYLYYLQNGRDMYVDQELDINRLSDYDVDHIVPQSFLKDDSIDNKVLTRSDKARGKSDNVPSEEVVKKMKNYWRQLLNAKLITQRKFDNLTKAERGGLSELDKAGFIKRQLVETRQITKHVAQILDSRMNTKYDENDKLIREVKVITLKSKLVSDFRKDFQFYKVREINNYHHAHDAYLNAVVGTALIKKYPKLESEFVYGDYKVYDVRKMIAKSEQEIGKATAKYFFYSNIMNFFKTEITLANGEIRKRPLIETNGETGEIVWDKGRDFATVRKVLSMPQVNIVKKTEVQTGGFSKESILPKRNSDKLIARKKDWDPKKYGGFDSPTVAYSVLVVAKVEKGKSKKLKSVKELLGITIMERSSFEKNPIDFLEAKGYKEVKKDLIIKLPKYSLFELENGRKRMLASAGELQKGNELALPSKYVNFLYLASHYEKLKGSPEDNEQKQLFVEQHKHYLDEIIEQISEFSKRVILADANLDKVLSAYNKHRDKPIREQAENIIHLFTLTNLGAPAAFKYFDTTIDRKRYTSTKEVLDATLIHQSITGLYETRIDLSQLGGDGGGGSEAAAKPAPGGTLNIEDEYRLHETSKEPDVPLGSTWLSDFPQAWAETGGMGLAVRQAPLIIPLKATSTPVSIKQYPMSQEARLGIKPHIQRLLDQGILVPCQSPWNTPLLPVKKPGTNDYRPVQDLREVNKRVEDIHPTVPNPYNLLSGLPPSHQWYTVLDLKDAFFCLRLHPTSQPLFAFEWRDPEMGISGQLTWTRLPQGFKNSPTLFNEALHRDLADFRIQHPDLILLQYVDDLLLAATSEQDCQRGTRALLQTLGNLGYRASAKKAQICQKQVKYLGYLLKEGQRWLTEARKETVMGQPTPKTPRQLREFLGKAGFCRLFIPGFAEMAAPLYPLTKPGTLFNWGPDQQKAYQEIKQALLTAPALGLPDLTKPFELFVDEKQGYAKGVLTQKLGPWRRPVAYLSKKLDPVAAGWPPCLRMVAAIAVLTKDAGKLTMGQPLVILAPHAVEALVKQPPDRWLSNARMTHYQAMLLDTDRVQFGPVVALNPATLLPLPEKEAPHDCLEILAETHGTRPDLTDQPIPDADYTWYTDGSSFLQEGQRRAGAAVTTETEVIWARALPAGTSAQRAELIALTQALKMAEGKKLNVYTDSRYAFATAHVHGEIYRRRGWLTSEGREIKNKNEILALLKALFLPKRLSIIHCPGHQKGNSAEARGNRMADQAAREAAMKAVLETSTLLAGKRTADGSEFEKRTADGSEFESPKKKAKVE

SEQ ID NO: 1036 - protein, 2118 aa, synthetic construct
MPAAKRVKLDGGDKKYSIGLDIGTNSVGWAVITDEYKVPSKKFKVLGNTDRHSIKKNLIGALLFDSGETAEATRLKRTARRRYTRRKNRICYLQEIFSNEMAKVDDSFFHRLEESFLVEEDKKHERHPIFGNIVDEVAYHEKYPTIYHLRKKLVDSTDKADLRLIYLALAHMIKFRGHFLIEGDLNPDNSDVDKLFIQLVQTYNQLFEENPINASGVDAKAILSARLSKSRRLENLIAQLPGEKKNGLFGNLIALSLGLTPNFKSNFDLAEDAKLQLSKDTYDDDLDNLLAQIGDQYADLFLAAKNLSDAILLSDILRVNTEITKAPLSASMIKRYDEHHQDLTLLKALVRQQLPEKYKEIFFDQSKNGYAGYIDGGASQEEFYKFIKPILEKMDGTEELLVKLNREDLLRKQRTFDNGSIPHQIHLGELHAILRRQEDFYPFLKDNREKIEKILTFRIPYYVGPLARGNSRFAWMTRKSEETITPWNFEEVVDKGASAQSFIERMTNFDKNLPNEKVLPKHSLLYEYFTVYNELTKVKYVTEGMRKPAFLSGEQKKAIVDLLFKTNRKVTVKQLKEDYFKKIECFDSVEISGVEDRFNASLGTYHDLLKIIKDKDFLDNEENEDILEDIVLTLTLFEDREMIEERLKTYAHLFDDKVMKQLKRRRYTGWGRLSRKLINGIRDKQSGKTILDFLKSDGFANRNFMQLIHDDSLTFKEDIQKAQVSGQGDSLHEHIANLAGSPAIKKGILQTVKVVDELVKVMGRHKPENIVIEMARENQTTQKGQKNSRERMKRIEEGIKELGSQILKEHPVENTQLQNEKLYLYYLQNGRDMYVDQELDINRLSDYDVDHIVPQSFLKDDSIDNKVLTRSDKARGKSDNVPSEEVVKKMKNYWRQLLNAKLITQRKFDNLTKAERGGLSELDKAGFIKRQLVETRQITKHVAQILDSRMNTKYDENDKLIREVKVITLKSKLVSDFRKDFQFYKVREINNYHHAHDAYLNAVVGTALIKKYPKLESEFVYGDYKVYDVRKMIAKSEQEIGKATAKYFFYSNIMNFFKTEITLANGEIRKRPLIETNGETGEIVWDKGRDFATVRKVLSMPQVNIVKKTEVQTGGFSKESILPKRNSDKLIARKKDWDPKKYGGFDSPTVAYSVLVVAKVEKGKSKKLKSVKELLGITIMERSSFEKNPIDFLEAKGYKEVKKDLIIKLPKYSLFELENGRKRMLASAGELQKGNELALPSKYVNFLYLASHYEKLKGSPEDNEQKQLFVEQHKHYLDEIIEQISEFSKRVILADANLDKVLSAYNKHRDKPIREQAENIIHLFTLTNLGAPAAFKYFDTTIDRKRYTSTKEVLDATLIHQSITGLYETRIDLSQLGGDGGSGGSSGGSSGSETPGTSESATPESSGGSSGGSSGGTLNIEDEYRLHETSKEPDVPLGSTWLSDFPQAWAETGGMGLAVRQAPLIIPLKATSTPVSIKQYPMSQEARLGIKPHIQRLLDQGILVPCQSPWNTPLLPVKKPGTNDYRPVQDLREVNKRVEDIHPTVPNPYNLLSGLPPSHQWYTVLDLKDAFFCLRLHPTSQPLFAFEWRDPEMGISGQLTWTRLPQGFKNSPTLFNEALHRDLADFRIQHPDLILLQYVDDLLLAATSEQDCQRGTRALLQTLGNLGYRASAKKAQICQKQVKYLGYLLKEGQRWLTEARKETVMGQPTPKTPRQLREFLGKAGFCRLFIPGFAEMAAPLYPLTKPGTLFNWGPDQQKAYQEIKQALLTAPALGLPDLTKPFELFVDEKQGYAKGVLTQKLGPWRRPVAYLSKKLDPVAAGWPPCLRMVAAIAVLTKDAGKLTMGQPLVILAPHAVEALVKQPPDRWLSNARMTHYQAMLLDTDRVQFGPVVALNPATLLPLPEKEAPHDCLEILAETHGTRPDLTDQPIPDADYTWYTDGSSFLQEGQRRAGAAVTTETEVIWARALPAGTSAQRAELIALTQALKMAEGKKLNVYTDSRYAFATAHVHGEIYRRRGWLTSEGREIKNKNEILALLKALFLPKRLSIIHCPGHQKGNSAEARGNRMADQAAREAAMKAVLETSTLLAGKRTADGSEFEKRTADGSEFESPKKKAKVE

SEQ ID NO: 1037 - protein, 2100 aa, synthetic construct
MPAAKRVKLDGGDKKYSIGLDIGTNSVGWAVITDEYKVPSKKFKVLGNTDRHSIKKNLIGALLFDSGETAEATRLKRTARRRYTRRKNRICYLQEIFSNEMAKVDDSFFHRLEESFLVEEDKKHERHPIFGNIVDEVAYHEKYPTIYHLRKKLVDSTDKADLRLIYLALAHMIKFRGHFLIEGDLNPDNSDVDKLFIQLVQTYNQLFEENPINASGVDAKAILSARLSKSRRLENLIAQLPGEKKNGLFGNLIALSLGLTPNFKSNFDLAEDAKLQLSKDTYDDDLDNLLAQIGDQYADLFLAAKNLSDAILLSDILRVNTEITKAPLSASMIKRYDEHHQDLTLLKALVRQQLPEKYKEIFFDQSKNGYAGYIDGGASQEEFYKFIKPILEKMDGTEELLVKLNREDLLRKQRTFDNGSIPHQIHLGELHAILRRQEDFYPFLKDNREKIEKILTFRIPYYVGPLARGNSRFAWMTRKSEETITPWNFEEVVDKGASAQSFIERMTNFDKNLPNEKVLPKHSLLYEYFTVYNELTKVKYVTEGMRKPAFLSGEQKKAIVDLLFKTNRKVTVKQLKEDYFKKIECFDSVEISGVEDRFNASLGTYHDLLKIIKDKDFLDNEENEDILEDIVLTLTLFEDREMIEERLKTYAHLFDDKVMKQLKRRRYTGWGRLSRKLINGIRDKQSGKTILDFLKSDGFANRNFMQLIHDDSLTFKEDIQKAQVSGQGDSLHEHIANLAGSPAIKKGILQTVKVVDELVKVMGRHKPENIVIEMARENQTTQKGQKNSRERMKRIEEGIKELGSQILKEHPVENTQLQNEKLYLYYLQNGRDMYVDQELDINRLSDYDVDHIVPQSFLKDDSIDNKVLTRSDKARGKSDNVPSEEVVKKMKNYWRQLLNAKLITQRKFDNLTKAERGGLSELDKAGFIKRQLVETRQITKHVAQILDSRMNTKYDENDKLIREVKVITLKSKLVSDFRKDFQFYKVREINNYHHAHDAYLNAVVGTALIKKYPKLESEFVYGDYKVYDVRKMIAKSEQEIGKATAKYFFYSNIMNFFKTEITLANGEIRKRPLIETNGETGEIVWDKGRDFATVRKVLSMPQVNIVKKTEVQTGGFSKESILPKRNSDKLIARKKDWDPKKYGGFDSPTVAYSVLVVAKVEKGKSKKLKSVKELLGITIMERSSFEKNPIDFLEAKGYKEVKKDLIIKLPKYSLFELENGRKRMLASAGELQKGNELALPSKYVNFLYLASHYEKLKGSPEDNEQKQLFVEQHKHYLDEIIEQISEFSKRVILADANLDKVLSAYNKHRDKPIREQAENIIHLFTLTNLGAPAAFKYFDTTIDRKRYTSTKEVLDATLIHQSITGLYETRIDLSQLGGDGGEAAAKGGGGSEAAAKGGTLNIEDEYRLHETSKEPDVPLGSTWLSDFPQAWAETGGMGLAVRQAPLIIPLKATSTPVSIKQYPMSQEARLGIKPHIQRLLDQGILVPCQSPWNTPLLPVKKPGTNDYRPVQDLREVNKRVEDIHPTVPNPYNLLSGLPPSHQWYTVLDLKDAFFCLRLHPTSQPLFAFEWRDPEMGISGQLTWTRLPQGFKNSPTLFNEALHRDLADFRIQHPDLILLQYVDDLLLAATSEQDCQRGTRALLQTLGNLGYRASAKKAQICQKQVKYLGYLLKEGQRWLTEARKETVMGQPTPKTPRQLREFLGKAGFCRLFIPGFAEMAAPLYPLTKPGTLFNWGPDQQKAYQEIKQALLTAPALGLPDLTKPFELFVDEKQGYAKGVLTQKLGPWRRPVAYLSKKLDPVAAGWPPCLRMVAAIAVLTKDAGKLTMGQPLVILAPHAVEALVKQPPDRWLSNARMTHYQAMLLDTDRVQFGPVVALNPATLLPLPEKEAPHDCLEILAETHGTRPDLTDQPIPDADYTWYTDGSSFLQEGQRRAGAAVTTETEVIWARALPAGTSAQRAELIALTQALKMAEGKKLNVYTDSRYAFATAHVHGEIYRRRGWLTSEGREIKNKNEILALLKALFLPKRLSIIHCPGHQKGNSAEARGNRMADQAAREAAMKAVLETSTLLAGKRTADGSEFEKRTADGSEFESPKKKAKVE

SEQ ID NO: 1038 - protein, 2094 aa, synthetic construct
MPAAKRVKLDGGDKKYSIGLDIGTNSVGWAVITDEYKVPSKKFKVLGNTDRHSIKKNLIGALLFDSGETAEATRLKRTARRRYTRRKNRICYLQEIFSNEMAKVDDSFFHRLEESFLVEEDKKHERHPIFGNIVDEVAYHEKYPTIYHLRKKLVDSTDKADLRLIYLALAHMIKFRGHFLIEGDLNPDNSDVDKLFIQLVQTYNQLFEENPINASGVDAKAILSARLSKSRRLENLIAQLPGEKKNGLFGNLIALSLGLTPNFKSNFDLAEDAKLQLSKDTYDDDLDNLLAQIGDQYADLFLAAKNLSDAILLSDILRVNTEITKAPLSASMIKRYDEHHQDLTLLKALVRQQLPEKYKEIFFDQSKNGYAGYIDGGASQEEFYKFIKPILEKMDGTEELLVKLNREDLLRKQRTFDNGSIPHQIHLGELHAILRRQEDFYPFLKDNREKIEKILTFRIPYYVGPLARGNSRFAWMTRKSEETITPWNFEEVVDKGASAQSFIERMTNFDKNLPNEKVLPKHSLLYEYFTVYNELTKVKYVTEGMRKPAFLSGEQKKAIVDLLFKTNRKVTVKQLKEDYFKKIECFDSVEISGVEDRFNASLGTYHDLLKIIKDKDFLDNEENEDILEDIVLTLTLFEDREMIEERLKTYAHLFDDKVMKQLKRRRYTGWGRLSRKLINGIRDKQSGKTILDFLKSDGFANRNFMQLIHDDSLTFKEDIQKAQVSGQGDSLHEHIANLAGSPAIKKGILQTVKVVDELVKVMGRHKPENIVIEMARENQTTQKGQKNSRERMKRIEEGIKELGSQILKEHPVENTQLQNEKLYLYYLQNGRDMYVDQELDINRLSDYDVDHIVPQSFLKDDSIDNKVLTRSDKARGKSDNVPSEEVVKKMKNYWRQLLNAKLITQRKFDNLTKAERGGLSELDKAGFIKRQLVETRQITKHVAQILDSRMNTKYDENDKLIREVKVITLKSKLVSDFRKDFQFYKVREINNYHHAHDAYLNAVVGTALIKKYPKLESEFVYGDYKVYDVRKMIAKSEQEIGKATAKYFFYSNIMNFFKTEITLANGEIRKRPLIETNGETGEIVWDKGRDFATVRKVLSMPQVNIVKKTEVQTGGFSKESILPKRNSDKLIARKKDWDPKKYGGFDSPTVAYSVLVVAKVEKGKSKKLKSVKELLGITIMERSSFEKNPIDFLEAKGYKEVKKDLIIKLPKYSLFELENGRKRMLASAGELQKGNELALPSKYVNFLYLASHYEKLKGSPEDNEQKQLFVEQHKHYLDEIIEQISEFSKRVILADANLDKVLSAYNKHRDKPIREQAENIIHLFTLTNLGAPAAFKYFDTTIDRKRYTSTKEVLDATLIHQSITGLYETRIDLSQLGGDGGGSSPAPGGGGGTLNIEDEYRLHETSKEPDVPLGSTWLSDFPQAWAETGGMGLAVRQAPLIIPLKATSTPVSIKQYPMSQEARLGIKPHIQRLLDQGILVPCQSPWNTPLLPVKKPGTNDYRPVQDLREVNKRVEDIHPTVPNPYNLLSGLPPSHQWYTVLDLKDAFFCLRLHPTSQPLFAFEWRDPEMGISGQLTWTRLPQGFKNSPTLFNEALHRDLADFRIQHPDLILLQYVDDLLLAATSEQDCQRGTRALLQTLGNLGYRASAKKAQICQKQVKYLGYLLKEGQRWLTEARKETVMGQPTPKTPRQLREFLGKAGFCRLFIPGFAEMAAPLYPLTKPGTLFNWGPDQQKAYQEIKQALLTAPALGLPDLTKPFELFVDEKQGYAKGVLTQKLGPWRRPVAYLSKKLDPVAAGWPPCLRMVAAIAVLTKDAGKLTMGQPLVILAPHAVEALVKQPPDRWLSNARMTHYQAMLLDTDRVQFGPVVALNPATLLPLPEKEAPHDCLEILAETHGTRPDLTDQPIPDADYTWYTDGSSFLQEGQRRAGAAVTTETEVIWARALPAGTSAQRAELIALTQALKMAEGKKLNVYTDSRYAFATAHVHGEIYRRRGWLTSEGREIKNKNEILALLKALFLPKRLSIIHCPGHQKGNSAEARGNRMADQAAREAAMKAVLETSTLLAGKRTADGSEFEKRTADGSEFESPKKKAKVE

SEQ ID NO: 1039 - protein, 2096 aa, synthetic construct
MPAAKRVKLDGGDKKYSIGLDIGTNSVGWAVITDEYKVPSKKFKVLGNTDRHSIKKNLIGALLFDSGETAEATRLKRTARRRYTRRKNRICYLQEIFSNEMAKVDDSFFHRLEESFLVEEDKKHERHPIFGNIVDEVAYHEKYPTIYHLRKKLVDSTDKADLRLIYLALAHMIKFRGHFLIEGDLNPDNSDVDKLFIQLVQTYNQLFEENPINASGVDAKAILSARLSKSRRLENLIAQLPGEKKNGLFGNLIALSLGLTPNFKSNFDLAEDAKLQLSKDTYDDDLDNLLAQIGDQYADLFLAAKNLSDAILLSDILRVNTEITKAPLSASMIKRYDEHHQDLTLLKALVRQQLPEKYKEIFFDQSKNGYAGYIDGGASQEEFYKFIKPILEKMDGTEELLVKLNREDLLRKQRTFDNGSIPHQIHLGELHAILRRQEDFYPFLKDNREKIEKILTFRIPYYVGPLARGNSRFAWMTRKSEETITPWNFEEVVDKGASAQSFIERMTNFDKNLPNEKVLPKHSLLYEYFTVYNELTKVKYVTEGMRKPAFLSGEQKKAIVDLLFKTNRKVTVKQLKEDYFKKIECFDSVEISGVEDRFNASLGTYHDLLKIIKDKDFLDNEENEDILEDIVLTLTLFEDREMIEERLKTYAHLFDDKVMKQLKRRRYTGWGRLSRKLINGIRDKQSGKTILDFLKSDGFANRNFMQLIHDDSLTFKEDIQKAQVSGQGDSLHEHIANLAGSPAIKKGILQTVKVVDELVKVMGRHKPENIVIEMARENQTTQKGQKNSRERMKRIEEGIKELGSQILKEHPVENTQLQNEKLYLYYLQNGRDMYVDQELDINRLSDYDVDHIVPQSFLKDDSIDNKVLTRSDKARGKSDNVPSEEVVKKMKNYWRQLLNAKLITQRKFDNLTKAERGGLSELDKAGFIKRQLVETRQITKHVAQILDSRMNTKYDENDKLIREVKVITLKSKLVSDFRKDFQFYKVREINNYHHAHDAYLNAVVGTALIKKYPKLESEFVYGDYKVYDVRKMIAKSEQEIGKATAKYFFYSNIMNFFKTEITLANGEIRKRPLIETNGETGEIVWDKGRDFATVRKVLSMPQVNIVKKTEVQTGGFSKESILPKRNSDKLIARKKDWDPKKYGGFDSPTVAYSVLVVAKVEKGKSKKLKSVKELLGITIMERSSFEKNPIDFLEAKGYKEVKKDLIIKLPKYSLFELENGRKRMLASAGELQKGNELALPSKYVNFLYLASHYEKLKGSPEDNEQKQLFVEQHKHYLDEIIEQISEFSKRVILADANLDKVLSAYNKHRDKPIREQAENIIHLFTLTNLGAPAAFKYFDTTIDRKRYTSTKEVLDATLIHQSITGLYETRIDLSQLGGDGGEAAAKGSSPAPGGTLNIEDEYRLHETSKEPDVPLGSTWLSDFPQAWAETGGMGLAVRQAPLIIPLKATSTPVSIKQYPMSQEARLGIKPHIQRLLDQGILVPCQSPWNTPLLPVKKPGTNDYRPVQDLREVNKRVEDIHPTVPNPYNLLSGLPPSHQWYTVLDLKDAFFCLRLHPTSQPLFAFEWRDPEMGISGQLTWTRLPQGFKNSPTLFNEALHRDLADFRIQHPDLILLQYVDDLLLAATSEQDCQRGTRALLQTLGNLGYRASAKKAQICQKQVKYLGYLLKEGQRWLTEARKETVMGQPTPKTPRQLREFLGKAGFCRLFIPGFAEMAAPLYPLTKPGTLFNWGPDQQKAYQEIKQALLTAPALGLPDLTKPFELFVDEKQGYAKGVLTQKLGPWRRPVAYLSKKLDPVAAGWPPCLRMVAAIAVLTKDAGKLTMGQPLVILAPHAVEALVKQPPDRWLSNARMTHYQAMLLDTDRVQFGPVVALNPATLLPLPEKEAPHDCLEILAETHGTRPDLTDQPIPDADYTWYTDGSSFLQEGQRRAGAAVTTETEVIWARALPAGTSAQRAELIALTQALKMAEGKKLNVYTDSRYAFATAHVHGEIYRRRGWLTSEGREIKNKNEILALLKALFLPKRLSIIHCPGHQKGNSAEARGNRMADQAAREAAMKAVLETSTLLAGKRTADGSEFEKRTADGSEFESPKKKAKVE

SEQ ID NO: 1040 - protein, 2091 aa, synthetic construct
MPAAKRVKLDGGDKKYSIGLDIGTNSVGWAVITDEYKVPSKKFKVLGNTDRHSIKKNLIGALLFDSGETAEATRLKRTARRRYTRRKNRICYLQEIFSNEMAKVDDSFFHRLEESFLVEEDKKHERHPIFGNIVDEVAYHEKYPTIYHLRKKLVDSTDKADLRLIYLALAHMIKFRGHFLIEGDLNPDNSDVDKLFIQLVQTYNQLFEENPINASGVDAKAILSARLSKSRRLENLIAQLPGEKKNGLFGNLIALSLGLTPNFKSNFDLAEDAKLQLSKDTYDDDLDNLLAQIGDQYADLFLAAKNLSDAILLSDILRVNTEITKAPLSASMIKRYDEHHQDLTLLKALVRQQLPEKYKEIFFDQSKNGYAGYIDGGASQEEFYKFIKPILEKMDGTEELLVKLNREDLLRKQRTFDNGSIPHQIHLGELHAILRRQEDFYPFLKDNREKIEKILTFRIPYYVGPLARGNSRFAWMTRKSEETITPWNFEEVVDKGASAQSFIERMTNFDKNLPNEKVLPKHSLLYEYFTVYNELTKVKYVTEGMRKPAFLSGEQKKAIVDLLFKTNRKVTVKQLKEDYFKKIECFDSVEISGVEDRFNASLGTYHDLLKIIKDKDFLDNEENEDILEDIVLTLTLFEDREMIEERLKTYAHLFDDKVMKQLKRRRYTGWGRLSRKLINGIRDKQSGKTILDFLKSDGFANRNFMQLIHDDSLTFKEDIQKAQVSGQGDSLHEHIANLAGSPAIKKGILQTVKVVDELVKVMGRHKPENIVIEMARENQTTQKGQKNSRERMKRIEEGIKELGSQILKEHPVENTQLQNEKLYLYYLQNGRDMYVDQELDINRLSDYDVDHIVPQSFLKDDSIDNKVLTRSDKARGKSDNVPSEEVVKKMKNYWRQLLNAKLITQRKFDNLTKAERGGLSELDKAGFIKRQLVETRQITKHVAQILDSRMNTKYDENDKLIREVKVITLKSKLVSDFRKDFQFYKVREINNYHHAHDAYLNAVVGTALIKKYPKLESEFVYGDYKVYDVRKMIAKSEQEIGKATAKYFFYSNIMNFFKTEITLANGEIRKRPLIETNGETGEIVWDKGRDFATVRKVLSMPQVNIVKKTEVQTGGFSKESILPKRNSDKLIARKKDWDPKKYGGFDSPTVAYSVLVVAKVEKGKSKKLKSVKELLGITIMERSSFEKNPIDFLEAKGYKEVKKDLIIKLPKYSLFELENGRKRMLASAGELQKGNELALPSKYVNFLYLASHYEKLKGSPEDNEQKQLFVEQHKHYLDEIIEQISEFSKRVILADANLDKVLSAYNKHRDKPIREQAENIIHLFTLTNLGAPAAFKYFDTTIDRKRYTSTKEVLDATLIHQSITGLYETRIDLSQLGGDGGGGSGGSGGTLNIEDEYRLHETSKEPDVPLGSTWLSDFPQAWAETGGMGLAVRQAPLIIPLKATSTPVSIKQYPMSQEARLGIKPHIQRLLDQGILVPCQSPWNTPLLPVKKPGTNDYRPVQDLREVNKRVEDIHPTVPNPYNLLSGLPPSHQWYTVLDLKDAFFCLRLHPTSQPLFAFEWRDPEMGISGQLTWTRLPQGFKNSPTLFNEALHRDLADFRIQHPDLILLQYVDDLLLAATSEQDCQRGTRALLQTLGNLGYRASAKKAQICQKQVKYLGYLLKEGQRWLTEARKETVMGQPTPKTPRQLREFLGKAGFCRLFIPGFAEMAAPLYPLTKPGTLFNWGPDQQKAYQEIKQALLTAPALGLPDLTKPFELFVDEKQGYAKGVLTQKLGPWRRPVAYLSKKLDPVAAGWPPCLRMVAAIAVLTKDAGKLTMGQPLVILAPHAVEALVKQPPDRWLSNARMTHYQAMLLDTDRVQFGPVVALNPATLLPLPEKEAPHDCLEILAETHGTRPDLTDQPIPDADYTWYTDGSSFLQEGQRRAGAAVTTETEVIWARALPAGTSAQRAELIALTQALKMAEGKKLNVYTDSRYAFATAHVHGEIYRRRGWLTSEGREIKNKNEILALLKALFLPKRLSIIHCPGHQKGNSAEARGNRMADQAAREAAMKAVLETSTLLAGKRTADGSEFEKRTADGSEFESPKKKAKVE

SEQ ID NO: 1041 - protein, 2096 aa, synthetic construct
MPAAKRVKLDGGDKKYSIGLDIGTNSVGWAVITDEYKVPSKKFKVLGNTDRHSIKKNLIGALLFDSGETAEATRLKRTARRRYTRRKNRICYLQEIFSNEMAKVDDSFFHRLEESFLVEEDKKHERHPIFGNIVDEVAYHEKYPTIYHLRKKLVDSTDKADLRLIYLALAHMIKFRGHFLIEGDLNPDNSDVDKLFIQLVQTYNQLFEENPINASGVDAKAILSARLSKSRRLENLIAQLPGEKKNGLFGNLIALSLGLTPNFKSNFDLAEDAKLQLSKDTYDDDLDNLLAQIGDQYADLFLAAKNLSDAILLSDILRVNTEITKAPLSASMIKRYDEHHQDLTLLKALVRQQLPEKYKEIFFDQSKNGYAGYIDGGASQEEFYKFIKPILEKMDGTEELLVKLNREDLLRKQRTFDNGSIPHQIHLGELHAILRRQEDFYPFLKDNREKIEKILTFRIPYYVGPLARGNSRFAWMTRKSEETITPWNFEEVVDKGASAQSFIERMTNFDKNLPNEKVLPKHSLLYEYFTVYNELTKVKYVTEGMRKPAFLSGEQKKAIVDLLFKTNRKVTVKQLKEDYFKKIECFDSVEISGVEDRFNASLGTYHDLLKIIKDKDFLDNEENEDILEDIVLTLTLFEDREMIEERLKTYAHLFDDKVMKQLKRRRYTGWGRLSRKLINGIRDKQSGKTILDFLKSDGFANRNFMQLIHDDSLTFKEDIQKAQVSGQGDSLHEHIANLAGSPAIKKGILQTVKVVDELVKVMGRHKPENIVIEMARENQTTQKGQKNSRERMKRIEEGIKELGSQILKEHPVENTQLQNEKLYLYYLQNGRDMYVDQELDINRLSDYDVDHIVPQSFLKDDSIDNKVLTRSDKARGKSDNVPSEEVVKKMKNYWRQLLNAKLITQRKFDNLTKAERGGLSELDKAGFIKRQLVETRQITKHVAQILDSRMNTKYDENDKLIREVKVITLKSKLVSDFRKDFQFYKVREINNYHHAHDAYLNAVVGTALIKKYPKLESEFVYGDYKVYDVRKMIAKSEQEIGKATAKYFFYSNIMNFFKTEITLANGEIRKRPLIETNGETGEIVWDKGRDFATVRKVLSMPQVNIVKKTEVQTGGFSKESILPKRNSDKLIARKKDWDPKKYGGFDSPTVAYSVLVVAKVEKGKSKKLKSVKELLGITIMERSSFEKNPIDFLEAKGYKEVKKDLIIKLPKYSLFELENGRKRMLASAGELQKGNELALPSKYVNFLYLASHYEKLKGSPEDNEQKQLFVEQHKHYLDEIIEQISEFSKRVILADANLDKVLSAYNKHRDKPIREQAENIIHLFTLTNLGAPAAFKYFDTTIDRKRYTSTKEVLDATLIHQSITGLYETRIDLSQLGGDGGEAAAKGGSPAPGGTLNIEDEYRLHETSKEPDVPLGSTWLSDFPQAWAETGGMGLAVRQAPLIIPLKATSTPVSIKQYPMSQEARLGIKPHIQRLLDQGILVPCQSPWNTPLLPVKKPGTNDYRPVQDLREVNKRVEDIHPTVPNPYNLLSGLPPSHQWYTVLDLKDAFFCLRLHPTSQPLFAFEWRDPEMGISGQLTWTRLPQGFKNSPTLFNEALHRDLADFRIQHPDLILLQYVDDLLLAATSEQDCQRGTRALLQTLGNLGYRASAKKAQICQKQVKYLGYLLKEGQRWLTEARKETVMGQPTPKTPRQLREFLGKAGFCRLFIPGFAEMAAPLYPLTKPGTLFNWGPDQQKAYQEIKQALLTAPALGLPDLTKPFELFVDEKQGYAKGVLTQKLGPWRRPVAYLSKKLDPVAAGWPPCLRMVAAIAVLTKDAGKLTMGQPLVILAPHAVEALVKQPPDRWLSNARMTHYQAMLLDTDRVQFGPVVALNPATLLPLPEKEAPHDCLEILAETHGTRPDLTDQPIPDADYTWYTDGSSFLQEGQRRAGAAVTTETEVIWARALPAGTSAQRAELIALTQALKMAEGKKLNVYTDSRYAFATAHVHGEIYRRRGWLTSEGREIKNKNEILALLKALFLPKRLSIIHCPGHQKGNSAEARGNRMADQAAREAAMKAVLETSTLLAGKRTADGSEFEKRTADGSEFESPKKKAKVE

SEQ ID NO: 1042 - protein, 2100 aa, synthetic construct
MPAAKRVKLDGGDKKYSIGLDIGTNSVGWAVITDEYKVPSKKFKVLGNTDRHSIKKNLIGALLFDSGETAEATRLKRTARRRYTRRKNRICYLQEIFSNEMAKVDDSFFHRLEESFLVEEDKKHERHPIFGNIVDEVAYHEKYPTIYHLRKKLVDSTDKADLRLIYLALAHMIKFRGHFLIEGDLNPDNSDVDKLFIQLVQTYNQLFEENPINASGVDAKAILSARLSKSRRLENLIAQLPGEKKNGLFGNLIALSLGLTPNFKSNFDLAEDAKLQLSKDTYDDDLDNLLAQIGDQYADLFLAAKNLSDAILLSDILRVNTEITKAPLSASMIKRYDEHHQDLTLLKALVRQQLPEKYKEIFFDQSKNGYAGYIDGGASQEEFYKFIKPILEKMDGTEELLVKLNREDLLRKQRTFDNGSIPHQIHLGELHAILRRQEDFYPFLKDNREKIEKILTFRIPYYVGPLARGNSRFAWMTRKSEETITPWNFEEVVDKGASAQSFIERMTNFDKNLPNEKVLPKHSLLYEYFTVYNELTKVKYVTEGMRKPAFLSGEQKKAIVDLLFKTNRKVTVKQLKEDYFKKIECFDSVEISGVEDRFNASLGTYHDLLKIIKDKDFLDNEENEDILEDIVLTLTLFEDREMIEERLKTYAHLFDDKVMKQLKRRRYTGWGRLSRKLINGIRDKQSGKTILDFLKSDGFANRNFMQLIHDDSLTFKEDIQKAQVSGQGDSLHEHIANLAGSPAIKKGILQTVKVVDELVKVMGRHKPENIVIEMARENQTTQKGQKNSRERMKRIEEGIKELGSQILKEHPVENTQLQNEKLYLYYLQNGRDMYVDQELDINRLSDYDVDHIVPQSFLKDDSIDNKVLTRSDKARGKSDNVPSEEVVKKMKNYWRQLLNAKLITQRKFDNLTKAERGGLSELDKAGFIKRQLVETRQITKHVAQILDSRMNTKYDENDKLIREVKVITLKSKLVSDFRKDFQFYKVREINNYHHAHDAYLNAVVGTALIKKYPKLESEFVYGDYKVYDVRKMIAKSEQEIGKATAKYFFYSNIMNFFKTEITLANGEIRKRPLIETNGETGEIVWDKGRDFATVRKVLSMPQVNIVKKTEVQTGGFSKESILPKRNSDKLIARKKDWDPKKYGGFDSPTVAYSVLVVAKVEKGKSKKLKSVKELLGITIMERSSFEKNPIDFLEAKGYKEVKKDLIIKLPKYSLFELENGRKRMLASAGELQKGNELALPSKYVNFLYLASHYEKLKGSPEDNEQKQLFVEQHKHYLDEIIEQISEFSKRVILADANLDKVLSAYNKHRDKPIREQAENIIHLFTLTNLGAPAAFKYFDTTIDRKRYTSTKEVLDATLIHQSITGLYETRIDLSQLGGDGGGGGGSGGGGSGGGGSGGTLNIEDEYRLHETSKEPDVPLGSTWLSDFPQAWAETGGMGLAVRQAPLIIPLKATSTPVSIKQYPMSQEARLGIKPHIQRLLDQGILVPCQSPWNTPLLPVKKPGTNDYRPVQDLREVNKRVEDIHPTVPNPYNLLSGLPPSHQWYTVLDLKDAFFCLRLHPTSQPLFAFEWRDPEMGISGQLTWTRLPQGFKNSPTLFNEALHRDLADFRIQHPDLILLQYVDDLLLAATSEQDCQRGTRALLQTLGNLGYRASAKKAQICQKQVKYLGYLLKEGQRWLTEARKETVMGQPTPKTPRQLREFLGKAGFCRLFIPGFAEMAAPLYPLTKPGTLFNWGPDQQKAYQEIKQALLTAPALGLPDLTKPFELFVDEKQGYAKGVLTQKLGPWRRPVAYLSKKLDPVAAGWPPCLRMVAAIAVLTKDAGKLTMGQPLVILAPHAVEALVKQPPDRWLSNARMTHYQAMLLDTDRVQFGPVVALNPATLLPLPEKEAPHDCLEILAETHGTRPDLTDQPIPDADYTWYTDGSSFLQEGQRRAGAAVTTETEVIWARALPAGTSAQRAELIALTQALKMAEGKKLNVYTDSRYAFATAHVHGEIYRRRGWLTSEGREIKNKNEILALLKALFLPKRLSIIHCPGHQKGNSAEARGNRMADQAAREAAMKAVLETSTLLAGKRTADGSEFEKRTADGSEFESPKKKAKVE

SEQ ID NO: 1043 - protein, 2094 aa, synthetic construct
MPAAKRVKLDGGDKKYSIGLDIGTNSVGWAVITDEYKVPSKKFKVLGNTDRHSIKKNLIGALLFDSGETAEATRLKRTARRRYTRRKNRICYLQEIFSNEMAKVDDSFFHRLEESFLVEEDKKHERHPIFGNIVDEVAYHEKYPTIYHLRKKLVDSTDKADLRLIYLALAHMIKFRGHFLIEGDLNPDNSDVDKLFIQLVQTYNQLFEENPINASGVDAKAILSARLSKSRRLENLIAQLPGEKKNGLFGNLIALSLGLTPNFKSNFDLAEDAKLQLSKDTYDDDLDNLLAQIGDQYADLFLAAKNLSDAILLSDILRVNTEITKAPLSASMIKRYDEHHQDLTLLKALVRQQLPEKYKEIFFDQSKNGYAGYIDGGASQEEFYKFIKPILEKMDGTEELLVKLNREDLLRKQRTFDNGSIPHQIHLGELHAILRRQEDFYPFLKDNREKIEKILTFRIPYYVGPLARGNSRFAWMTRKSEETITPWNFEEVVDKGASAQSFIERMTNFDKNLPNEKVLPKHSLLYEYFTVYNELTKVKYVTEGMRKPAFLSGEQKKAIVDLLFKTNRKVTVKQLKEDYFKKIECFDSVEISGVEDRFNASLGTYHDLLKIIKDKDFLDNEENEDILEDIVLTLTLFEDREMIEERLKTYAHLFDDKVMKQLKRRRYTGWGRLSRKLINGIRDKQSGKTILDFLKSDGFANRNFMQLIHDDSLTFKEDIQKAQVSGQGDSLHEHIANLAGSPAIKKGILQTVKVVDELVKVMGRHKPENIVIEMARENQTTQKGQKNSRERMKRIEEGIKELGSQILKEHPVENTQLQNEKLYLYYLQNGRDMYVDQELDINRLSDYDVDHIVPQSFLKDDSIDNKVLTRSDKARGKSDNVPSEEVVKKMKNYWRQLLNAKLITQRKFDNLTKAERGGLSELDKAGFIKRQLVETRQITKHVAQILDSRMNTKYDENDKLIREVKVITLKSKLVSDFRKDFQFYKVREINNYHHAHDAYLNAVVGTALIKKYPKLESEFVYGDYKVYDVRKMIAKSEQEIGKATAKYFFYSNIMNFFKTEITLANGEIRKRPLIETNGETGEIVWDKGRDFATVRKVLSMPQVNIVKKTEVQTGGFSKESILPKRNSDKLIARKKDWDPKKYGGFDSPTVAYSVLVVAKVEKGKSKKLKSVKELLGITIMERSSFEKNPIDFLEAKGYKEVKKDLIIKLPKYSLFELENGRKRMLASAGELQKGNELALPSKYVNFLYLASHYEKLKGSPEDNEQKQLFVEQHKHYLDEIIEQISEFSKRVILADANLDKVLSAYNKHRDKPIREQAENIIHLFTLTNLGAPAAFKYFDTTIDRKRYTSTKEVLDATLIHQSITGLYETRIDLSQLGGDGGPAPGSSGGSGGTLNIEDEYRLHETSKEPDVPLGSTWLSDFPQAWAETGGMGLAVRQAPLIIPLKATSTPVSIKQYPMSQEARLGIKPHIQRLLDQGILVPCQSPWNTPLLPVKKPGTNDYRPVQDLREVNKRVEDIHPTVPNPYNLLSGLPPSHQWYTVLDLKDAFFCLRLHPTSQPLFAFEWRDPEMGISGQLTWTRLPQGFKNSPTLFNEALHRDLADFRIQHPDLILLQYVDDLLLAATSEQDCQRGTRALLQTLGNLGYRASAKKAQICQKQVKYLGYLLKEGQRWLTEARKETVMGQPTPKTPRQLREFLGKAGFCRLFIPGFAEMAAPLYPLTKPGTLFNWGPDQQKAYQEIKQALLTAPALGLPDLTKPFELFVDEKQGYAKGVLTQKLGPWRRPVAYLSKKLDPVAAGWPPCLRMVAAIAVLTKDAGKLTMGQPLVILAPHAVEALVKQPPDRWLSNARMTHYQAMLLDTDRVQFGPVVALNPATLLPLPEKEAPHDCLEILAETHGTRPDLTDQPIPDADYTWYTDGSSFLQEGQRRAGAAVTTETEVIWARALPAGTSAQRAELIALTQALKMAEGKKLNVYTDSRYAFATAHVHGEIYRRRGWLTSEGREIKNKNEILALLKALFLPKRLSIIHCPGHQKGNSAEARGNRMADQAAREAAMKAVLETSTLLAGKRTADGSEFEKRTADGSEFESPKKKAKVE

SEQ ID NO: 1044 - protein, 2093 aa, synthetic construct
MPAAKRVKLDGGDKKYSIGLDIGTNSVGWAVITDEYKVPSKKFKVLGNTDRHSIKKNLIGALLFDSGETAEATRLKRTARRRYTRRKNRICYLQEIFSNEMAKVDDSFFHRLEESFLVEEDKKHERHPIFGNIVDEVAYHEKYPTIYHLRKKLVDSTDKADLRLIYLALAHMIKFRGHFLIEGDLNPDNSDVDKLFIQLVQTYNQLFEENPINASGVDAKAILSARLSKSRRLENLIAQLPGEKKNGLFGNLIALSLGLTPNFKSNFDLAEDAKLQLSKDTYDDDLDNLLAQIGDQYADLFLAAKNLSDAILLSDILRVNTEITKAPLSASMIKRYDEHHQDLTLLKALVRQQLPEKYKEIFFDQSKNGYAGYIDGGASQEEFYKFIKPILEKMDGTEELLVKLNREDLLRKQRTFDNGSIPHQIHLGELHAILRRQEDFYPFLKDNREKIEKILTFRIPYYVGPLARGNSRFAWMTRKSEETITPWNFEEVVDKGASAQSFIERMTNFDKNLPNEKVLPKHSLLYEYFTVYNELTKVKYVTEGMRKPAFLSGEQKKAIVDLLFKTNRKVTVKQLKEDYFKKIECFDSVEISGVEDRFNASLGTYHDLLKIIKDKDFLDNEENEDILEDIVLTLTLFEDREMIEERLKTYAHLFDDKVMKQLKRRRYTGWGRLSRKLINGIRDKQSGKTILDFLKSDGFANRNFMQLIHDDSLTFKEDIQKAQVSGQGDSLHEHIANLAGSPAIKKGILQTVKVVDELVKVMGRHKPENIVIEMARENQTTQKGQKNSRERMKRIEEGIKELGSQILKEHPVENTQLQNEKLYLYYLQNGRDMYVDQELDINRLSDYDVDHIVPQSFLKDDSIDNKVLTRSDKARGKSDNVPSEEVVKKMKNYWRQLLNAKLITQRKFDNLTKAERGGLSELDKAGFIKRQLVETRQITKHVAQILDSRMNTKYDENDKLIREVKVITLKSKLVSDFRKDFQFYKVREINNYHHAHDAYLNAVVGTALIKKYPKLESEFVYGDYKVYDVRKMIAKSEQEIGKATAKYFFYSNIMNFFKTEITLANGEIRKRPLIETNGETGEIVWDKGRDFATVRKVLSMPQVNIVKKTEVQTGGFSKESILPKRNSDKLIARKKDWDPKKYGGFDSPTVAYSVLVVAKVEKGKSKKLKSVKELLGITIMERSSFEKNPIDFLEAKGYKEVKKDLIIKLPKYSLFELENGRKRMLASAGELQKGNELALPSKYVNFLYLASHYEKLKGSPEDNEQKQLFVEQHKHYLDEIIEQISEFSKRVILADANLDKVLSAYNKHRDKPIREQAENIIHLFTLTNLGAPAAFKYFDTTIDRKRYTSTKEVLDATLIHQSITGLYETRIDLSQLGGDGGGGGEAAAKGGTLNIEDEYRLHETSKEPDVPLGSTWLSDFPQAWAETGGMGLAVRQAPLIIPLKATSTPVSIKQYPMSQEARLGIKPHIQRLLDQGILVPCQSPWNTPLLPVKKPGTNDYRPVQDLREVNKRVEDIHPTVPNPYNLLSGLPPSHQWYTVLDLKDAFFCLRLHPTSQPLFAFEWRDPEMGISGQLTWTRLPQGFKNSPTLFNEALHRDLADFRIQHPDLILLQYVDDLLLAATSEQDCQRGTRALLQTLGNLGYRASAKKAQICQKQVKYLGYLLKEGQRWLTEARKETVMGQPTPKTPRQLREFLGKAGFCRLFIPGFAEMAAPLYPLTKPGTLFNWGPDQQKAYQEIKQALLTAPALGLPDLTKPFELFVDEKQGYAKGVLTQKLGPWRRPVAYLSKKLDPVAAGWPPCLRMVAAIAVLTKDAGKLTMGQPLVILAPHAVEALVKQPPDRWLSNARMTHYQAMLLDTDRVQFGPVVALNPATLLPLPEKEAPHDCLEILAETHGTRPDLTDQPIPDADYTWYTDGSSFLQEGQRRAGAAVTTETEVIWARALPAGTSAQRAELIALTQALKMAEGKKLNVYTDSRYAFATAHVHGEIYRRRGWLTSEGREIKNKNEILALLKALFLPKRLSIIHCPGHQKGNSAEARGNRMADQAAREAAMKAVLETSTLLAGKRTADGSEFEKRTADGSEFESPKKKAKVE

SEQ ID NO: 1045 - protein, 2100 aa, synthetic construct
MPAAKRVKLDGGDKKYSIGLDIGTNSVGWAVITDEYKVPSKKFKVLGNTDRHSIKKNLIGALLFDSGETAEATRLKRTARRRYTRRKNRICYLQEIFSNEMAKVDDSFFHRLEESFLVEEDKKHERHPIFGNIVDEVAYHEKYPTIYHLRKKLVDSTDKADLRLIYLALAHMIKFRGHFLIEGDLNPDNSDVDKLFIQLVQTYNQLFEENPINASGVDAKAILSARLSKSRRLENLIAQLPGEKKNGLFGNLIALSLGLTPNFKSNFDLAEDAKLQLSKDTYDDDLDNLLAQIGDQYADLFLAAKNLSDAILLSDILRVNTEITKAPLSASMIKRYDEHHQDLTLLKALVRQQLPEKYKEIFFDQSKNGYAGYIDGGASQEEFYKFIKPILEKMDGTEELLVKLNREDLLRKQRTFDNGSIPHQIHLGELHAILRRQEDFYPFLKDNREKIEKILTFRIPYYVGPLARGNSRFAWMTRKSEETITPWNFEEVVDKGASAQSFIERMTNFDKNLPNEKVLPKHSLLYEYFTVYNELTKVKYVTEGMRKPAFLSGEQKKAIVDLLFKTNRKVTVKQLKEDYFKKIECFDSVEISGVEDRFNASLGTYHDLLKIIKDKDFLDNEENEDILEDIVLTLTLFEDREMIEERLKTYAHLFDDKVMKQLKRRRYTGWGRLSRKLINGIRDKQSGKTILDFLKSDGFANRNFMQLIHDDSLTFKEDIQKAQVSGQGDSLHEHIANLAGSPAIKKGILQTVKVVDELVKVMGRHKPENIVIEMARENQTTQKGQKNSRERMKRIEEGIKELGSQILKEHPVENTQLQNEKLYLYYLQNGRDMYVDQELDINRLSDYDVDHIVPQSFLKDDSIDNKVLTRSDKARGKSDNVPSEEVVKKMKNYWRQLLNAKLITQRKFDNLTKAERGGLSELDKAGFIKRQLVETRQITKHVAQILDSRMNTKYDENDKLIREVKVITLKSKLVSDFRKDFQFYKVREINNYHHAHDAYLNAVVGTALIKKYPKLESEFVYGDYKVYDVRKMIAKSEQEIGKATAKYFFYSNIMNFFKTEITLANGEIRKRPLIETNGETGEIVWDKGRDFATVRKVLSMPQVNIVKKTEVQTGGFSKESILPKRNSDKLIARKKDWDPKKYGGFDSPTVAYSVLVVAKVEKGKSKKLKSVKELLGITIMERSSFEKNPIDFLEAKGYKEVKKDLIIKLPKYSLFELENGRKRMLASAGELQKGNELALPSKYVNFLYLASHYEKLKGSPEDNEQKQLFVEQHKHYLDEIIEQISEFSKRVILADANLDKVLSAYNKHRDKPIREQAENIIHLFTLTNLGAPAAFKYFDTTIDRKRYTSTKEVLDATLIHQSITGLYETRIDLSQLGGDGGGSSGSSGSSGSSGSSGGTLNIEDEYRLHETSKEPDVPLGSTWLSDFPQAWAETGGMGLAVRQAPLIIPLKATSTPVSIKQYPMSQEARLGIKPHIQRLLDQGILVPCQSPWNTPLLPVKKPGTNDYRPVQDLREVNKRVEDIHPTVPNPYNLLSGLPPSHQWYTVLDLKDAFFCLRLHPTSQPLFAFEWRDPEMGISGQLTWTRLPQGFKNSPTLFNEALHRDLADFRIQHPDLILLQYVDDLLLAATSEQDCQRGTRALLQTLGNLGYRASAKKAQICQKQVKYLGYLLKEGQRWLTEARKETVMGQPTPKTPRQLREFLGKAGFCRLFIPGFAEMAAPLYPLTKPGTLFNWGPDQQKAYQEIKQALLTAPALGLPDLTKPFELFVDEKQGYAKGVLTQKLGPWRRPVAYLSKKLDPVAAGWPPCLRMVAAIAVLTKDAGKLTMGQPLVILAPHAVEALVKQPPDRWLSNARMTHYQAMLLDTDRVQFGPVVALNPATLLPLPEKEAPHDCLEILAETHGTRPDLTDQPIPDADYTWYTDGSSFLQEGQRRAGAAVTTETEVIWARALPAGTSAQRAELIALTQALKMAEGKKLNVYTDSRYAFATAHVHGEIYRRRGWLTSEGREIKNKNEILALLKALFLPKRLSIIHCPGHQKGNSAEARGNRMADQAAREAAMKAVLETSTLLAGKRTADGSEFEKRTADGSEFESPKKKAKVE

SEQ ID NO: 1046 - protein, 2096 aa, synthetic construct
MPAAKRVKLDGGDKKYSIGLDIGTNSVGWAVITDEYKVPSKKFKVLGNTDRHSIKKNLIGALLFDSGETAEATRLKRTARRRYTRRKNRICYLQEIFSNEMAKVDDSFFHRLEESFLVEEDKKHERHPIFGNIVDEVAYHEKYPTIYHLRKKLVDSTDKADLRLIYLALAHMIKFRGHFLIEGDLNPDNSDVDKLFIQLVQTYNQLFEENPINASGVDAKAILSARLSKSRRLENLIAQLPGEKKNGLFGNLIALSLGLTPNFKSNFDLAEDAKLQLSKDTYDDDLDNLLAQIGDQYADLFLAAKNLSDAILLSDILRVNTEITKAPLSASMIKRYDEHHQDLTLLKALVRQQLPEKYKEIFFDQSKNGYAGYIDGGASQEEFYKFIKPILEKMDGTEELLVKLNREDLLRKQRTFDNGSIPHQIHLGELHAILRRQEDFYPFLKDNREKIEKILTFRIPYYVGPLARGNSRFAWMTRKSEETITPWNFEEVVDKGASAQSFIERMTNFDKNLPNEKVLPKHSLLYEYFTVYNELTKVKYVTEGMRKPAFLSGEQKKAIVDLLFKTNRKVTVKQLKEDYFKKIECFDSVEISGVEDRFNASLGTYHDLLKIIKDKDFLDNEENEDILEDIVLTLTLFEDREMIEERLKTYAHLFDDKVMKQLKRRRYTGWGRLSRKLINGIRDKQSGKTILDFLKSDGFANRNFMQLIHDDSLTFKEDIQKAQVSGQGDSLHEHIANLAGSPAIKKGILQTVKVVDELVKVMGRHKPENIVIEMARENQTTQKGQKNSRERMKRIEEGIKELGSQILKEHPVENTQLQNEKLYLYYLQNGRDMYVDQELDINRLSDYDVDHIVPQSFLKDDSIDNKVLTRSDKARGKSDNVPSEEVVKKMKNYWRQLLNAKLITQRKFDNLTKAERGGLSELDKAGFIKRQLVETRQITKHVAQILDSRMNTKYDENDKLIREVKVITLKSKLVSDFRKDFQFYKVREINNYHHAHDAYLNAVVGTALIKKYPKLESEFVYGDYKVYDVRKMIAKSEQEIGKATAKYFFYSNIMNFFKTEITLANGEIRKRPLIETNGETGEIVWDKGRDFATVRKVLSMPQVNIVKKTEVQTGGFSKESILPKRNSDKLIARKKDWDPKKYGGFDSPTVAYSVLVVAKVEKGKSKKLKSVKELLGITIMERSSFEKNPIDFLEAKGYKEVKKDLIIKLPKYSLFELENGRKRMLASAGELQKGNELALPSKYVNFLYLASHYEKLKGSPEDNEQKQLFVEQHKHYLDEIIEQISEFSKRVILADANLDKVLSAYNKHRDKPIREQAENIIHLFTLTNLGAPAAFKYFDTTIDRKRYTSTKEVLDATLIHQSITGLYETRIDLSQLGGDGGGGSGGGEAAAKGGTLNIEDEYRLHETSKEPDVPLGSTWLSDFPQAWAETGGMGLAVRQAPLIIPLKATSTPVSIKQYPMSQEARLGIKPHIQRLLDQGILVPCQSPWNTPLLPVKKPGTNDYRPVQDLREVNKRVEDIHPTVPNPYNLLSGLPPSHQWYTVLDLKDAFFCLRLHPTSQPLFAFEWRDPEMGISGQLTWTRLPQGFKNSPTLFNEALHRDLADFRIQHPDLILLQYVDDLLLAATSEQDCQRGTRALLQTLGNLGYRASAKKAQICQKQVKYLGYLLKEGQRWLTEARKETVMGQPTPKTPRQLREFLGKAGFCRLFIPGFAEMAAPLYPLTKPGTLFNWGPDQQKAYQEIKQALLTAPALGLPDLTKPFELFVDEKQGYAKGVLTQKLGPWRRPVAYLSKKLDPVAAGWPPCLRMVAAIAVLTKDAGKLTMGQPLVILAPHAVEALVKQPPDRWLSNARMTHYQAMLLDTDRVQFGPVVALNPATLLPLPEKEAPHDCLEILAETHGTRPDLTDQPIPDADYTWYTDGSSFLQEGQRRAGAAVTTETEVIWARALPAGTSAQRAELIALTQALKMAEGKKLNVYTDSRYAFATAHVHGEIYRRRGWLTSEGREIKNKNEILALLKALFLPKRLSIIHCPGHQKGNSAEARGNRMADQAAREAAMKAVLETSTLLAGKRTADGSEFEKRTADGSEFESPKKKAKVE

SEQ ID NO: 1047 - protein, 2091 aa, synthetic construct
MPAAKRVKLDGGDKKYSIGLDIGTNSVGWAVITDEYKVPSKKFKVLGNTDRHSIKKNLIGALLFDSGETAEATRLKRTARRRYTRRKNRICYLQEIFSNEMAKVDDSFFHRLEESFLVEEDKKHERHPIFGNIVDEVAYHEKYPTIYHLRKKLVDSTDKADLRLIYLALAHMIKFRGHFLIEGDLNPDNSDVDKLFIQLVQTYNQLFEENPINASGVDAKAILSARLSKSRRLENLIAQLPGEKKNGLFGNLIALSLGLTPNFKSNFDLAEDAKLQLSKDTYDDDLDNLLAQIGDQYADLFLAAKNLSDAILLSDILRVNTEITKAPLSASMIKRYDEHHQDLTLLKALVRQQLPEKYKEIFFDQSKNGYAGYIDGGASQEEFYKFIKPILEKMDGTEELLVKLNREDLLRKQRTFDNGSIPHQIHLGELHAILRRQEDFYPFLKDNREKIEKILTFRIPYYVGPLARGNSRFAWMTRKSEETITPWNFEEVVDKGASAQSFIERMTNFDKNLPNEKVLPKHSLLYEYFTVYNELTKVKYVTEGMRKPAFLSGEQKKAIVDLLFKTNRKVTVKQLKEDYFKKIECFDSVEISGVEDRFNASLGTYHDLLKIIKDKDFLDNEENEDILEDIVLTLTLFEDREMIEERLKTYAHLFDDKVMKQLKRRRYTGWGRLSRKLINGIRDKQSGKTILDFLKSDGFANRNFMQLIHDDSLTFKEDIQKAQVSGQGDSLHEHIANLAGSPAIKKGILQTVKVVDELVKVMGRHKPENIVIEMARENQTTQKGQKNSRERMKRIEEGIKELGSQILKEHPVENTQLQNEKLYLYYLQNGRDMYVDQELDINRLSDYDVDHIVPQSFLKDDSIDNKVLTRSDKARGKSDNVPSEEVVKKMKNYWRQLLNAKLITQRKFDNLTKAERGGLSELDKAGFIKRQLVETRQITKHVAQILDSRMNTKYDENDKLIREVKVITLKSKLVSDFRKDFQFYKVREINNYHHAHDAYLNAVVGTALIKKYPKLESEFVYGDYKVYDVRKMIAKSEQEIGKATAKYFFYSNIMNFFKTEITLANGEIRKRPLIETNGETGEIVWDKGRDFATVRKVLSMPQVNIVKKTEVQTGGFSKESILPKRNSDKLIARKKDWDPKKYGGFDSPTVAYSVLVVAKVEKGKSKKLKSVKELLGITIMERSSFEKNPIDFLEAKGYKEVKKDLIIKLPKYSLFELENGRKRMLASAGELQKGNELALPSKYVNFLYLASHYEKLKGSPEDNEQKQLFVEQHKHYLDEIIEQISEFSKRVILADANLDKVLSAYNKHRDKPIREQAENIIHLFTLTNLGAPAAFKYFDTTIDRKRYTSTKEVLDATLIHQSITGLYETRIDLSQLGGDGGGSSGSSGGTLNIEDEYRLHETSKEPDVPLGSTWLSDFPQAWAETGGMGLAVRQAPLIIPLKATSTPVSIKQYPMSQEARLGIKPHIQRLLDQGILVPCQSPWNTPLLPVKKPGTNDYRPVQDLREVNKRVEDIHPTVPNPYNLLSGLPPSHQWYTVLDLKDAFFCLRLHPTSQPLFAFEWRDPEMGISGQLTWTRLPQGFKNSPTLFNEALHRDLADFRIQHPDLILLQYVDDLLLAATSEQDCQRGTRALLQTLGNLGYRASAKKAQICQKQVKYLGYLLKEGQRWLTEARKETVMGQPTPKTPRQLREFLGKAGFCRLFIPGFAEMAAPLYPLTKPGTLFNWGPDQQKAYQEIKQALLTAPALGLPDLTKPFELFVDEKQGYAKGVLTQKLGPWRRPVAYLSKKLDPVAAGWPPCLRMVAAIAVLTKDAGKLTMGQPLVILAPHAVEALVKQPPDRWLSNARMTHYQAMLLDTDRVQFGPVVALNPATLLPLPEKEAPHDCLEILAETHGTRPDLTDQPIPDADYTWYTDGSSFLQEGQRRAGAAVTTETEVIWARALPAGTSAQRAELIALTQALKMAEGKKLNVYTDSRYAFATAHVHGEIYRRRGWLTSEGREIKNKNEILALLKALFLPKRLSIIHCPGHQKGNSAEARGNRMADQAAREAAMKAVLETSTLLAGKRTADGSEFEKRTADGSEFESPKKKAKVE

SEQ ID NO: 1048 - protein, 2093 aa, synthetic construct
MPAAKRVKLDGGDKKYSIGLDIGTNSVGWAVITDEYKVPSKKFKVLGNTDRHSIKKNLIGALLFDSGETAEATRLKRTARRRYTRRKNRICYLQEIFSNEMAKVDDSFFHRLEESFLVEEDKKHERHPIFGNIVDEVAYHEKYPTIYHLRKKLVDSTDKADLRLIYLALAHMIKFRGHFLIEGDLNPDNSDVDKLFIQLVQTYNQLFEENPINASGVDAKAILSARLSKSRRLENLIAQLPGEKKNGLFGNLIALSLGLTPNFKSNFDLAEDAKLQLSKDTYDDDLDNLLAQIGDQYADLFLAAKNLSDAILLSDILRVNTEITKAPLSASMIKRYDEHHQDLTLLKALVRQQLPEKYKEIFFDQSKNGYAGYIDGGASQEEFYKFIKPILEKMDGTEELLVKLNREDLLRKQRTFDNGSIPHQIHLGELHAILRRQEDFYPFLKDNREKIEKILTFRIPYYVGPLARGNSRFAWMTRKSEETITPWNFEEVVDKGASAQSFIERMTNFDKNLPNEKVLPKHSLLYEYFTVYNELTKVKYVTEGMRKPAFLSGEQKKAIVDLLFKTNRKVTVKQLKEDYFKKIECFDSVEISGVEDRFNASLGTYHDLLKIIKDKDFLDNEENEDILEDIVLTLTLFEDREMIEERLKTYAHLFDDKVMKQLKRRRYTGWGRLSRKLINGIRDKQSGKTILDFLKSDGFANRNFMQLIHDDSLTFKEDIQKAQVSGQGDSLHEHIANLAGSPAIKKGILQTVKVVDELVKVMGRHKPENIVIEMARENQTTQKGQKNSRERMKRIEEGIKELGSQILKEHPVENTQLQNEKLYLYYLQNGRDMYVDQELDINRLSDYDVDHIVPQSFLKDDSIDNKVLTRSDKARGKSDNVPSEEVVKKMKNYWRQLLNAKLITQRKFDNLTKAERGGLSELDKAGFIKRQLVETRQITKHVAQILDSRMNTKYDENDKLIREVKVITLKSKLVSDFRKDFQFYKVREINNYHHAHDAYLNAVVGTALIKKYPKLESEFVYGDYKVYDVRKMIAKSEQEIGKATAKYFFYSNIMNFFKTEITLANGEIRKRPLIETNGETGEIVWDKGRDFATVRKVLSMPQVNIVKKTEVQTGGFSKESILPKRNSDKLIARKKDWDPKKYGGFDSPTVAYSVLVVAKVEKGKSKKLKSVKELLGITIMERSSFEKNPIDFLEAKGYKEVKKDLIIKLPKYSLFELENGRKRMLASAGELQKGNELALPSKYVNFLYLASHYEKLKGSPEDNEQKQLFVEQHKHYLDEIIEQISEFSKRVILADANLDKVLSAYNKHRDKPIREQAENIIHLFTLTNLGAPAAFKYFDTTIDRKRYTSTKEVLDATLIHQSITGLYETRIDLSQLGGDGGEAAAKPAPGGTLNIEDEYRLHETSKEPDVPLGSTWLSDFPQAWAETGGMGLAVRQAPLIIPLKATSTPVSIKQYPMSQEARLGIKPHIQRLLDQGILVPCQSPWNTPLLPVKKPGTNDYRPVQDLREVNKRVEDIHPTVPNPYNLLSGLPPSHQWYTVLDLKDAFFCLRLHPTSQPLFAFEWRDPEMGISGQLTWTRLPQGFKNSPTLFNEALHRDLADFRIQHPDLILLQYVDDLLLAATSEQDCQRGTRALLQTLGNLGYRASAKKAQICQKQVKYLGYLLKEGQRWLTEARKETVMGQPTPKTPRQLREFLGKAGFCRLFIPGFAEMAAPLYPLTKPGTLFNWGPDQQKAYQEIKQALLTAPALGLPDLTKPFELFVDEKQGYAKGVLTQKLGPWRRPVAYLSKKLDPVAAGWPPCLRMVAAIAVLTKDAGKLTMGQPLVILAPHAVEALVKQPPDRWLSNARMTHYQAMLLDTDRVQFGPVVALNPATLLPLPEKEAPHDCLEILAETHGTRPDLTDQPIPDADYTWYTDGSSFLQEGQRRAGAAVTTETEVIWARALPAGTSAQRAELIALTQALKMAEGKKLNVYTDSRYAFATAHVHGEIYRRRGWLTSEGREIKNKNEILALLKALFLPKRLSIIHCPGHQKGNSAEARGNRMADQAAREAAMKAVLETSTLLAGKRTADGSEFEKRTADGSEFESPKKKAKVE

SEQ ID NO: 1049 - protein, 2105 aa, synthetic construct
MPAAKRVKLDGGDKKYSIGLDIGTNSVGWAVITDEYKVPSKKFKVLGNTDRHSIKKNLIGALLFDSGETAEATRLKRTARRRYTRRKNRICYLQEIFSNEMAKVDDSFFHRLEESFLVEEDKKHERHPIFGNIVDEVAYHEKYPTIYHLRKKLVDSTDKADLRLIYLALAHMIKFRGHFLIEGDLNPDNSDVDKLFIQLVQTYNQLFEENPINASGVDAKAILSARLSKSRRLENLIAQLPGEKKNGLFGNLIALSLGLTPNFKSNFDLAEDAKLQLSKDTYDDDLDNLLAQIGDQYADLFLAAKNLSDAILLSDILRVNTEITKAPLSASMIKRYDEHHQDLTLLKALVRQQLPEKYKEIFFDQSKNGYAGYIDGGASQEEFYKFIKPILEKMDGTEELLVKLNREDLLRKQRTFDNGSIPHQIHLGELHAILRRQEDFYPFLKDNREKIEKILTFRIPYYVGPLARGNSRFAWMTRKSEETITPWNFEEVVDKGASAQSFIERMTNFDKNLPNEKVLPKHSLLYEYFTVYNELTKVKYVTEGMRKPAFLSGEQKKAIVDLLFKTNRKVTVKQLKEDYFKKIECFDSVEISGVEDRFNASLGTYHDLLKIIKDKDFLDNEENEDILEDIVLTLTLFEDREMIEERLKTYAHLFDDKVMKQLKRRRYTGWGRLSRKLINGIRDKQSGKTILDFLKSDGFANRNFMQLIHDDSLTFKEDIQKAQVSGQGDSLHEHIANLAGSPAIKKGILQTVKVVDELVKVMGRHKPENIVIEMARENQTTQKGQKNSRERMKRIEEGIKELGSQILKEHPVENTQLQNEKLYLYYLQNGRDMYVDQELDINRLSDYDVDHIVPQSFLKDDSIDNKVLTRSDKARGKSDNVPSEEVVKKMKNYWRQLLNAKLITQRKFDNLTKAERGGLSELDKAGFIKRQLVETRQITKHVAQILDSRMNTKYDENDKLIREVKVITLKSKLVSDFRKDFQFYKVREINNYHHAHDAYLNAVVGTALIKKYPKLESEFVYGDYKVYDVRKMIAKSEQEIGKATAKYFFYSNIMNFFKTEITLANGEIRKRPLIETNGETGEIVWDKGRDFATVRKVLSMPQVNIVKKTEVQTGGFSKESILPKRNSDKLIARKKDWDPKKYGGFDSPTVAYSVLVVAKVEKGKSKKLKSVKELLGITIMERSSFEKNPIDFLEAKGYKEVKKDLIIKLPKYSLFELENGRKRMLASAGELQKGNELALPSKYVNFLYLASHYEKLKGSPEDNEQKQLFVEQHKHYLDEIIEQISEFSKRVILADANLDKVLSAYNKHRDKPIREQAENIIHLFTLTNLGAPAAFKYFDTTIDRKRYTSTKEVLDATLIHQSITGLYETRIDLSQLGGDGGGGGGSGGGGSGGGGSGGGGSGGTLNIEDEYRLHETSKEPDVPLGSTWLSDFPQAWAETGGMGLAVRQAPLIIPLKATSTPVSIKQYPMSQEARLGIKPHIQRLLDQGILVPCQSPWNTPLLPVKKPGTNDYRPVQDLREVNKRVEDIHPTVPNPYNLLSGLPPSHQWYTVLDLKDAFFCLRLHPTSQPLFAFEWRDPEMGISGQLTWTRLPQGFKNSPTLFNEALHRDLADFRIQHPDLILLQYVDDLLLAATSEQDCQRGTRALLQTLGNLGYRASAKKAQICQKQVKYLGYLLKEGQRWLTEARKETVMGQPTPKTPRQLREFLGKAGFCRLFIPGFAEMAAPLYPLTKPGTLFNWGPDQQKAYQEIKQALLTAPALGLPDLTKPFELFVDEKQGYAKGVLTQKLGPWRRPVAYLSKKLDPVAAGWPPCLRMVAAIAVLTKDAGKLTMGQPLVILAPHAVEALVKQPPDRWLSNARMTHYQAMLLDTDRVQFGPVVALNPATLLPLPEKEAPHDCLEILAETHGTRPDLTDQPIPDADYTWYTDGSSFLQEGQRRAGAAVTTETEVIWARALPAGTSAQRAELIALTQALKMAEGKKLNVYTDSRYAFATAHVHGEIYRRRGWLTSEGREIKNKNEILALLKALFLPKRLSIIHCPGHQKGNSAEARGNRMADQAAREAAMKAVLETSTLLAGKRTADGSEFEKRTADGSEFESPKKKAKVE

SEQ ID NO: 1050 - protein, 2093 aa, synthetic construct
MPAAKRVKLDGGDKKYSIGLDIGTNSVGWAVITDEYKVPSKKFKVLGNTDRHSIKKNLIGALLFDSGETAEATRLKRTARRRYTRRKNRICYLQEIFSNEMAKVDDSFFHRLEESFLVEEDKKHERHPIFGNIVDEVAYHEKYPTIYHLRKKLVDSTDKADLRLIYLALAHMIKFRGHFLIEGDLNPDNSDVDKLFIQLVQTYNQLFEENPINASGVDAKAILSARLSKSRRLENLIAQLPGEKKNGLFGNLIALSLGLTPNFKSNFDLAEDAKLQLSKDTYDDDLDNLLAQIGDQYADLFLAAKNLSDAILLSDILRVNTEITKAPLSASMIKRYDEHHQDLTLLKALVRQQLPEKYKEIFFDQSKNGYAGYIDGGASQEEFYKFIKPILEKMDGTEELLVKLNREDLLRKQRTFDNGSIPHQIHLGELHAILRRQEDFYPFLKDNREKIEKILTFRIPYYVGPLARGNSRFAWMTRKSEETITPWNFEEVVDKGASAQSFIERMTNFDKNLPNEKVLPKHSLLYEYFTVYNELTKVKYVTEGMRKPAFLSGEQKKAIVDLLFKTNRKVTVKQLKEDYFKKIECFDSVEISGVEDRFNASLGTYHDLLKIIKDKDFLDNEENEDILEDIVLTLTLFEDREMIEERLKTYAHLFDDKVMKQLKRRRYTGWGRLSRKLINGIRDKQSGKTILDFLKSDGFANRNFMQLIHDDSLTFKEDIQKAQVSGQGDSLHEHIANLAGSPAIKKGILQTVKVVDELVKVMGRHKPENIVIEMARENQTTQKGQKNSRERMKRIEEGIKELGSQILKEHPVENTQLQNEKLYLYYLQNGRDMYVDQELDINRLSDYDVDHIVPQSFLKDDSIDNKVLTRSDKARGKSDNVPSEEVVKKMKNYWRQLLNAKLITQRKFDNLTKAERGGLSELDKAGFIKRQLVETRQITKHVAQILDSRMNTKYDENDKLIREVKVITLKSKLVSDFRKDFQFYKVREINNYHHAHDAYLNAVVGTALIKKYPKLESEFVYGDYKVYDVRKMIAKSEQEIGKATAKYFFYSNIMNFFKTEITLANGEIRKRPLIETNGETGEIVWDKGRDFATVRKVLSMPQVNIVKKTEVQTGGFSKESILPKRNSDKLIARKKDWDPKKYGGFDSPTVAYSVLVVAKVEKGKSKKLKSVKELLGITIMERSSFEKNPIDFLEAKGYKEVKKDLIIKLPKYSLFELENGRKRMLASAGELQKGNELALPSKYVNFLYLASHYEKLKGSPEDNEQKQLFVEQHKHYLDEIIEQISEFSKRVILADANLDKVLSAYNKHRDKPIREQAENIIHLFTLTNLGAPAAFKYFDTTIDRKRYTSTKEVLDATLIHQSITGLYETRIDLSQLGGDGGEAAAKGGGGGTLNIEDEYRLHETSKEPDVPLGSTWLSDFPQAWAETGGMGLAVRQAPLIIPLKATSTPVSIKQYPMSQEARLGIKPHIQRLLDQGILVPCQSPWNTPLLPVKKPGTNDYRPVQDLREVNKRVEDIHPTVPNPYNLLSGLPPSHQWYTVLDLKDAFFCLRLHPTSQPLFAFEWRDPEMGISGQLTWTRLPQGFKNSPTLFNEALHRDLADFRIQHPDLILLQYVDDLLLAATSEQDCQRGTRALLQTLGNLGYRASAKKAQICQKQVKYLGYLLKEGQRWLTEARKETVMGQPTPKTPRQLREFLGKAGFCRLFIPGFAEMAAPLYPLTKPGTLFNWGPDQQKAYQEIKQALLTAPALGLPDLTKPFELFVDEKQGYAKGVLTQKLGPWRRPVAYLSKKLDPVAAGWPPCLRMVAAIAVLTKDAGKLTMGQPLVILAPHAVEALVKQPPDRWLSNARMTHYQAMLLDTDRVQFGPVVALNPATLLPLPEKEAPHDCLEILAETHGTRPDLTDQPIPDADYTWYTDGSSFLQEGQRRAGAAVTTETEVIWARALPAGTSAQRAELIALTQALKMAEGKKLNVYTDSRYAFATAHVHGEIYRRRGWLTSEGREIKNKNEILALLKALFLPKRLSIIHCPGHQKGNSAEARGNRMADQAAREAAMKAVLETSTLLAGKRTADGSEFEKRTADGSEFESPKKKAKVE

SEQ ID NO: 1051 - protein, 2096 aa, synthetic construct
MPAAKRVKLDGGDKKYSIGLDIGTNSVGWAVITDEYKVPSKKFKVLGNTDRHSIKKNLIGALLFDSGETAEATRLKRTARRRYTRRKNRICYLQEIFSNEMAKVDDSFFHRLEESFLVEEDKKHERHPIFGNIVDEVAYHEKYPTIYHLRKKLVDSTDKADLRLIYLALAHMIKFRGHFLIEGDLNPDNSDVDKLFIQLVQTYNQLFEENPINASGVDAKAILSARLSKSRRLENLIAQLPGEKKNGLFGNLIALSLGLTPNFKSNFDLAEDAKLQLSKDTYDDDLDNLLAQIGDQYADLFLAAKNLSDAILLSDILRVNTEITKAPLSASMIKRYDEHHQDLTLLKALVRQQLPEKYKEIFFDQSKNGYAGYIDGGASQEEFYKFIKPILEKMDGTEELLVKLNREDLLRKQRTFDNGSIPHQIHLGELHAILRRQEDFYPFLKDNREKIEKILTFRIPYYVGPLARGNSRFAWMTRKSEETITPWNFEEVVDKGASAQSFIERMTNFDKNLPNEKVLPKHSLLYEYFTVYNELTKVKYVTEGMRKPAFLSGEQKKAIVDLLFKTNRKVTVKQLKEDYFKKIECFDSVEISGVEDRFNASLGTYHDLLKIIKDKDFLDNEENEDILEDIVLTLTLFEDREMIEERLKTYAHLFDDKVMKQLKRRRYTGWGRLSRKLINGIRDKQSGKTILDFLKSDGFANRNFMQLIHDDSLTFKEDIQKAQVSGQGDSLHEHIANLAGSPAIKKGILQTVKVVDELVKVMGRHKPENIVIEMARENQTTQKGQKNSRERMKRIEEGIKELGSQILKEHPVENTQLQNEKLYLYYLQNGRDMYVDQELDINRLSDYDVDHIVPQSFLKDDSIDNKVLTRSDKARGKSDNVPSEEVVKKMKNYWRQLLNAKLITQRKFDNLTKAERGGLSELDKAGFIKRQLVETRQITKHVAQILDSRMNTKYDENDKLIREVKVITLKSKLVSDFRKDFQFYKVREINNYHHAHDAYLNAVVGTALIKKYPKLESEFVYGDYKVYDVRKMIAKSEQEIGKATAKYFFYSNIMNFFKTEITLANGEIRKRPLIETNGETGEIVWDKGRDFATVRKVLSMPQVNIVKKTEVQTGGFSKESILPKRNSDKLIARKKDWDPKKYGGFDSPTVAYSVLVVAKVEKGKSKKLKSVKELLGITIMERSSFEKNPIDFLEAKGYKEVKKDLIIKLPKYSLFELENGRKRMLASAGELQKGNELALPSKYVNFLYLASHYEKLKGSPEDNEQKQLFVEQHKHYLDEIIEQISEFSKRVILADANLDKVLSAYNKHRDKPIREQAENIIHLFTLTNLGAPAAFKYFDTTIDRKRYTSTKEVLDATLIHQSITGLYETRIDLSQLGGDGGEAAAKGGSGGGGGTLNIEDEYRLHETSKEPDVPLGSTWLSDFPQAWAETGGMGLAVRQAPLIIPLKATSTPVSIKQYPMSQEARLGIKPHIQRLLDQGILVPCQSPWNTPLLPVKKPGTNDYRPVQDLREVNKRVEDIHPTVPNPYNLLSGLPPSHQWYTVLDLKDAFFCLRLHPTSQPLFAFEWRDPEMGISGQLTWTRLPQGFKNSPTLFNEALHRDLADFRIQHPDLILLQYVDDLLLAATSEQDCQRGTRALLQTLGNLGYRASAKKAQICQKQVKYLGYLLKEGQRWLTEARKETVMGQPTPKTPRQLREFLGKAGFCRLFIPGFAEMAAPLYPLTKPGTLFNWGPDQQKAYQEIKQALLTAPALGLPDLTKPFELFVDEKQGYAKGVLTQKLGPWRRPVAYLSKKLDPVAAGWPPCLRMVAAIAVLTKDAGKLTMGQPLVILAPHAVEALVKQPPDRWLSNARMTHYQAMLLDTDRVQFGPVVALNPATLLPLPEKEAPHDCLEILAETHGTRPDLTDQPIPDADYTWYTDGSSFLQEGQRRAGAAVTTETEVIWARALPAGTSAQRAELIALTQALKMAEGKKLNVYTDSRYAFATAHVHGEIYRRRGWLTSEGREIKNKNEILALLKALFLPKRLSIIHCPGHQKGNSAEARGNRMADQAAREAAMKAVLETSTLLAGKRTADGSEFEKRTADGSEFESPKKKAKVE

SEQ ID NO: 1052 - protein, 2115 aa, synthetic construct
MPAAKRVKLDGGDKKYSIGLDIGTNSVGWAVITDEYKVPSKKFKVLGNTDRHSIKKNLIGALLFDSGETAEATRLKRTARRRYTRRKNRICYLQEIFSNEMAKVDDSFFHRLEESFLVEEDKKHERHPIFGNIVDEVAYHEKYPTIYHLRKKLVDSTDKADLRLIYLALAHMIKFRGHFLIEGDLNPDNSDVDKLFIQLVQTYNQLFEENPINASGVDAKAILSARLSKSRRLENLIAQLPGEKKNGLFGNLIALSLGLTPNFKSNFDLAEDAKLQLSKDTYDDDLDNLLAQIGDQYADLFLAAKNLSDAILLSDILRVNTEITKAPLSASMIKRYDEHHQDLTLLKALVRQQLPEKYKEIFFDQSKNGYAGYIDGGASQEEFYKFIKPILEKMDGTEELLVKLNREDLLRKQRTFDNGSIPHQIHLGELHAILRRQEDFYPFLKDNREKIEKILTFRIPYYVGPLARGNSRFAWMTRKSEETITPWNFEEVVDKGASAQSFIERMTNFDKNLPNEKVLPKHSLLYEYFTVYNELTKVKYVTEGMRKPAFLSGEQKKAIVDLLFKTNRKVTVKQLKEDYFKKIECFDSVEISGVEDRFNASLGTYHDLLKIIKDKDFLDNEENEDILEDIVLTLTLFEDREMIEERLKTYAHLFDDKVMKQLKRRRYTGWGRLSRKLINGIRDKQSGKTILDFLKSDGFANRNFMQLIHDDSLTFKEDIQKAQVSGQGDSLHEHIANLAGSPAIKKGILQTVKVVDELVKVMGRHKPENIVIEMARENQTTQKGQKNSRERMKRIEEGIKELGSQILKEHPVENTQLQNEKLYLYYLQNGRDMYVDQELDINRLSDYDVDHIVPQSFLKDDSIDNKVLTRSDKARGKSDNVPSEEVVKKMKNYWRQLLNAKLITQRKFDNLTKAERGGLSELDKAGFIKRQLVETRQITKHVAQILDSRMNTKYDENDKLIREVKVITLKSKLVSDFRKDFQFYKVREINNYHHAHDAYLNAVVGTALIKKYPKLESEFVYGDYKVYDVRKMIAKSEQEIGKATAKYFFYSNIMNFFKTEITLANGEIRKRPLIETNGETGEIVWDKGRDFATVRKVLSMPQVNIVKKTEVQTGGFSKESILPKRNSDKLIARKKDWDPKKYGGFDSPTVAYSVLVVAKVEKGKSKKLKSVKELLGITIMERSSFEKNPIDFLEAKGYKEVKKDLIIKLPKYSLFELENGRKRMLASAGELQKGNELALPSKYVNFLYLASHYEKLKGSPEDNEQKQLFVEQHKHYLDEIIEQISEFSKRVILADANLDKVLSAYNKHRDKPIREQAENIIHLFTLTNLGAPAAFKYFDTTIDRKRYTSTKEVLDATLIHQSITGLYETRIDLSQLGGDGGEAAAKEAAAKEAAAKEAAAKEAAAKEAAAKGGTLNIEDEYRLHETSKEPDVPLGSTWLSDFPQAWAETGGMGLAVRQAPLIIPLKATSTPVSIKQYPMSQEARLGIKPHIQRLLDQGILVPCQSPWNTPLLPVKKPGTNDYRPVQDLREVNKRVEDIHPTVPNPYNLLSGLPPSHQWYTVLDLKDAFFCLRLHPTSQPLFAFEWRDPEMGISGQLTWTRLPQGFKNSPTLFNEALHRDLADFRIQHPDLILLQYVDDLLLAATSEQDCQRGTRALLQTLGNLGYRASAKKAQICQKQVKYLGYLLKEGQRWLTEARKETVMGQPTPKTPRQLREFLGKAGFCRLFIPGFAEMAAPLYPLTKPGTLFNWGPDQQKAYQEIKQALLTAPALGLPDLTKPFELFVDEKQGYAKGVLTQKLGPWRRPVAYLSKKLDPVAAGWPPCLRMVAAIAVLTKDAGKLTMGQPLVILAPHAVEALVKQPPDRWLSNARMTHYQAMLLDTDRVQFGPVVALNPATLLPLPEKEAPHDCLEILAETHGTRPDLTDQPIPDADYTWYTDGSSFLQEGQRRAGAAVTTETEVIWARALPAGTSAQRAELIALTQALKMAEGKKLNVYTDSRYAFATAHVHGEIYRRRGWLTSEGREIKNKNEILALLKALFLPKRLSIIHCPGHQKGNSAEARGNRMADQAAREAAMKAVLETSTLLAGKRTADGSEFEKRTADGSEFESPKKKAKVE

SEQ ID NO: 1053 - protein, 2096 aa, synthetic construct
MPAAKRVKLDGGDKKYSIGLDIGTNSVGWAVITDEYKVPSKKFKVLGNTDRHSIKKNLIGALLFDSGETAEATRLKRTARRRYTRRKNRICYLQEIFSNEMAKVDDSFFHRLEESFLVEEDKKHERHPIFGNIVDEVAYHEKYPTIYHLRKKLVDSTDKADLRLIYLALAHMIKFRGHFLIEGDLNPDNSDVDKLFIQLVQTYNQLFEENPINASGVDAKAILSARLSKSRRLENLIAQLPGEKKNGLFGNLIALSLGLTPNFKSNFDLAEDAKLQLSKDTYDDDLDNLLAQIGDQYADLFLAAKNLSDAILLSDILRVNTEITKAPLSASMIKRYDEHHQDLTLLKALVRQQLPEKYKEIFFDQSKNGYAGYIDGGASQEEFYKFIKPILEKMDGTEELLVKLNREDLLRKQRTFDNGSIPHQIHLGELHAILRRQEDFYPFLKDNREKIEKILTFRIPYYVGPLARGNSRFAWMTRKSEETITPWNFEEVVDKGASAQSFIERMTNFDKNLPNEKVLPKHSLLYEYFTVYNELTKVKYVTEGMRKPAFLSGEQKKAIVDLLFKTNRKVTVKQLKEDYFKKIECFDSVEISGVEDRFNASLGTYHDLLKIIKDKDFLDNEENEDILEDIVLTLTLFEDREMIEERLKTYAHLFDDKVMKQLKRRRYTGWGRLSRKLINGIRDKQSGKTILDFLKSDGFANRNFMQLIHDDSLTFKEDIQKAQVSGQGDSLHEHIANLAGSPAIKKGILQTVKVVDELVKVMGRHKPENIVIEMARENQTTQKGQKNSRERMKRIEEGIKELGSQILKEHPVENTQLQNEKLYLYYLQNGRDMYVDQELDINRLSDYDVDHIVPQSFLKDDSIDNKVLTRSDKARGKSDNVPSEEVVKKMKNYWRQLLNAKLITQRKFDNLTKAERGGLSELDKAGFIKRQLVETRQITKHVAQILDSRMNTKYDENDKLIREVKVITLKSKLVSDFRKDFQFYKVREINNYHHAHDAYLNAVVGTALIKKYPKLESEFVYGDYKVYDVRKMIAKSEQEIGKATAKYFFYSNIMNFFKTEITLANGEIRKRPLIETNGETGEIVWDKGRDFATVRKVLSMPQVNIVKKTEVQTGGFSKESILPKRNSDKLIARKKDWDPKKYGGFDSPTVAYSVLVVAKVEKGKSKKLKSVKELLGITIMERSSFEKNPIDFLEAKGYKEVKKDLIIKLPKYSLFELENGRKRMLASAGELQKGNELALPSKYVNFLYLASHYEKLKGSPEDNEQKQLFVEQHKHYLDEIIEQISEFSKRVILADANLDKVLSAYNKHRDKPIREQAENIIHLFTLTNLGAPAAFKYFDTTIDRKRYTSTKEVLDATLIHQSITGLYETRIDLSQLGGDGGGGGGSSEAAAKGGTLNIEDEYRLHETSKEPDVPLGSTWLSDFPQAWAETGGMGLAVRQAPLIIPLKATSTPVSIKQYPMSQEARLGIKPHIQRLLDQGILVPCQSPWNTPLLPVKKPGTNDYRPVQDLREVNKRVEDIHPTVPNPYNLLSGLPPSHQWYTVLDLKDAFFCLRLHPTSQPLFAFEWRDPEMGISGQLTWTRLPQGFKNSPTLFNEALHRDLADFRIQHPDLILLQYVDDLLLAATSEQDCQRGTRALLQTLGNLGYRASAKKAQICQKQVKYLGYLLKEGQRWLTEARKETVMGQPTPKTPRQLREFLGKAGFCRLFIPGFAEMAAPLYPLTKPGTLFNWGPDQQKAYQEIKQALLTAPALGLPDLTKPFELFVDEKQGYAKGVLTQKLGPWRRPVAYLSKKLDPVAAGWPPCLRMVAAIAVLTKDAGKLTMGQPLVILAPHAVEALVKQPPDRWLSNARMTHYQAMLLDTDRVQFGPVVALNPATLLPLPEKEAPHDCLEILAETHGTRPDLTDQPIPDADYTWYTDGSSFLQEGQRRAGAAVTTETEVIWARALPAGTSAQRAELIALTQALKMAEGKKLNVYTDSRYAFATAHVHGEIYRRRGWLTSEGREIKNKNEILALLKALFLPKRLSIIHCPGHQKGNSAEARGNRMADQAAREAAMKAVLETSTLLAGKRTADGSEFEKRTADGSEFESPKKKAKVE

SEQ ID NO: 1054 - protein, 2096 aa, synthetic construct
MPAAKRVKLDGGDKKYSIGLDIGTNSVGWAVITDEYKVPSKKFKVLGNTDRHSIKKNLIGALLFDSGETAEATRLKRTARRRYTRRKNRICYLQEIFSNEMAKVDDSFFHRLEESFLVEEDKKHERHPIFGNIVDEVAYHEKYPTIYHLRKKLVDSTDKADLRLIYLALAHMIKFRGHFLIEGDLNPDNSDVDKLFIQLVQTYNQLFEENPINASGVDAKAILSARLSKSRRLENLIAQLPGEKKNGLFGNLIALSLGLTPNFKSNFDLAEDAKLQLSKDTYDDDLDNLLAQIGDQYADLFLAAKNLSDAILLSDILRVNTEITKAPLSASMIKRYDEHHQDLTLLKALVRQQLPEKYKEIFFDQSKNGYAGYIDGGASQEEFYKFIKPILEKMDGTEELLVKLNREDLLRKQRTFDNGSIPHQIHLGELHAILRRQEDFYPFLKDNREKIEKILTFRIPYYVGPLARGNSRFAWMTRKSEETITPWNFEEVVDKGASAQSFIERMTNFDKNLPNEKVLPKHSLLYEYFTVYNELTKVKYVTEGMRKPAFLSGEQKKAIVDLLFKTNRKVTVKQLKEDYFKKIECFDSVEISGVEDRFNASLGTYHDLLKIIKDKDFLDNEENEDILEDIVLTLTLFEDREMIEERLKTYAHLFDDKVMKQLKRRRYTGWGRLSRKLINGIRDKQSGKTILDFLKSDGFANRNFMQLIHDDSLTFKEDIQKAQVSGQGDSLHEHIANLAGSPAIKKGILQTVKVVDELVKVMGRHKPENIVIEMARENQTTQKGQKNSRERMKRIEEGIKELGSQILKEHPVENTQLQNEKLYLYYLQNGRDMYVDQELDINRLSDYDVDHIVPQSFLKDDSIDNKVLTRSDKARGKSDNVPSEEVVKKMKNYWRQLLNAKLITQRKFDNLTKAERGGLSELDKAGFIKRQLVETRQITKHVAQILDSRMNTKYDENDKLIREVKVITLKSKLVSDFRKDFQFYKVREINNYHHAHDAYLNAVVGTALIKKYPKLESEFVYGDYKVYDVRKMIAKSEQEIGKATAKYFFYSNIMNFFKTEITLANGEIRKRPLIETNGETGEIVWDKGRDFATVRKVLSMPQVNIVKKTEVQTGGFSKESILPKRNSDKLIARKKDWDPKKYGGFDSPTVAYSVLVVAKVEKGKSKKLKSVKELLGITIMERSSFEKNPIDFLEAKGYKEVKKDLIIKLPKYSLFELENGRKRMLASAGELQKGNELALPSKYVNFLYLASHYEKLKGSPEDNEQKQLFVEQHKHYLDEIIEQISEFSKRVILADANLDKVLSAYNKHRDKPIREQAENIIHLFTLTNLGAPAAFKYFDTTIDRKRYTSTKEVLDATLIHQSITGLYETRIDLSQLGGDGGGSSGGGEAAAKGGTLNIEDEYRLHETSKEPDVPLGSTWLSDFPQAWAETGGMGLAVRQAPLIIPLKATSTPVSIKQYPMSQEARLGIKPHIQRLLDQGILVPCQSPWNTPLLPVKKPGTNDYRPVQDLREVNKRVEDIHPTVPNPYNLLSGLPPSHQWYTVLDLKDAFFCLRLHPTSQPLFAFEWRDPEMGISGQLTWTRLPQGFKNSPTLFNEALHRDLADFRIQHPDLILLQYVDDLLLAATSEQDCQRGTRALLQTLGNLGYRASAKKAQICQKQVKYLGYLLKEGQRWLTEARKETVMGQPTPKTPRQLREFLGKAGFCRLFIPGFAEMAAPLYPLTKPGTLFNWGPDQQKAYQEIKQALLTAPALGLPDLTKPFELFVDEKQGYAKGVLTQKLGPWRRPVAYLSKKLDPVAAGWPPCLRMVAAIAVLTKDAGKLTMGQPLVILAPHAVEALVKQPPDRWLSNARMTHYQAMLLDTDRVQFGPVVALNPATLLPLPEKEAPHDCLEILAETHGTRPDLTDQPIPDADYTWYTDGSSFLQEGQRRAGAAVTTETEVIWARALPAGTSAQRAELIALTQALKMAEGKKLNVYTDSRYAFATAHVHGEIYRRRGWLTSEGREIKNKNEILALLKALFLPKRLSIIHCPGHQKGNSAEARGNRMADQAAREAAMKAVLETSTLLAGKRTADGSEFEKRTADGSEFESPKKKAKVE

SEQ ID NO: 1055 - protein, 2094 aa, synthetic construct
MPAAKRVKLDGGDKKYSIGLDIGTNSVGWAVITDEYKVPSKKFKVLGNTDRHSIKKNLIGALLFDSGETAEATRLKRTARRRYTRRKNRICYLQEIFSNEMAKVDDSFFHRLEESFLVEEDKKHERHPIFGNIVDEVAYHEKYPTIYHLRKKLVDSTDKADLRLIYLALAHMIKFRGHFLIEGDLNPDNSDVDKLFIQLVQTYNQLFEENPINASGVDAKAILSARLSKSRRLENLIAQLPGEKKNGLFGNLIALSLGLTPNFKSNFDLAEDAKLQLSKDTYDDDLDNLLAQIGDQYADLFLAAKNLSDAILLSDILRVNTEITKAPLSASMIKRYDEHHQDLTLLKALVRQQLPEKYKEIFFDQSKNGYAGYIDGGASQEEFYKFIKPILEKMDGTEELLVKLNREDLLRKQRTFDNGSIPHQIHLGELHAILRRQEDFYPFLKDNREKIEKILTFRIPYYVGPLARGNSRFAWMTRKSEETITPWNFEEVVDKGASAQSFIERMTNFDKNLPNEKVLPKHSLLYEYFTVYNELTKVKYVTEGMRKPAFLSGEQKKAIVDLLFKTNRKVTVKQLKEDYFKKIECFDSVEISGVEDRFNASLGTYHDLLKIIKDKDFLDNEENEDILEDIVLTLTLFEDREMIEERLKTYAHLFDDKVMKQLKRRRYTGWGRLSRKLINGIRDKQSGKTILDFLKSDGFANRNFMQLIHDDSLTFKEDIQKAQVSGQGDSLHEHIANLAGSPAIKKGILQTVKVVDELVKVMGRHKPENIVIEMARENQTTQKGQKNSRERMKRIEEGIKELGSQILKEHPVENTQLQNEKLYLYYLQNGRDMYVDQELDINRLSDYDVDHIVPQSFLKDDSIDNKVLTRSDKARGKSDNVPSEEVVKKMKNYWRQLLNAKLITQRKFDNLTKAERGGLSELDKAGFIKRQLVETRQITKHVAQILDSRMNTKYDENDKLIREVKVITLKSKLVSDFRKDFQFYKVREINNYHHAHDAYLNAVVGTALIKKYPKLESEFVYGDYKVYDVRKMIAKSEQEIGKATAKYFFYSNIMNFFKTEITLANGEIRKRPLIETNGETGEIVWDKGRDFATVRKVLSMPQVNIVKKTEVQTGGFSKESILPKRNSDKLIARKKDWDPKKYGGFDSPTVAYSVLVVAKVEKGKSKKLKSVKELLGITIMERSSFEKNPIDFLEAKGYKEVKKDLIIKLPKYSLFELENGRKRMLASAGELQKGNELALPSKYVNFLYLASHYEKLKGSPEDNEQKQLFVEQHKHYLDEIIEQISEFSKRVILADANLDKVLSAYNKHRDKPIREQAENIIHLFTLTNLGAPAAFKYFDTTIDRKRYTSTKEVLDATLIHQSITGLYETRIDLSQLGGDGGGGSPAPGGGGGTLNIEDEYRLHETSKEPDVPLGSTWLSDFPQAWAETGGMGLAVRQAPLIIPLKATSTPVSIKQYPMSQEARLGIKPHIQRLLDQGILVPCQSPWNTPLLPVKKPGTNDYRPVQDLREVNKRVEDIHPTVPNPYNLLSGLPPSHQWYTVLDLKDAFFCLRLHPTSQPLFAFEWRDPEMGISGQLTWTRLPQGFKNSPTLFNEALHRDLADFRIQHPDLILLQYVDDLLLAATSEQDCQRGTRALLQTLGNLGYRASAKKAQICQKQVKYLGYLLKEGQRWLTEARKETVMGQPTPKTPRQLREFLGKAGFCRLFIPGFAEMAAPLYPLTKPGTLFNWGPDQQKAYQEIKQALLTAPALGLPDLTKPFELFVDEKQGYAKGVLTQKLGPWRRPVAYLSKKLDPVAAGWPPCLRMVAAIAVLTKDAGKLTMGQPLVILAPHAVEALVKQPPDRWLSNARMTHYQAMLLDTDRVQFGPVVALNPATLLPLPEKEAPHDCLEILAETHGTRPDLTDQPIPDADYTWYTDGSSFLQEGQRRAGAAVTTETEVIWARALPAGTSAQRAELIALTQALKMAEGKKLNVYTDSRYAFATAHVHGEIYRRRGWLTSEGREIKNKNEILALLKALFLPKRLSIIHCPGHQKGNSAEARGNRMADQAAREAAMKAVLETSTLLAGKRTADGSEFEKRTADGSEFESPKKKAKVE

SEQ ID NO: 1056 - protein, 2096 aa, synthetic construct
MPAAKRVKLDGGDKKYSIGLDIGTNSVGWAVITDEYKVPSKKFKVLGNTDRHSIKKNLIGALLFDSGETAEATRLKRTARRRYTRRKNRICYLQEIFSNEMAKVDDSFFHRLEESFLVEEDKKHERHPIFGNIVDEVAYHEKYPTIYHLRKKLVDSTDKADLRLIYLALAHMIKFRGHFLIEGDLNPDNSDVDKLFIQLVQTYNQLFEENPINASGVDAKAILSARLSKSRRLENLIAQLPGEKKNGLFGNLIALSLGLTPNFKSNFDLAEDAKLQLSKDTYDDDLDNLLAQIGDQYADLFLAAKNLSDAILLSDILRVNTEITKAPLSASMIKRYDEHHQDLTLLKALVRQQLPEKYKEIFFDQSKNGYAGYIDGGASQEEFYKFIKPILEKMDGTEELLVKLNREDLLRKQRTFDNGSIPHQIHLGELHAILRRQEDFYPFLKDNREKIEKILTFRIPYYVGPLARGNSRFAWMTRKSEETITPWNFEEVVDKGASAQSFIERMTNFDKNLPNEKVLPKHSLLYEYFTVYNELTKVKYVTEGMRKPAFLSGEQKKAIVDLLFKTNRKVTVKQLKEDYFKKIECFDSVEISGVEDRFNASLGTYHDLLKIIKDKDFLDNEENEDILEDIVLTLTLFEDREMIEERLKTYAHLFDDKVMKQLKRRRYTGWGRLSRKLINGIRDKQSGKTILDFLKSDGFANRNFMQLIHDDSLTFKEDIQKAQVSGQGDSLHEHIANLAGSPAIKKGILQTVKVVDELVKVMGRHKPENIVIEMARENQTTQKGQKNSRERMKRIEEGIKELGSQILKEHPVENTQLQNEKLYLYYLQNGRDMYVDQELDINRLSDYDVDHIVPQSFLKDDSIDNKVLTRSDKARGKSDNVPSEEVVKKMKNYWRQLLNAKLITQRKFDNLTKAERGGLSELDKAGFIKRQLVETRQITKHVAQILDSRMNTKYDENDKLIREVKVITLKSKLVSDFRKDFQFYKVREINNYHHAHDAYLNAVVGTALIKKYPKLESEFVYGDYKVYDVRKMIAKSEQEIGKATAKYFFYSNIMNFFKTEITLANGEIRKRPLIETNGETGEIVWDKGRDFATVRKVLSMPQVNIVKKTEVQTGGFSKESILPKRNSDKLIARKKDWDPKKYGGFDSPTVAYSVLVVAKVEKGKSKKLKSVKELLGITIMERSSFEKNPIDFLEAKGYKEVKKDLIIKLPKYSLFELENGRKRMLASAGELQKGNELALPSKYVNFLYLASHYEKLKGSPEDNEQKQLFVEQHKHYLDEIIEQISEFSKRVILADANLDKVLSAYNKHRDKPIREQAENIIHLFTLTNLGAPAAFKYFDTTIDRKRYTSTKEVLDATLIHQSITGLYETRIDLSQLGGDGGEAAAKGGGGSSGGTLNIEDEYRLHETSKEPDVPLGSTWLSDFPQAWAETGGMGLAVRQAPLIIPLKATSTPVSIKQYPMSQEARLGIKPHIQRLLDQGILVPCQSPWNTPLLPVKKPGTNDYRPVQDLREVNKRVEDIHPTVPNPYNLLSGLPPSHQWYTVLDLKDAFFCLRLHPTSQPLFAFEWRDPEMGISGQLTWTRLPQGFKNSPTLFNEALHRDLADFRIQHPDLILLQYVDDLLLAATSEQDCQRGTRALLQTLGNLGYRASAKKAQICQKQVKYLGYLLKEGQRWLTEARKETVMGQPTPKTPRQLREFLGKAGFCRLFIPGFAEMAAPLYPLTKPGTLFNWGPDQQKAYQEIKQALLTAPALGLPDLTKPFELFVDEKQGYAKGVLTQKLGPWRRPVAYLSKKLDPVAAGWPPCLRMVAAIAVLTKDAGKLTMGQPLVILAPHAVEALVKQPPDRWLSNARMTHYQAMLLDTDRVQFGPVVALNPATLLPLPEKEAPHDCLEILAETHGTRPDLTDQPIPDADYTWYTDGSSFLQEGQRRAGAAVTTETEVIWARALPAGTSAQRAELIALTQALKMAEGKKLNVYTDSRYAFATAHVHGEIYRRRGWLTSEGREIKNKNEILALLKALFLPKRLSIIHCPGHQKGNSAEARGNRMADQAAREAAMKAVLETSTLLAGKRTADGSEFEKRTADGSEFESPKKKAKVE

SEQ ID NO: 1057 - protein, 2089 aa, synthetic construct
MPAAKRVKLDGGDKKYSIGLDIGTNSVGWAVITDEYKVPSKKFKVLGNTDRHSIKKNLIGALLFDSGETAEATRLKRTARRRYTRRKNRICYLQEIFSNEMAKVDDSFFHRLEESFLVEEDKKHERHPIFGNIVDEVAYHEKYPTIYHLRKKLVDSTDKADLRLIYLALAHMIKFRGHFLIEGDLNPDNSDVDKLFIQLVQTYNQLFEENPINASGVDAKAILSARLSKSRRLENLIAQLPGEKKNGLFGNLIALSLGLTPNFKSNFDLAEDAKLQLSKDTYDDDLDNLLAQIGDQYADLFLAAKNLSDAILLSDILRVNTEITKAPLSASMIKRYDEHHQDLTLLKALVRQQLPEKYKEIFFDQSKNGYAGYIDGGASQEEFYKFIKPILEKMDGTEELLVKLNREDLLRKQRTFDNGSIPHQIHLGELHAILRRQEDFYPFLKDNREKIEKILTFRIPYYVGPLARGNSRFAWMTRKSEETITPWNFEEVVDKGASAQSFIERMTNFDKNLPNEKVLPKHSLLYEYFTVYNELTKVKYVTEGMRKPAFLSGEQKKAIVDLLFKTNRKVTVKQLKEDYFKKIECFDSVEISGVEDRFNASLGTYHDLLKIIKDKDFLDNEENEDILEDIVLTLTLFEDREMIEERLKTYAHLFDDKVMKQLKRRRYTGWGRLSRKLINGIRDKQSGKTILDFLKSDGFANRNFMQLIHDDSLTFKEDIQKAQVSGQGDSLHEHIANLAGSPAIKKGILQTVKVVDELVKVMGRHKPENIVIEMARENQTTQKGQKNSRERMKRIEEGIKELGSQILKEHPVENTQLQNEKLYLYYLQNGRDMYVDQELDINRLSDYDVDHIVPQSFLKDDSIDNKVLTRSDKARGKSDNVPSEEVVKKMKNYWRQLLNAKLITQRKFDNLTKAERGGLSELDKAGFIKRQLVETRQITKHVAQILDSRMNTKYDENDKLIREVKVITLKSKLVSDFRKDFQFYKVREINNYHHAHDAYLNAVVGTALIKKYPKLESEFVYGDYKVYDVRKMIAKSEQEIGKATAKYFFYSNIMNFFKTEITLANGEIRKRPLIETNGETGEIVWDKGRDFATVRKVLSMPQVNIVKKTEVQTGGFSKESILPKRNSDKLIARKKDWDPKKYGGFDSPTVAYSVLVVAKVEKGKSKKLKSVKELLGITIMERSSFEKNPIDFLEAKGYKEVKKDLIIKLPKYSLFELENGRKRMLASAGELQKGNELALPSKYVNFLYLASHYEKLKGSPEDNEQKQLFVEQHKHYLDEIIEQISEFSKRVILADANLDKVLSAYNKHRDKPIREQAENIIHLFTLTNLGAPAAFKYFDTTIDRKRYTSTKEVLDATLIHQSITGLYETRIDLSQLGGDGGGGGGGGTLNIEDEYRLHETSKEPDVPLGSTWLSDFPQAWAETGGMGLAVRQAPLIIPLKATSTPVSIKQYPMSQEARLGIKPHIQRLLDQGILVPCQSPWNTPLLPVKKPGTNDYRPVQDLREVNKRVEDIHPTVPNPYNLLSGLPPSHQWYTVLDLKDAFFCLRLHPTSQPLFAFEWRDPEMGISGQLTWTRLPQGFKNSPTLFNEALHRDLADFRIQHPDLILLQYVDDLLLAATSEQDCQRGTRALLQTLGNLGYRASAKKAQICQKQVKYLGYLLKEGQRWLTEARKETVMGQPTPKTPRQLREFLGKAGFCRLFIPGFAEMAAPLYPLTKPGTLFNWGPDQQKAYQEIKQALLTAPALGLPDLTKPFELFVDEKQGYAKGVLTQKLGPWRRPVAYLSKKLDPVAAGWPPCLRMVAAIAVLTKDAGKLTMGQPLVILAPHAVEALVKQPPDRWLSNARMTHYQAMLLDTDRVQFGPVVALNPATLLPLPEKEAPHDCLEILAETHGTRPDLTDQPIPDADYTWYTDGSSFLQEGQRRAGAAVTTETEVIWARALPAGTSAQRAELIALTQALKMAEGKKLNVYTDSRYAFATAHVHGEIYRRRGWLTSEGREIKNKNEILALLKALFLPKRLSIIHCPGHQKGNSAEARGNRMADQAAREAAMKAVLETSTLLAGKRTADGSEFEKRTADGSEFESPKKKAKVE

SEQ ID NO: 1058 - protein, 2096 aa, synthetic construct
MPAAKRVKLDGGDKKYSIGLDIGTNSVGWAVITDEYKVPSKKFKVLGNTDRHSIKKNLIGALLFDSGETAEATRLKRTARRRYTRRKNRICYLQEIFSNEMAKVDDSFFHRLEESFLVEEDKKHERHPIFGNIVDEVAYHEKYPTIYHLRKKLVDSTDKADLRLIYLALAHMIKFRGHFLIEGDLNPDNSDVDKLFIQLVQTYNQLFEENPINASGVDAKAILSARLSKSRRLENLIAQLPGEKKNGLFGNLIALSLGLTPNFKSNFDLAEDAKLQLSKDTYDDDLDNLLAQIGDQYADLFLAAKNLSDAILLSDILRVNTEITKAPLSASMIKRYDEHHQDLTLLKALVRQQLPEKYKEIFFDQSKNGYAGYIDGGASQEEFYKFIKPILEKMDGTEELLVKLNREDLLRKQRTFDNGSIPHQIHLGELHAILRRQEDFYPFLKDNREKIEKILTFRIPYYVGPLARGNSRFAWMTRKSEETITPWNFEEVVDKGASAQSFIERMTNFDKNLPNEKVLPKHSLLYEYFTVYNELTKVKYVTEGMRKPAFLSGEQKKAIVDLLFKTNRKVTVKQLKEDYFKKIECFDSVEISGVEDRFNASLGTYHDLLKIIKDKDFLDNEENEDILEDIVLTLTLFEDREMIEERLKTYAHLFDDKVMKQLKRRRYTGWGRLSRKLINGIRDKQSGKTILDFLKSDGFANRNFMQLIHDDSLTFKEDIQKAQVSGQGDSLHEHIANLAGSPAIKKGILQTVKVVDELVKVMGRHKPENIVIEMARENQTTQKGQKNSRERMKRIEEGIKELGSQILKEHPVENTQLQNEKLYLYYLQNGRDMYVDQELDINRLSDYDVDHIVPQSFLKDDSIDNKVLTRSDKARGKSDNVPSEEVVKKMKNYWRQLLNAKLITQRKFDNLTKAERGGLSELDKAGFIKRQLVETRQITKHVAQILDSRMNTKYDENDKLIREVKVITLKSKLVSDFRKDFQFYKVREINNYHHAHDAYLNAVVGTALIKKYPKLESEFVYGDYKVYDVRKMIAKSEQEIGKATAKYFFYSNIMNFFKTEITLANGEIRKRPLIETNGETGEIVWDKGRDFATVRKVLSMPQVNIVKKTEVQTGGFSKESILPKRNSDKLIARKKDWDPKKYGGFDSPTVAYSVLVVAKVEKGKSKKLKSVKELLGITIMERSSFEKNPIDFLEAKGYKEVKKDLIIKLPKYSLFELENGRKRMLASAGELQKGNELALPSKYVNFLYLASHYEKLKGSPEDNEQKQLFVEQHKHYLDEIIEQISEFSKRVILADANLDKVLSAYNKHRDKPIREQAENIIHLFTLTNLGAPAAFKYFDTTIDRKRYTSTKEVLDATLIHQSITGLYETRIDLSQLGGDGGEAAAKGGGPAPGGTLNIEDEYRLHETSKEPDVPLGSTWLSDFPQAWAETGGMGLAVRQAPLIIPLKATSTPVSIKQYPMSQEARLGIKPHIQRLLDQGILVPCQSPWNTPLLPVKKPGTNDYRPVQDLREVNKRVEDIHPTVPNPYNLLSGLPPSHQWYTVLDLKDAFFCLRLHPTSQPLFAFEWRDPEMGISGQLTWTRLPQGFKNSPTLFNEALHRDLADFRIQHPDLILLQYVDDLLLAATSEQDCQRGTRALLQTLGNLGYRASAKKAQICQKQVKYLGYLLKEGQRWLTEARKETVMGQPTPKTPRQLREFLGKAGFCRLFIPGFAEMAAPLYPLTKPGTLFNWGPDQQKAYQEIKQALLTAPALGLPDLTKPFELFVDEKQGYAKGVLTQKLGPWRRPVAYLSKKLDPVAAGWPPCLRMVAAIAVLTKDAGKLTMGQPLVILAPHAVEALVKQPPDRWLSNARMTHYQAMLLDTDRVQFGPVVALNPATLLPLPEKEAPHDCLEILAETHGTRPDLTDQPIPDADYTWYTDGSSFLQEGQRRAGAAVTTETEVIWARALPAGTSAQRAELIALTQALKMAEGKKLNVYTDSRYAFATAHVHGEIYRRRGWLTSEGREIKNKNEILALLKALFLPKRLSIIHCPGHQKGNSAEARGNRMADQAAREAAMKAVLETSTLLAGKRTADGSEFEKRTADGSEFESPKKKAKVE

SEQ ID NO: 1059 - protein, 2096 aa, synthetic construct
MPAAKRVKLDGGDKKYSIGLDIGTNSVGWAVITDEYKVPSKKFKVLGNTDRHSIKKNLIGALLFDSGETAEATRLKRTARRRYTRRKNRICYLQEIFSNEMAKVDDSFFHRLEESFLVEEDKKHERHPIFGNIVDEVAYHEKYPTIYHLRKKLVDSTDKADLRLIYLALAHMIKFRGHFLIEGDLNPDNSDVDKLFIQLVQTYNQLFEENPINASGVDAKAILSARLSKSRRLENLIAQLPGEKKNGLFGNLIALSLGLTPNFKSNFDLAEDAKLQLSKDTYDDDLDNLLAQIGDQYADLFLAAKNLSDAILLSDILRVNTEITKAPLSASMIKRYDEHHQDLTLLKALVRQQLPEKYKEIFFDQSKNGYAGYIDGGASQEEFYKFIKPILEKMDGTEELLVKLNREDLLRKQRTFDNGSIPHQIHLGELHAILRRQEDFYPFLKDNREKIEKILTFRIPYYVGPLARGNSRFAWMTRKSEETITPWNFEEVVDKGASAQSFIERMTNFDKNLPNEKVLPKHSLLYEYFTVYNELTKVKYVTEGMRKPAFLSGEQKKAIVDLLFKTNRKVTVKQLKEDYFKKIECFDSVEISGVEDRFNASLGTYHDLLKIIKDKDFLDNEENEDILEDIVLTLTLFEDREMIEERLKTYAHLFDDKVMKQLKRRRYTGWGRLSRKLINGIRDKQSGKTILDFLKSDGFANRNFMQLIHDDSLTFKEDIQKAQVSGQGDSLHEHIANLAGSPAIKKGILQTVKVVDELVKVMGRHKPENIVIEMARENQTTQKGQKNSRERMKRIEEGIKELGSQILKEHPVENTQLQNEKLYLYYLQNGRDMYVDQELDINRLSDYDVDHIVPQSFLKDDSIDNKVLTRSDKARGKSDNVPSEEVVKKMKNYWRQLLNAKLITQRKFDNLTKAERGGLSELDKAGFIKRQLVETRQITKHVAQILDSRMNTKYDENDKLIREVKVITLKSKLVSDFRKDFQFYKVREINNYHHAHDAYLNAVVGTALIKKYPKLESEFVYGDYKVYDVRKMIAKSEQEIGKATAKYFFYSNIMNFFKTEITLANGEIRKRPLIETNGETGEIVWDKGRDFATVRKVLSMPQVNIVKKTEVQTGGFSKESILPKRNSDKLIARKKDWDPKKYGGFDSPTVAYSVLVVAKVEKGKSKKLKSVKELLGITIMERSSFEKNPIDFLEAKGYKEVKKDLIIKLPKYSLFELENGRKRMLASAGELQKGNELALPSKYVNFLYLASHYEKLKGSPEDNEQKQLFVEQHKHYLDEIIEQISEFSKRVILADANLDKVLSAYNKHRDKPIREQAENIIHLFTLTNLGAPAAFKYFDTTIDRKRYTSTKEVLDATLIHQSITGLYETRIDLSQLGGDGGGGSGSSEAAAKGGTLNIEDEYRLHETSKEPDVPLGSTWLSDFPQAWAETGGMGLAVRQAPLIIPLKATSTPVSIKQYPMSQEARLGIKPHIQRLLDQGILVPCQSPWNTPLLPVKKPGTNDYRPVQDLREVNKRVEDIHPTVPNPYNLLSGLPPSHQWYTVLDLKDAFFCLRLHPTSQPLFAFEWRDPEMGISGQLTWTRLPQGFKNSPTLFNEALHRDLADFRIQHPDLILLQYVDDLLLAATSEQDCQRGTRALLQTLGNLGYRASAKKAQICQKQVKYLGYLLKEGQRWLTEARKETVMGQPTPKTPRQLREFLGKAGFCRLFIPGFAEMAAPLYPLTKPGTLFNWGPDQQKAYQEIKQALLTAPALGLPDLTKPFELFVDEKQGYAKGVLTQKLGPWRRPVAYLSKKLDPVAAGWPPCLRMVAAIAVLTKDAGKLTMGQPLVILAPHAVEALVKQPPDRWLSNARMTHYQAMLLDTDRVQFGPVVALNPATLLPLPEKEAPHDCLEILAETHGTRPDLTDQPIPDADYTWYTDGSSFLQEGQRRAGAAVTTETEVIWARALPAGTSAQRAELIALTQALKMAEGKKLNVYTDSRYAFATAHVHGEIYRRRGWLTSEGREIKNKNEILALLKALFLPKRLSIIHCPGHQKGNSAEARGNRMADQAAREAAMKAVLETSTLLAGKRTADGSEFEKRTADGSEFESPKKKAKVE

SEQ ID NO: 1060 - protein, 2096 aa, synthetic construct
MPAAKRVKLDGGDKKYSIGLDIGTNSVGWAVITDEYKVPSKKFKVLGNTDRHSIKKNLIGALLFDSGETAEATRLKRTARRRYTRRKNRICYLQEIFSNEMAKVDDSFFHRLEESFLVEEDKKHERHPIFGNIVDEVAYHEKYPTIYHLRKKLVDSTDKADLRLIYLALAHMIKFRGHFLIEGDLNPDNSDVDKLFIQLVQTYNQLFEENPINASGVDAKAILSARLSKSRRLENLIAQLPGEKKNGLFGNLIALSLGLTPNFKSNFDLAEDAKLQLSKDTYDDDLDNLLAQIGDQYADLFLAAKNLSDAILLSDILRVNTEITKAPLSASMIKRYDEHHQDLTLLKALVRQQLPEKYKEIFFDQSKNGYAGYIDGGASQEEFYKFIKPILEKMDGTEELLVKLNREDLLRKQRTFDNGSIPHQIHLGELHAILRRQEDFYPFLKDNREKIEKILTFRIPYYVGPLARGNSRFAWMTRKSEETITPWNFEEVVDKGASAQSFIERMTNFDKNLPNEKVLPKHSLLYEYFTVYNELTKVKYVTEGMRKPAFLSGEQKKAIVDLLFKTNRKVTVKQLKEDYFKKIECFDSVEISGVEDRFNASLGTYHDLLKIIKDKDFLDNEENEDILEDIVLTLTLFEDREMIEERLKTYAHLFDDKVMKQLKRRRYTGWGRLSRKLINGIRDKQSGKTILDFLKSDGFANRNFMQLIHDDSLTFKEDIQKAQVSGQGDSLHEHIANLAGSPAIKKGILQTVKVVDELVKVMGRHKPENIVIEMARENQTTQKGQKNSRERMKRIEEGIKELGSQILKEHPVENTQLQNEKLYLYYLQNGRDMYVDQELDINRLSDYDVDHIVPQSFLKDDSIDNKVLTRSDKARGKSDNVPSEEVVKKMKNYWRQLLNAKLITQRKFDNLTKAERGGLSELDKAGFIKRQLVETRQITKHVAQILDSRMNTKYDENDKLIREVKVITLKSKLVSDFRKDFQFYKVREINNYHHAHDAYLNAVVGTALIKKYPKLESEFVYGDYKVYDVRKMIAKSEQEIGKATAKYFFYSNIMNFFKTEITLANGEIRKRPLIETNGETGEIVWDKGRDFATVRKVLSMPQVNIVKKTEVQTGGFSKESILPKRNSDKLIARKKDWDPKKYGGFDSPTVAYSVLVVAKVEKGKSKKLKSVKELLGITIMERSSFEKNPIDFLEAKGYKEVKKDLIIKLPKYSLFELENGRKRMLASAGELQKGNELALPSKYVNFLYLASHYEKLKGSPEDNEQKQLFVEQHKHYLDEIIEQISEFSKRVILADANLDKVLSAYNKHRDKPIREQAENIIHLFTLTNLGAPAAFKYFDTTIDRKRYTSTKEVLDATLIHQSITGLYETRIDLSQLGGDGGGSSGGSEAAAKGGTLNIEDEYRLHETSKEPDVPLGSTWLSDFPQAWAETGGMGLAVRQAPLIIPLKATSTPVSIKQYPMSQEARLGIKPHIQRLLDQGILVPCQSPWNTPLLPVKKPGTNDYRPVQDLREVNKRVEDIHPTVPNPYNLLSGLPPSHQWYTVLDLKDAFFCLRLHPTSQPLFAFEWRDPEMGISGQLTWTRLPQGFKNSPTLFNEALHRDLADFRIQHPDLILLQYVDDLLLAATSEQDCQRGTRALLQTLGNLGYRASAKKAQICQKQVKYLGYLLKEGQRWLTEARKETVMGQPTPKTPRQLREFLGKAGFCRLFIPGFAEMAAPLYPLTKPGTLFNWGPDQQKAYQEIKQALLTAPALGLPDLTKPFELFVDEKQGYAKGVLTQKLGPWRRPVAYLSKKLDPVAAGWPPCLRMVAAIAVLTKDAGKLTMGQPLVILAPHAVEALVKQPPDRWLSNARMTHYQAMLLDTDRVQFGPVVALNPATLLPLPEKEAPHDCLEILAETHGTRPDLTDQPIPDADYTWYTDGSSFLQEGQRRAGAAVTTETEVIWARALPAGTSAQRAELIALTQALKMAEGKKLNVYTDSRYAFATAHVHGEIYRRRGWLTSEGREIKNKNEILALLKALFLPKRLSIIHCPGHQKGNSAEARGNRMADQAAREAAMKAVLETSTLLAGKRTADGSEFEKRTADGSEFESPKKKAKVE

SEQ ID NO: 1061 - protein, 2094 aa, synthetic construct
MPAAKRVKLDGGDKKYSIGLDIGTNSVGWAVITDEYKVPSKKFKVLGNTDRHSIKKNLIGALLFDSGETAEATRLKRTARRRYTRRKNRICYLQEIFSNEMAKVDDSFFHRLEESFLVEEDKKHERHPIFGNIVDEVAYHEKYPTIYHLRKKLVDSTDKADLRLIYLALAHMIKFRGHFLIEGDLNPDNSDVDKLFIQLVQTYNQLFEENPINASGVDAKAILSARLSKSRRLENLIAQLPGEKKNGLFGNLIALSLGLTPNFKSNFDLAEDAKLQLSKDTYDDDLDNLLAQIGDQYADLFLAAKNLSDAILLSDILRVNTEITKAPLSASMIKRYDEHHQDLTLLKALVRQQLPEKYKEIFFDQSKNGYAGYIDGGASQEEFYKFIKPILEKMDGTEELLVKLNREDLLRKQRTFDNGSIPHQIHLGELHAILRRQEDFYPFLKDNREKIEKILTFRIPYYVGPLARGNSRFAWMTRKSEETITPWNFEEVVDKGASAQSFIERMTNFDKNLPNEKVLPKHSLLYEYFTVYNELTKVKYVTEGMRKPAFLSGEQKKAIVDLLFKTNRKVTVKQLKEDYFKKIECFDSVEISGVEDRFNASLGTYHDLLKIIKDKDFLDNEENEDILEDIVLTLTLFEDREMIEERLKTYAHLFDDKVMKQLKRRRYTGWGRLSRKLINGIRDKQSGKTILDFLKSDGFANRNFMQLIHDDSLTFKEDIQKAQVSGQGDSLHEHIANLAGSPAIKKGILQTVKVVDELVKVMGRHKPENIVIEMARENQTTQKGQKNSRERMKRIEEGIKELGSQILKEHPVENTQLQNEKLYLYYLQNGRDMYVDQELDINRLSDYDVDHIVPQSFLKDDSIDNKVLTRSDKARGKSDNVPSEEVVKKMKNYWRQLLNAKLITQRKFDNLTKAERGGLSELDKAGFIKRQLVETRQITKHVAQILDSRMNTKYDENDKLIREVKVITLKSKLVSDFRKDFQFYKVREINNYHHAHDAYLNAVVGTALIKKYPKLESEFVYGDYKVYDVRKMIAKSEQEIGKATAKYFFYSNIMNFFKTEITLANGEIRKRPLIETNGETGEIVWDKGRDFATVRKVLSMPQVNIVKKTEVQTGGFSKESILPKRNSDKLIARKKDWDPKKYGGFDSPTVAYSVLVVAKVEKGKSKKLKSVKELLGITIMERSSFEKNPIDFLEAKGYKEVKKDLIIKLPKYSLFELENGRKRMLASAGELQKGNELALPSKYVNFLYLASHYEKLKGSPEDNEQKQLFVEQHKHYLDEIIEQISEFSKRVILADANLDKVLSAYNKHRDKPIREQAENIIHLFTLTNLGAPAAFKYFDTTIDRKRYTSTKEVLDATLIHQSITGLYETRIDLSQLGGDGGGSSGGSPAPGGTLNIEDEYRLHETSKEPDVPLGSTWLSDFPQAWAETGGMGLAVRQAPLIIPLKATSTPVSIKQYPMSQEARLGIKPHIQRLLDQGILVPCQSPWNTPLLPVKKPGTNDYRPVQDLREVNKRVEDIHPTVPNPYNLLSGLPPSHQWYTVLDLKDAFFCLRLHPTSQPLFAFEWRDPEMGISGQLTWTRLPQGFKNSPTLFNEALHRDLADFRIQHPDLILLQYVDDLLLAATSEQDCQRGTRALLQTLGNLGYRASAKKAQICQKQVKYLGYLLKEGQRWLTEARKETVMGQPTPKTPRQLREFLGKAGFCRLFIPGFAEMAAPLYPLTKPGTLFNWGPDQQKAYQEIKQALLTAPALGLPDLTKPFELFVDEKQGYAKGVLTQKLGPWRRPVAYLSKKLDPVAAGWPPCLRMVAAIAVLTKDAGKLTMGQPLVILAPHAVEALVKQPPDRWLSNARMTHYQAMLLDTDRVQFGPVVALNPATLLPLPEKEAPHDCLEILAETHGTRPDLTDQPIPDADYTWYTDGSSFLQEGQRRAGAAVTTETEVIWARALPAGTSAQRAELIALTQALKMAEGKKLNVYTDSRYAFATAHVHGEIYRRRGWLTSEGREIKNKNEILALLKALFLPKRLSIIHCPGHQKGNSAEARGNRMADQAAREAAMKAVLETSTLLAGKRTADGSEFEKRTADGSEFESPKKKAKVE

SEQ ID NO: 1062 - protein, 2091 aa, synthetic construct
MPAAKRVKLDGGDKKYSIGLDIGTNSVGWAVITDEYKVPSKKFKVLGNTDRHSIKKNLIGALLFDSGETAEATRLKRTARRRYTRRKNRICYLQEIFSNEMAKVDDSFFHRLEESFLVEEDKKHERHPIFGNIVDEVAYHEKYPTIYHLRKKLVDSTDKADLRLIYLALAHMIKFRGHFLIEGDLNPDNSDVDKLFIQLVQTYNQLFEENPINASGVDAKAILSARLSKSRRLENLIAQLPGEKKNGLFGNLIALSLGLTPNFKSNFDLAEDAKLQLSKDTYDDDLDNLLAQIGDQYADLFLAAKNLSDAILLSDILRVNTEITKAPLSASMIKRYDEHHQDLTLLKALVRQQLPEKYKEIFFDQSKNGYAGYIDGGASQEEFYKFIKPILEKMDGTEELLVKLNREDLLRKQRTFDNGSIPHQIHLGELHAILRRQEDFYPFLKDNREKIEKILTFRIPYYVGPLARGNSRFAWMTRKSEETITPWNFEEVVDKGASAQSFIERMTNFDKNLPNEKVLPKHSLLYEYFTVYNELTKVKYVTEGMRKPAFLSGEQKKAIVDLLFKTNRKVTVKQLKEDYFKKIECFDSVEISGVEDRFNASLGTYHDLLKIIKDKDFLDNEENEDILEDIVLTLTLFEDREMIEERLKTYAHLFDDKVMKQLKRRRYTGWGRLSRKLINGIRDKQSGKTILDFLKSDGFANRNFMQLIHDDSLTFKEDIQKAQVSGQGDSLHEHIANLAGSPAIKKGILQTVKVVDELVKVMGRHKPENIVIEMARENQTTQKGQKNSRERMKRIEEGIKELGSQILKEHPVENTQLQNEKLYLYYLQNGRDMYVDQELDINRLSDYDVDHIVPQSFLKDDSIDNKVLTRSDKARGKSDNVPSEEVVKKMKNYWRQLLNAKLITQRKFDNLTKAERGGLSELDKAGFIKRQLVETRQITKHVAQILDSRMNTKYDENDKLIREVKVITLKSKLVSDFRKDFQFYKVREINNYHHAHDAYLNAVVGTALIKKYPKLESEFVYGDYKVYDVRKMIAKSEQEIGKATAKYFFYSNIMNFFKTEITLANGEIRKRPLIETNGETGEIVWDKGRDFATVRKVLSMPQVNIVKKTEVQTGGFSKESILPKRNSDKLIARKKDWDPKKYGGFDSPTVAYSVLVVAKVEKGKSKKLKSVKELLGITIMERSSFEKNPIDFLEAKGYKEVKKDLIIKLPKYSLFELENGRKRMLASAGELQKGNELALPSKYVNFLYLASHYEKLKGSPEDNEQKQLFVEQHKHYLDEIIEQISEFSKRVILADANLDKVLSAYNKHRDKPIREQAENIIHLFTLTNLGAPAAFKYFDTTIDRKRYTSTKEVLDATLIHQSITGLYETRIDLSQLGGDGGGSSGGSGGTLNIEDEYRLHETSKEPDVPLGSTWLSDFPQAWAETGGMGLAVRQAPLIIPLKATSTPVSIKQYPMSQEARLGIKPHIQRLLDQGILVPCQSPWNTPLLPVKKPGTNDYRPVQDLREVNKRVEDIHPTVPNPYNLLSGLPPSHQWYTVLDLKDAFFCLRLHPTSQPLFAFEWRDPEMGISGQLTWTRLPQGFKNSPTLFNEALHRDLADFRIQHPDLILLQYVDDLLLAATSEQDCQRGTRALLQTLGNLGYRASAKKAQICQKQVKYLGYLLKEGQRWLTEARKETVMGQPTPKTPRQLREFLGKAGFCRLFIPGFAEMAAPLYPLTKPGTLFNWGPDQQKAYQEIKQALLTAPALGLPDLTKPFELFVDEKQGYAKGVLTQKLGPWRRPVAYLSKKLDPVAAGWPPCLRMVAAIAVLTKDAGKLTMGQPLVILAPHAVEALVKQPPDRWLSNARMTHYQAMLLDTDRVQFGPVVALNPATLLPLPEKEAPHDCLEILAETHGTRPDLTDQPIPDADYTWYTDGSSFLQEGQRRAGAAVTTETEVIWARALPAGTSAQRAELIALTQALKMAEGKKLNVYTDSRYAFATAHVHGEIYRRRGWLTSEGREIKNKNEILALLKALFLPKRLSIIHCPGHQKGNSAEARGNRMADQAAREAAMKAVLETSTLLAGKRTADGSEFEKRTADGSEFESPKKKAKVE

SEQ ID NO: 1063 - protein, 2094 aa, synthetic construct
MPAAKRVKLDGGDKKYSIGLDIGTNSVGWAVITDEYKVPSKKFKVLGNTDRHSIKKNLIGALLFDSGETAEATRLKRTARRRYTRRKNRICYLQEIFSNEMAKVDDSFFHRLEESFLVEEDKKHERHPIFGNIVDEVAYHEKYPTIYHLRKKLVDSTDKADLRLIYLALAHMIKFRGHFLIEGDLNPDNSDVDKLFIQLVQTYNQLFEENPINASGVDAKAILSARLSKSRRLENLIAQLPGEKKNGLFGNLIALSLGLTPNFKSNFDLAEDAKLQLSKDTYDDDLDNLLAQIGDQYADLFLAAKNLSDAILLSDILRVNTEITKAPLSASMIKRYDEHHQDLTLLKALVRQQLPEKYKEIFFDQSKNGYAGYIDGGASQEEFYKFIKPILEKMDGTEELLVKLNREDLLRKQRTFDNGSIPHQIHLGELHAILRRQEDFYPFLKDNREKIEKILTFRIPYYVGPLARGNSRFAWMTRKSEETITPWNFEEVVDKGASAQSFIERMTNFDKNLPNEKVLPKHSLLYEYFTVYNELTKVKYVTEGMRKPAFLSGEQKKAIVDLLFKTNRKVTVKQLKEDYFKKIECFDSVEISGVEDRFNASLGTYHDLLKIIKDKDFLDNEENEDILEDIVLTLTLFEDREMIEERLKTYAHLFDDKVMKQLKRRRYTGWGRLSRKLINGIRDKQSGKTILDFLKSDGFANRNFMQLIHDDSLTFKEDIQKAQVSGQGDSLHEHIANLAGSPAIKKGILQTVKVVDELVKVMGRHKPENIVIEMARENQTTQKGQKNSRERMKRIEEGIKELGSQILKEHPVENTQLQNEKLYLYYLQNGRDMYVDQELDINRLSDYDVDHIVPQSFLKDDSIDNKVLTRSDKARGKSDNVPSEEVVKKMKNYWRQLLNAKLITQRKFDNLTKAERGGLSELDKAGFIKRQLVETRQITKHVAQILDSRMNTKYDENDKLIREVKVITLKSKLVSDFRKDFQFYKVREINNYHHAHDAYLNAVVGTALIKKYPKLESEFVYGDYKVYDVRKMIAKSEQEIGKATAKYFFYSNIMNFFKTEITLANGEIRKRPLIETNGETGEIVWDKGRDFATVRKVLSMPQVNIVKKTEVQTGGFSKESILPKRNSDKLIARKKDWDPKKYGGFDSPTVAYSVLVVAKVEKGKSKKLKSVKELLGITIMERSSFEKNPIDFLEAKGYKEVKKDLIIKLPKYSLFELENGRKRMLASAGELQKGNELALPSKYVNFLYLASHYEKLKGSPEDNEQKQLFVEQHKHYLDEIIEQISEFSKRVILADANLDKVLSAYNKHRDKPIREQAENIIHLFTLTNLGAPAAFKYFDTTIDRKRYTSTKEVLDATLIHQSITGLYETRIDLSQLGGDGGGGSGSSPAPGGTLNIEDEYRLHETSKEPDVPLGSTWLSDFPQAWAETGGMGLAVRQAPLIIPLKATSTPVSIKQYPMSQEARLGIKPHIQRLLDQGILVPCQSPWNTPLLPVKKPGTNDYRPVQDLREVNKRVEDIHPTVPNPYNLLSGLPPSHQWYTVLDLKDAFFCLRLHPTSQPLFAFEWRDPEMGISGQLTWTRLPQGFKNSPTLFNEALHRDLADFRIQHPDLILLQYVDDLLLAATSEQDCQRGTRALLQTLGNLGYRASAKKAQICQKQVKYLGYLLKEGQRWLTEARKETVMGQPTPKTPRQLREFLGKAGFCRLFIPGFAEMAAPLYPLTKPGTLFNWGPDQQKAYQEIKQALLTAPALGLPDLTKPFELFVDEKQGYAKGVLTQKLGPWRRPVAYLSKKLDPVAAGWPPCLRMVAAIAVLTKDAGKLTMGQPLVILAPHAVEALVKQPPDRWLSNARMTHYQAMLLDTDRVQFGPVVALNPATLLPLPEKEAPHDCLEILAETHGTRPDLTDQPIPDADYTWYTDGSSFLQEGQRRAGAAVTTETEVIWARALPAGTSAQRAELIALTQALKMAEGKKLNVYTDSRYAFATAHVHGEIYRRRGWLTSEGREIKNKNEILALLKALFLPKRLSIIHCPGHQKGNSAEARGNRMADQAAREAAMKAVLETSTLLAGKRTADGSEFEKRTADGSEFESPKKKAKVE

SEQ ID NO: 1064 - protein, 2096 aa, synthetic construct
MPAAKRVKLDGGDKKYSIGLDIGTNSVGWAVITDEYKVPSKKFKVLGNTDRHSIKKNLIGALLFDSGETAEATRLKRTARRRYTRRKNRICYLQEIFSNEMAKVDDSFFHRLEESFLVEEDKKHERHPIFGNIVDEVAYHEKYPTIYHLRKKLVDSTDKADLRLIYLALAHMIKFRGHFLIEGDLNPDNSDVDKLFIQLVQTYNQLFEENPINASGVDAKAILSARLSKSRRLENLIAQLPGEKKNGLFGNLIALSLGLTPNFKSNFDLAEDAKLQLSKDTYDDDLDNLLAQIGDQYADLFLAAKNLSDAILLSDILRVNTEITKAPLSASMIKRYDEHHQDLTLLKALVRQQLPEKYKEIFFDQSKNGYAGYIDGGASQEEFYKFIKPILEKMDGTEELLVKLNREDLLRKQRTFDNGSIPHQIHLGELHAILRRQEDFYPFLKDNREKIEKILTFRIPYYVGPLARGNSRFAWMTRKSEETITPWNFEEVVDKGASAQSFIERMTNFDKNLPNEKVLPKHSLLYEYFTVYNELTKVKYVTEGMRKPAFLSGEQKKAIVDLLFKTNRKVTVKQLKEDYFKKIECFDSVEISGVEDRFNASLGTYHDLLKIIKDKDFLDNEENEDILEDIVLTLTLFEDREMIEERLKTYAHLFDDKVMKQLKRRRYTGWGRLSRKLINGIRDKQSGKTILDFLKSDGFANRNFMQLIHDDSLTFKEDIQKAQVSGQGDSLHEHIANLAGSPAIKKGILQTVKVVDELVKVMGRHKPENIVIEMARENQTTQKGQKNSRERMKRIEEGIKELGSQILKEHPVENTQLQNEKLYLYYLQNGRDMYVDQELDINRLSDYDVDHIVPQSFLKDDSIDNKVLTRSDKARGKSDNVPSEEVVKKMKNYWRQLLNAKLITQRKFDNLTKAERGGLSELDKAGFIKRQLVETRQITKHVAQILDSRMNTKYDENDKLIREVKVITLKSKLVSDFRKDFQFYKVREINNYHHAHDAYLNAVVGTALIKKYPKLESEFVYGDYKVYDVRKMIAKSEQEIGKATAKYFFYSNIMNFFKTEITLANGEIRKRPLIETNGETGEIVWDKGRDFATVRKVLSMPQVNIVKKTEVQTGGFSKESILPKRNSDKLIARKKDWDPKKYGGFDSPTVAYSVLVVAKVEKGKSKKLKSVKELLGITIMERSSFEKNPIDFLEAKGYKEVKKDLIIKLPKYSLFELENGRKRMLASAGELQKGNELALPSKYVNFLYLASHYEKLKGSPEDNEQKQLFVEQHKHYLDEIIEQISEFSKRVILADANLDKVLSAYNKHRDKPIREQAENIIHLFTLTNLGAPAAFKYFDTTIDRKRYTSTKEVLDATLIHQSITGLYETRIDLSQLGGDGGEAAAKPAPGSSGGTLNIEDEYRLHETSKEPDVPLGSTWLSDFPQAWAETGGMGLAVRQAPLIIPLKATSTPVSIKQYPMSQEARLGIKPHIQRLLDQGILVPCQSPWNTPLLPVKKPGTNDYRPVQDLREVNKRVEDIHPTVPNPYNLLSGLPPSHQWYTVLDLKDAFFCLRLHPTSQPLFAFEWRDPEMGISGQLTWTRLPQGFKNSPTLFNEALHRDLADFRIQHPDLILLQYVDDLLLAATSEQDCQRGTRALLQTLGNLGYRASAKKAQICQKQVKYLGYLLKEGQRWLTEARKETVMGQPTPKTPRQLREFLGKAGFCRLFIPGFAEMAAPLYPLTKPGTLFNWGPDQQKAYQEIKQALLTAPALGLPDLTKPFELFVDEKQGYAKGVLTQKLGPWRRPVAYLSKKLDPVAAGWPPCLRMVAAIAVLTKDAGKLTMGQPLVILAPHAVEALVKQPPDRWLSNARMTHYQAMLLDTDRVQFGPVVALNPATLLPLPEKEAPHDCLEILAETHGTRPDLTDQPIPDADYTWYTDGSSFLQEGQRRAGAAVTTETEVIWARALPAGTSAQRAELIALTQALKMAEGKKLNVYTDSRYAFATAHVHGEIYRRRGWLTSEGREIKNKNEILALLKALFLPKRLSIIHCPGHQKGNSAEARGNRMADQAAREAAMKAVLETSTLLAGKRTADGSEFEKRTADGSEFESPKKKAKVE

SEQ ID NO: 1065 - protein, 2094 aa, synthetic construct
MPAAKRVKLDGGDKKYSIGLDIGTNSVGWAVITDEYKVPSKKFKVLGNTDRHSIKKNLIGALLFDSGETAEATRLKRTARRRYTRRKNRICYLQEIFSNEMAKVDDSFFHRLEESFLVEEDKKHERHPIFGNIVDEVAYHEKYPTIYHLRKKLVDSTDKADLRLIYLALAHMIKFRGHFLIEGDLNPDNSDVDKLFIQLVQTYNQLFEENPINASGVDAKAILSARLSKSRRLENLIAQLPGEKKNGLFGNLIALSLGLTPNFKSNFDLAEDAKLQLSKDTYDDDLDNLLAQIGDQYADLFLAAKNLSDAILLSDILRVNTEITKAPLSASMIKRYDEHHQDLTLLKALVRQQLPEKYKEIFFDQSKNGYAGYIDGGASQEEFYKFIKPILEKMDGTEELLVKLNREDLLRKQRTFDNGSIPHQIHLGELHAILRRQEDFYPFLKDNREKIEKILTFRIPYYVGPLARGNSRFAWMTRKSEETITPWNFEEVVDKGASAQSFIERMTNFDKNLPNEKVLPKHSLLYEYFTVYNELTKVKYVTEGMRKPAFLSGEQKKAIVDLLFKTNRKVTVKQLKEDYFKKIECFDSVEISGVEDRFNASLGTYHDLLKIIKDKDFLDNEENEDILEDIVLTLTLFEDREMIEERLKTYAHLFDDKVMKQLKRRRYTGWGRLSRKLINGIRDKQSGKTILDFLKSDGFANRNFMQLIHDDSLTFKEDIQKAQVSGQGDSLHEHIANLAGSPAIKKGILQTVKVVDELVKVMGRHKPENIVIEMARENQTTQKGQKNSRERMKRIEEGIKELGSQILKEHPVENTQLQNEKLYLYYLQNGRDMYVDQELDINRLSDYDVDHIVPQSFLKDDSIDNKVLTRSDKARGKSDNVPSEEVVKKMKNYWRQLLNAKLITQRKFDNLTKAERGGLSELDKAGFIKRQLVETRQITKHVAQILDSRMNTKYDENDKLIREVKVITLKSKLVSDFRKDFQFYKVREINNYHHAHDAYLNAVVGTALIKKYPKLESEFVYGDYKVYDVRKMIAKSEQEIGKATAKYFFYSNIMNFFKTEITLANGEIRKRPLIETNGETGEIVWDKGRDFATVRKVLSMPQVNIVKKTEVQTGGFSKESILPKRNSDKLIARKKDWDPKKYGGFDSPTVAYSVLVVAKVEKGKSKKLKSVKELLGITIMERSSFEKNPIDFLEAKGYKEVKKDLIIKLPKYSLFELENGRKRMLASAGELQKGNELALPSKYVNFLYLASHYEKLKGSPEDNEQKQLFVEQHKHYLDEIIEQISEFSKRVILADANLDKVLSAYNKHRDKPIREQAENIIHLFTLTNLGAPAAFKYFDTTIDRKRYTSTKEVLDATLIHQSITGLYETRIDLSQLGGDGGGGSGGSGGSGGTLNIEDEYRLHETSKEPDVPLGSTWLSDFPQAWAETGGMGLAVRQAPLIIPLKATSTPVSIKQYPMSQEARLGIKPHIQRLLDQGILVPCQSPWNTPLLPVKKPGTNDYRPVQDLREVNKRVEDIHPTVPNPYNLLSGLPPSHQWYTVLDLKDAFFCLRLHPTSQPLFAFEWRDPEMGISGQLTWTRLPQGFKNSPTLFNEALHRDLADFRIQHPDLILLQYVDDLLLAATSEQDCQRGTRALLQTLGNLGYRASAKKAQICQKQVKYLGYLLKEGQRWLTEARKETVMGQPTPKTPRQLREFLGKAGFCRLFIPGFAEMAAPLYPLTKPGTLFNWGPDQQKAYQEIKQALLTAPALGLPDLTKPFELFVDEKQGYAKGVLTQKLGPWRRPVAYLSKKLDPVAAGWPPCLRMVAAIAVLTKDAGKLTMGQPLVILAPHAVEALVKQPPDRWLSNARMTHYQAMLLDTDRVQFGPVVALNPATLLPLPEKEAPHDCLEILAETHGTRPDLTDQPIPDADYTWYTDGSSFLQEGQRRAGAAVTTETEVIWARALPAGTSAQRAELIALTQALKMAEGKKLNVYTDSRYAFATAHVHGEIYRRRGWLTSEGREIKNKNEILALLKALFLPKRLSIIHCPGHQKGNSAEARGNRMADQAAREAAMKAVLETSTLLAGKRTADGSEFEKRTADGSEFESPKKKAKVE

SEQ ID NO: 1066 - protein, 2096 aa, synthetic construct
MPAAKRVKLDGGDKKYSIGLDIGTNSVGWAVITDEYKVPSKKFKVLGNTDRHSIKKNLIGALLFDSGETAEATRLKRTARRRYTRRKNRICYLQEIFSNEMAKVDDSFFHRLEESFLVEEDKKHERHPIFGNIVDEVAYHEKYPTIYHLRKKLVDSTDKADLRLIYLALAHMIKFRGHFLIEGDLNPDNSDVDKLFIQLVQTYNQLFEENPINASGVDAKAILSARLSKSRRLENLIAQLPGEKKNGLFGNLIALSLGLTPNFKSNFDLAEDAKLQLSKDTYDDDLDNLLAQIGDQYADLFLAAKNLSDAILLSDILRVNTEITKAPLSASMIKRYDEHHQDLTLLKALVRQQLPEKYKEIFFDQSKNGYAGYIDGGASQEEFYKFIKPILEKMDGTEELLVKLNREDLLRKQRTFDNGSIPHQIHLGELHAILRRQEDFYPFLKDNREKIEKILTFRIPYYVGPLARGNSRFAWMTRKSEETITPWNFEEVVDKGASAQSFIERMTNFDKNLPNEKVLPKHSLLYEYFTVYNELTKVKYVTEGMRKPAFLSGEQKKAIVDLLFKTNRKVTVKQLKEDYFKKIECFDSVEISGVEDRFNASLGTYHDLLKIIKDKDFLDNEENEDILEDIVLTLTLFEDREMIEERLKTYAHLFDDKVMKQLKRRRYTGWGRLSRKLINGIRDKQSGKTILDFLKSDGFANRNFMQLIHDDSLTFKEDIQKAQVSGQGDSLHEHIANLAGSPAIKKGILQTVKVVDELVKVMGRHKPENIVIEMARENQTTQKGQKNSRERMKRIEEGIKELGSQILKEHPVENTQLQNEKLYLYYLQNGRDMYVDQELDINRLSDYDVDHIVPQSFLKDDSIDNKVLTRSDKARGKSDNVPSEEVVKKMKNYWRQLLNAKLITQRKFDNLTKAERGGLSELDKAGFIKRQLVETRQITKHVAQILDSRMNTKYDENDKLIREVKVITLKSKLVSDFRKDFQFYKVREINNYHHAHDAYLNAVVGTALIKKYPKLESEFVYGDYKVYDVRKMIAKSEQEIGKATAKYFFYSNIMNFFKTEITLANGEIRKRPLIETNGETGEIVWDKGRDFATVRKVLSMPQVNIVKKTEVQTGGFSKESILPKRNSDKLIARKKDWDPKKYGGFDSPTVAYSVLVVAKVEKGKSKKLKSVKELLGITIMERSSFEKNPIDFLEAKGYKEVKKDLIIKLPKYSLFELENGRKRMLASAGELQKGNELALPSKYVNFLYLASHYEKLKGSPEDNEQKQLFVEQHKHYLDEIIEQISEFSKRVILADANLDKVLSAYNKHRDKPIREQAENIIHLFTLTNLGAPAAFKYFDTTIDRKRYTSTKEVLDATLIHQSITGLYETRIDLSQLGGDGGPAPEAAAKGGSGGTLNIEDEYRLHETSKEPDVPLGSTWLSDFPQAWAETGGMGLAVRQAPLIIPLKATSTPVSIKQYPMSQEARLGIKPHIQRLLDQGILVPCQSPWNTPLLPVKKPGTNDYRPVQDLREVNKRVEDIHPTVPNPYNLLSGLPPSHQWYTVLDLKDAFFCLRLHPTSQPLFAFEWRDPEMGISGQLTWTRLPQGFKNSPTLFNEALHRDLADFRIQHPDLILLQYVDDLLLAATSEQDCQRGTRALLQTLGNLGYRASAKKAQICQKQVKYLGYLLKEGQRWLTEARKETVMGQPTPKTPRQLREFLGKAGFCRLFIPGFAEMAAPLYPLTKPGTLFNWGPDQQKAYQEIKQALLTAPALGLPDLTKPFELFVDEKQGYAKGVLTQKLGPWRRPVAYLSKKLDPVAAGWPPCLRMVAAIAVLTKDAGKLTMGQPLVILAPHAVEALVKQPPDRWLSNARMTHYQAMLLDTDRVQFGPVVALNPATLLPLPEKEAPHDCLEILAETHGTRPDLTDQPIPDADYTWYTDGSSFLQEGQRRAGAAVTTETEVIWARALPAGTSAQRAELIALTQALKMAEGKKLNVYTDSRYAFATAHVHGEIYRRRGWLTSEGREIKNKNEILALLKALFLPKRLSIIHCPGHQKGNSAEARGNRMADQAAREAAMKAVLETSTLLAGKRTADGSEFEKRTADGSEFESPKKKAKVE

SEQ ID NO: 1067 - protein, 2103 aa, synthetic construct
MPAAKRVKLDGGDKKYSIGLDIGTNSVGWAVITDEYKVPSKKFKVLGNTDRHSIKKNLIGALLFDSGETAEATRLKRTARRRYTRRKNRICYLQEIFSNEMAKVDDSFFHRLEESFLVEEDKKHERHPIFGNIVDEVAYHEKYPTIYHLRKKLVDSTDKADLRLIYLALAHMIKFRGHFLIEGDLNPDNSDVDKLFIQLVQTYNQLFEENPINASGVDAKAILSARLSKSRRLENLIAQLPGEKKNGLFGNLIALSLGLTPNFKSNFDLAEDAKLQLSKDTYDDDLDNLLAQIGDQYADLFLAAKNLSDAILLSDILRVNTEITKAPLSASMIKRYDEHHQDLTLLKALVRQQLPEKYKEIFFDQSKNGYAGYIDGGASQEEFYKFIKPILEKMDGTEELLVKLNREDLLRKQRTFDNGSIPHQIHLGELHAILRRQEDFYPFLKDNREKIEKILTFRIPYYVGPLARGNSRFAWMTRKSEETITPWNFEEVVDKGASAQSFIERMTNFDKNLPNEKVLPKHSLLYEYFTVYNELTKVKYVTEGMRKPAFLSGEQKKAIVDLLFKTNRKVTVKQLKEDYFKKIECFDSVEISGVEDRFNASLGTYHDLLKIIKDKDFLDNEENEDILEDIVLTLTLFEDREMIEERLKTYAHLFDDKVMKQLKRRRYTGWGRLSRKLINGIRDKQSGKTILDFLKSDGFANRNFMQLIHDDSLTFKEDIQKAQVSGQGDSLHEHIANLAGSPAIKKGILQTVKVVDELVKVMGRHKPENIVIEMARENQTTQKGQKNSRERMKRIEEGIKELGSQILKEHPVENTQLQNEKLYLYYLQNGRDMYVDQELDINRLSDYDVDHIVPQSFLKDDSIDNKVLTRSDKARGKSDNVPSEEVVKKMKNYWRQLLNAKLITQRKFDNLTKAERGGLSELDKAGFIKRQLVETRQITKHVAQILDSRMNTKYDENDKLIREVKVITLKSKLVSDFRKDFQFYKVREINNYHHAHDAYLNAVVGTALIKKYPKLESEFVYGDYKVYDVRKMIAKSEQEIGKATAKYFFYSNIMNFFKTEITLANGEIRKRPLIETNGETGEIVWDKGRDFATVRKVLSMPQVNIVKKTEVQTGGFSKESILPKRNSDKLIARKKDWDPKKYGGFDSPTVAYSVLVVAKVEKGKSKKLKSVKELLGITIMERSSFEKNPIDFLEAKGYKEVKKDLIIKLPKYSLFELENGRKRMLASAGELQKGNELALPSKYVNFLYLASHYEKLKGSPEDNEQKQLFVEQHKHYLDEIIEQISEFSKRVILADANLDKVLSAYNKHRDKPIREQAENIIHLFTLTNLGAPAAFKYFDTTIDRKRYTSTKEVLDATLIHQSITGLYETRIDLSQLGGDGGGSSGSSGSSGSSGSSGSSGGTLNIEDEYRLHETSKEPDVPLGSTWLSDFPQAWAETGGMGLAVRQAPLIIPLKATSTPVSIKQYPMSQEARLGIKPHIQRLLDQGILVPCQSPWNTPLLPVKKPGTNDYRPVQDLREVNKRVEDIHPTVPNPYNLLSGLPPSHQWYTVLDLKDAFFCLRLHPTSQPLFAFEWRDPEMGISGQLTWTRLPQGFKNSPTLFNEALHRDLADFRIQHPDLILLQYVDDLLLAATSEQDCQRGTRALLQTLGNLGYRASAKKAQICQKQVKYLGYLLKEGQRWLTEARKETVMGQPTPKTPRQLREFLGKAGFCRLFIPGFAEMAAPLYPLTKPGTLFNWGPDQQKAYQEIKQALLTAPALGLPDLTKPFELFVDEKQGYAKGVLTQKLGPWRRPVAYLSKKLDPVAAGWPPCLRMVAAIAVLTKDAGKLTMGQPLVILAPHAVEALVKQPPDRWLSNARMTHYQAMLLDTDRVQFGPVVALNPATLLPLPEKEAPHDCLEILAETHGTRPDLTDQPIPDADYTWYTDGSSFLQEGQRRAGAAVTTETEVIWARALPAGTSAQRAELIALTQALKMAEGKKLNVYTDSRYAFATAHVHGEIYRRRGWLTSEGREIKNKNEILALLKALFLPKRLSIIHCPGHQKGNSAEARGNRMADQAAREAAMKAVLETSTLLAGKRTADGSEFEKRTADGSEFESPKKKAKVE

SEQ ID NO: 1068 - protein, 2096 aa, synthetic construct
MPAAKRVKLDGGDKKYSIGLDIGTNSVGWAVITDEYKVPSKKFKVLGNTDRHSIKKNLIGALLFDSGETAEATRLKRTARRRYTRRKNRICYLQEIFSNEMAKVDDSFFHRLEESFLVEEDKKHERHPIFGNIVDEVAYHEKYPTIYHLRKKLVDSTDKADLRLIYLALAHMIKFRGHFLIEGDLNPDNSDVDKLFIQLVQTYNQLFEENPINASGVDAKAILSARLSKSRRLENLIAQLPGEKKNGLFGNLIALSLGLTPNFKSNFDLAEDAKLQLSKDTYDDDLDNLLAQIGDQYADLFLAAKNLSDAILLSDILRVNTEITKAPLSASMIKRYDEHHQDLTLLKALVRQQLPEKYKEIFFDQSKNGYAGYIDGGASQEEFYKFIKPILEKMDGTEELLVKLNREDLLRKQRTFDNGSIPHQIHLGELHAILRRQEDFYPFLKDNREKIEKILTFRIPYYVGPLARGNSRFAWMTRKSEETITPWNFEEVVDKGASAQSFIERMTNFDKNLPNEKVLPKHSLLYEYFTVYNELTKVKYVTEGMRKPAFLSGEQKKAIVDLLFKTNRKVTVKQLKEDYFKKIECFDSVEISGVEDRFNASLGTYHDLLKIIKDKDFLDNEENEDILEDIVLTLTLFEDREMIEERLKTYAHLFDDKVMKQLKRRRYTGWGRLSRKLINGIRDKQSGKTILDFLKSDGFANRNFMQLIHDDSLTFKEDIQKAQVSGQGDSLHEHIANLAGSPAIKKGILQTVKVVDELVKVMGRHKPENIVIEMARENQTTQKGQKNSRERMKRIEEGIKELGSQILKEHPVENTQLQNEKLYLYYLQNGRDMYVDQELDINRLSDYDVDHIVPQSFLKDDSIDNKVLTRSDKARGKSDNVPSEEVVKKMKNYWRQLLNAKLITQRKFDNLTKAERGGLSELDKAGFIKRQLVETRQITKHVAQILDSRMNTKYDENDKLIREVKVITLKSKLVSDFRKDFQFYKVREINNYHHAHDAYLNAVVGTALIKKYPKLESEFVYGDYKVYDVRKMIAKSEQEIGKATAKYFFYSNIMNFFKTEITLANGEIRKRPLIETNGETGEIVWDKGRDFATVRKVLSMPQVNIVKKTEVQTGGFSKESILPKRNSDKLIARKKDWDPKKYGGFDSPTVAYSVLVVAKVEKGKSKKLKSVKELLGITIMERSSFEKNPIDFLEAKGYKEVKKDLIIKLPKYSLFELENGRKRMLASAGELQKGNELALPSKYVNFLYLASHYEKLKGSPEDNEQKQLFVEQHKHYLDEIIEQISEFSKRVILADANLDKVLSAYNKHRDKPIREQAENIIHLFTLTNLGAPAAFKYFDTTIDRKRYTSTKEVLDATLIHQSITGLYETRIDLSQLGGDGGEAAAKGSSGGSGGTLNIEDEYRLHETSKEPDVPLGSTWLSDFPQAWAETGGMGLAVRQAPLIIPLKATSTPVSIKQYPMSQEARLGIKPHIQRLLDQGILVPCQSPWNTPLLPVKKPGTNDYRPVQDLREVNKRVEDIHPTVPNPYNLLSGLPPSHQWYTVLDLKDAFFCLRLHPTSQPLFAFEWRDPEMGISGQLTWTRLPQGFKNSPTLFNEALHRDLADFRIQHPDLILLQYVDDLLLAATSEQDCQRGTRALLQTLGNLGYRASAKKAQICQKQVKYLGYLLKEGQRWLTEARKETVMGQPTPKTPRQLREFLGKAGFCRLFIPGFAEMAAPLYPLTKPGTLFNWGPDQQKAYQEIKQALLTAPALGLPDLTKPFELFVDEKQGYAKGVLTQKLGPWRRPVAYLSKKLDPVAAGWPPCLRMVAAIAVLTKDAGKLTMGQPLVILAPHAVEALVKQPPDRWLSNARMTHYQAMLLDTDRVQFGPVVALNPATLLPLPEKEAPHDCLEILAETHGTRPDLTDQPIPDADYTWYTDGSSFLQEGQRRAGAAVTTETEVIWARALPAGTSAQRAELIALTQALKMAEGKKLNVYTDSRYAFATAHVHGEIYRRRGWLTSEGREIKNKNEILALLKALFLPKRLSIIHCPGHQKGNSAEARGNRMADQAAREAAMKAVLETSTLLAGKRTADGSEFEKRTADGSEFESPKKKAKVE

SEQ ID NO: 1069 - protein, 2096 aa, synthetic construct
MPAAKRVKLDGGDKKYSIGLDIGTNSVGWAVITDEYKVPSKKFKVLGNTDRHSIKKNLIGALLFDSGETAEATRLKRTARRRYTRRKNRICYLQEIFSNEMAKVDDSFFHRLEESFLVEEDKKHERHPIFGNIVDEVAYHEKYPTIYHLRKKLVDSTDKADLRLIYLALAHMIKFRGHFLIEGDLNPDNSDVDKLFIQLVQTYNQLFEENPINASGVDAKAILSARLSKSRRLENLIAQLPGEKKNGLFGNLIALSLGLTPNFKSNFDLAEDAKLQLSKDTYDDDLDNLLAQIGDQYADLFLAAKNLSDAILLSDILRVNTEITKAPLSASMIKRYDEHHQDLTLLKALVRQQLPEKYKEIFFDQSKNGYAGYIDGGASQEEFYKFIKPILEKMDGTEELLVKLNREDLLRKQRTFDNGSIPHQIHLGELHAILRRQEDFYPFLKDNREKIEKILTFRIPYYVGPLARGNSRFAWMTRKSEETITPWNFEEVVDKGASAQSFIERMTNFDKNLPNEKVLPKHSLLYEYFTVYNELTKVKYVTEGMRKPAFLSGEQKKAIVDLLFKTNRKVTVKQLKEDYFKKIECFDSVEISGVEDRFNASLGTYHDLLKIIKDKDFLDNEENEDILEDIVLTLTLFEDREMIEERLKTYAHLFDDKVMKQLKRRRYTGWGRLSRKLINGIRDKQSGKTILDFLKSDGFANRNFMQLIHDDSLTFKEDIQKAQVSGQGDSLHEHIANLAGSPAIKKGILQTVKVVDELVKVMGRHKPENIVIEMARENQTTQKGQKNSRERMKRIEEGIKELGSQILKEHPVENTQLQNEKLYLYYLQNGRDMYVDQELDINRLSDYDVDHIVPQSFLKDDSIDNKVLTRSDKARGKSDNVPSEEVVKKMKNYWRQLLNAKLITQRKFDNLTKAERGGLSELDKAGFIKRQLVETRQITKHVAQILDSRMNTKYDENDKLIREVKVITLKSKLVSDFRKDFQFYKVREINNYHHAHDAYLNAVVGTALIKKYPKLESEFVYGDYKVYDVRKMIAKSEQEIGKATAKYFFYSNIMNFFKTEITLANGEIRKRPLIETNGETGEIVWDKGRDFATVRKVLSMPQVNIVKKTEVQTGGFSKESILPKRNSDKLIARKKDWDPKKYGGFDSPTVAYSVLVVAKVEKGKSKKLKSVKELLGITIMERSSFEKNPIDFLEAKGYKEVKKDLIIKLPKYSLFELENGRKRMLASAGELQKGNELALPSKYVNFLYLASHYEKLKGSPEDNEQKQLFVEQHKHYLDEIIEQISEFSKRVILADANLDKVLSAYNKHRDKPIREQAENIIHLFTLTNLGAPAAFKYFDTTIDRKRYTSTKEVLDATLIHQSITGLYETRIDLSQLGGDGGPAPAPAPAPAPGGTLNIEDEYRLHETSKEPDVPLGSTWLSDFPQAWAETGGMGLAVRQAPLIIPLKATSTPVSIKQYPMSQEARLGIKPHIQRLLDQGILVPCQSPWNTPLLPVKKPGTNDYRPVQDLREVNKRVEDIHPTVPNPYNLLSGLPPSHQWYTVLDLKDAFFCLRLHPTSQPLFAFEWRDPEMGISGQLTWTRLPQGFKNSPTLFNEALHRDLADFRIQHPDLILLQYVDDLLLAATSEQDCQRGTRALLQTLGNLGYRASAKKAQICQKQVKYLGYLLKEGQRWLTEARKETVMGQPTPKTPRQLREFLGKAGFCRLFIPGFAEMAAPLYPLTKPGTLFNWGPDQQKAYQEIKQALLTAPALGLPDLTKPFELFVDEKQGYAKGVLTQKLGPWRRPVAYLSKKLDPVAAGWPPCLRMVAAIAVLTKDAGKLTMGQPLVILAPHAVEALVKQPPDRWLSNARMTHYQAMLLDTDRVQFGPVVALNPATLLPLPEKEAPHDCLEILAETHGTRPDLTDQPIPDADYTWYTDGSSFLQEGQRRAGAAVTTETEVIWARALPAGTSAQRAELIALTQALKMAEGKKLNVYTDSRYAFATAHVHGEIYRRRGWLTSEGREIKNKNEILALLKALFLPKRLSIIHCPGHQKGNSAEARGNRMADQAAREAAMKAVLETSTLLAGKRTADGSEFEKRTADGSEFESPKKKAKVE

SEQ ID NO: 1070 - protein, 2091 aa, synthetic construct
MPAAKRVKLDGGDKKYSIGLDIGTNSVGWAVITDEYKVPSKKFKVLGNTDRHSIKKNLIGALLFDSGETAEATRLKRTARRRYTRRKNRICYLQEIFSNEMAKVDDSFFHRLEESFLVEEDKKHERHPIFGNIVDEVAYHEKYPTIYHLRKKLVDSTDKADLRLIYLALAHMIKFRGHFLIEGDLNPDNSDVDKLFIQLVQTYNQLFEENPINASGVDAKAILSARLSKSRRLENLIAQLPGEKKNGLFGNLIALSLGLTPNFKSNFDLAEDAKLQLSKDTYDDDLDNLLAQIGDQYADLFLAAKNLSDAILLSDILRVNTEITKAPLSASMIKRYDEHHQDLTLLKALVRQQLPEKYKEIFFDQSKNGYAGYIDGGASQEEFYKFIKPILEKMDGTEELLVKLNREDLLRKQRTFDNGSIPHQIHLGELHAILRRQEDFYPFLKDNREKIEKILTFRIPYYVGPLARGNSRFAWMTRKSEETITPWNFEEVVDKGASAQSFIERMTNFDKNLPNEKVLPKHSLLYEYFTVYNELTKVKYVTEGMRKPAFLSGEQKKAIVDLLFKTNRKVTVKQLKEDYFKKIECFDSVEISGVEDRFNASLGTYHDLLKIIKDKDFLDNEENEDILEDIVLTLTLFEDREMIEERLKTYAHLFDDKVMKQLKRRRYTGWGRLSRKLINGIRDKQSGKTILDFLKSDGFANRNFMQLIHDDSLTFKEDIQKAQVSGQGDSLHEHIANLAGSPAIKKGILQTVKVVDELVKVMGRHKPENIVIEMARENQTTQKGQKNSRERMKRIEEGIKELGSQILKEHPVENTQLQNEKLYLYYLQNGRDMYVDQELDINRLSDYDVDHIVPQSFLKDDSIDNKVLTRSDKARGKSDNVPSEEVVKKMKNYWRQLLNAKLITQRKFDNLTKAERGGLSELDKAGFIKRQLVETRQITKHVAQILDSRMNTKYDENDKLIREVKVITLKSKLVSDFRKDFQFYKVREINNYHHAHDAYLNAVVGTALIKKYPKLESEFVYGDYKVYDVRKMIAKSEQEIGKATAKYFFYSNIMNFFKTEITLANGEIRKRPLIETNGETGEIVWDKGRDFATVRKVLSMPQVNIVKKTEVQTGGFSKESILPKRNSDKLIARKKDWDPKKYGGFDSPTVAYSVLVVAKVEKGKSKKLKSVKELLGITIMERSSFEKNPIDFLEAKGYKEVKKDLIIKLPKYSLFELENGRKRMLASAGELQKGNELALPSKYVNFLYLASHYEKLKGSPEDNEQKQLFVEQHKHYLDEIIEQISEFSKRVILADANLDKVLSAYNKHRDKPIREQAENIIHLFTLTNLGAPAAFKYFDTTIDRKRYTSTKEVLDATLIHQSITGLYETRIDLSQLGGDGGGSSGGGGGTLNIEDEYRLHETSKEPDVPLGSTWLSDFPQAWAETGGMGLAVRQAPLIIPLKATSTPVSIKQYPMSQEARLGIKPHIQRLLDQGILVPCQSPWNTPLLPVKKPGTNDYRPVQDLREVNKRVEDIHPTVPNPYNLLSGLPPSHQWYTVLDLKDAFFCLRLHPTSQPLFAFEWRDPEMGISGQLTWTRLPQGFKNSPTLFNEALHRDLADFRIQHPDLILLQYVDDLLLAATSEQDCQRGTRALLQTLGNLGYRASAKKAQICQKQVKYLGYLLKEGQRWLTEARKETVMGQPTPKTPRQLREFLGKAGFCRLFIPGFAEMAAPLYPLTKPGTLFNWGPDQQKAYQEIKQALLTAPALGLPDLTKPFELFVDEKQGYAKGVLTQKLGPWRRPVAYLSKKLDPVAAGWPPCLRMVAAIAVLTKDAGKLTMGQPLVILAPHAVEALVKQPPDRWLSNARMTHYQAMLLDTDRVQFGPVVALNPATLLPLPEKEAPHDCLEILAETHGTRPDLTDQPIPDADYTWYTDGSSFLQEGQRRAGAAVTTETEVIWARALPAGTSAQRAELIALTQALKMAEGKKLNVYTDSRYAFATAHVHGEIYRRRGWLTSEGREIKNKNEILALLKALFLPKRLSIIHCPGHQKGNSAEARGNRMADQAAREAAMKAVLETSTLLAGKRTADGSEFEKRTADGSEFESPKKKAKVE

SEQ ID NO: 1071 - protein, 2094 aa, synthetic construct
MPAAKRVKLDGGDKKYSIGLDIGTNSVGWAVITDEYKVPSKKFKVLGNTDRHSIKKNLIGALLFDSGETAEATRLKRTARRRYTRRKNRICYLQEIFSNEMAKVDDSFFHRLEESFLVEEDKKHERHPIFGNIVDEVAYHEKYPTIYHLRKKLVDSTDKADLRLIYLALAHMIKFRGHFLIEGDLNPDNSDVDKLFIQLVQTYNQLFEENPINASGVDAKAILSARLSKSRRLENLIAQLPGEKKNGLFGNLIALSLGLTPNFKSNFDLAEDAKLQLSKDTYDDDLDNLLAQIGDQYADLFLAAKNLSDAILLSDILRVNTEITKAPLSASMIKRYDEHHQDLTLLKALVRQQLPEKYKEIFFDQSKNGYAGYIDGGASQEEFYKFIKPILEKMDGTEELLVKLNREDLLRKQRTFDNGSIPHQIHLGELHAILRRQEDFYPFLKDNREKIEKILTFRIPYYVGPLARGNSRFAWMTRKSEETITPWNFEEVVDKGASAQSFIERMTNFDKNLPNEKVLPKHSLLYEYFTVYNELTKVKYVTEGMRKPAFLSGEQKKAIVDLLFKTNRKVTVKQLKEDYFKKIECFDSVEISGVEDRFNASLGTYHDLLKIIKDKDFLDNEENEDILEDIVLTLTLFEDREMIEERLKTYAHLFDDKVMKQLKRRRYTGWGRLSRKLINGIRDKQSGKTILDFLKSDGFANRNFMQLIHDDSLTFKEDIQKAQVSGQGDSLHEHIANLAGSPAIKKGILQTVKVVDELVKVMGRHKPENIVIEMARENQTTQKGQKNSRERMKRIEEGIKELGSQILKEHPVENTQLQNEKLYLYYLQNGRDMYVDQELDINRLSDYDVDHIVPQSFLKDDSIDNKVLTRSDKARGKSDNVPSEEVVKKMKNYWRQLLNAKLITQRKFDNLTKAERGGLSELDKAGFIKRQLVETRQITKHVAQILDSRMNTKYDENDKLIREVKVITLKSKLVSDFRKDFQFYKVREINNYHHAHDAYLNAVVGTALIKKYPKLESEFVYGDYKVYDVRKMIAKSEQEIGKATAKYFFYSNIMNFFKTEITLANGEIRKRPLIETNGETGEIVWDKGRDFATVRKVLSMPQVNIVKKTEVQTGGFSKESILPKRNSDKLIARKKDWDPKKYGGFDSPTVAYSVLVVAKVEKGKSKKLKSVKELLGITIMERSSFEKNPIDFLEAKGYKEVKKDLIIKLPKYSLFELENGRKRMLASAGELQKGNELALPSKYVNFLYLASHYEKLKGSPEDNEQKQLFVEQHKHYLDEIIEQISEFSKRVILADANLDKVLSAYNKHRDKPIREQAENIIHLFTLTNLGAPAAFKYFDTTIDRKRYTSTKEVLDATLIHQSITGLYETRIDLSQLGGDGGPAPGGSGGGGGTLNIEDEYRLHETSKEPDVPLGSTWLSDFPQAWAETGGMGLAVRQAPLIIPLKATSTPVSIKQYPMSQEARLGIKPHIQRLLDQGILVPCQSPWNTPLLPVKKPGTNDYRPVQDLREVNKRVEDIHPTVPNPYNLLSGLPPSHQWYTVLDLKDAFFCLRLHPTSQPLFAFEWRDPEMGISGQLTWTRLPQGFKNSPTLFNEALHRDLADFRIQHPDLILLQYVDDLLLAATSEQDCQRGTRALLQTLGNLGYRASAKKAQICQKQVKYLGYLLKEGQRWLTEARKETVMGQPTPKTPRQLREFLGKAGFCRLFIPGFAEMAAPLYPLTKPGTLFNWGPDQQKAYQEIKQALLTAPALGLPDLTKPFELFVDEKQGYAKGVLTQKLGPWRRPVAYLSKKLDPVAAGWPPCLRMVAAIAVLTKDAGKLTMGQPLVILAPHAVEALVKQPPDRWLSNARMTHYQAMLLDTDRVQFGPVVALNPATLLPLPEKEAPHDCLEILAETHGTRPDLTDQPIPDADYTWYTDGSSFLQEGQRRAGAAVTTETEVIWARALPAGTSAQRAELIALTQALKMAEGKKLNVYTDSRYAFATAHVHGEIYRRRGWLTSEGREIKNKNEILALLKALFLPKRLSIIHCPGHQKGNSAEARGNRMADQAAREAAMKAVLETSTLLAGKRTADGSEFEKRTADGSEFESPKKKAKVE

SEQ ID NO: 1072 - protein, 2097 aa, synthetic construct
MPAAKRVKLDGGDKKYSIGLDIGTNSVGWAVITDEYKVPSKKFKVLGNTDRHSIKKNLIGALLFDSGETAEATRLKRTARRRYTRRKNRICYLQEIFSNEMAKVDDSFFHRLEESFLVEEDKKHERHPIFGNIVDEVAYHEKYPTIYHLRKKLVDSTDKADLRLIYLALAHMIKFRGHFLIEGDLNPDNSDVDKLFIQLVQTYNQLFEENPINASGVDAKAILSARLSKSRRLENLIAQLPGEKKNGLFGNLIALSLGLTPNFKSNFDLAEDAKLQLSKDTYDDDLDNLLAQIGDQYADLFLAAKNLSDAILLSDILRVNTEITKAPLSASMIKRYDEHHQDLTLLKALVRQQLPEKYKEIFFDQSKNGYAGYIDGGASQEEFYKFIKPILEKMDGTEELLVKLNREDLLRKQRTFDNGSIPHQIHLGELHAILRRQEDFYPFLKDNREKIEKILTFRIPYYVGPLARGNSRFAWMTRKSEETITPWNFEEVVDKGASAQSFIERMTNFDKNLPNEKVLPKHSLLYEYFTVYNELTKVKYVTEGMRKPAFLSGEQKKAIVDLLFKTNRKVTVKQLKEDYFKKIECFDSVEISGVEDRFNASLGTYHDLLKIIKDKDFLDNEENEDILEDIVLTLTLFEDREMIEERLKTYAHLFDDKVMKQLKRRRYTGWGRLSRKLINGIRDKQSGKTILDFLKSDGFANRNFMQLIHDDSLTFKEDIQKAQVSGQGDSLHEHIANLAGSPAIKKGILQTVKVVDELVKVMGRHKPENIVIEMARENQTTQKGQKNSRERMKRIEEGIKELGSQILKEHPVENTQLQNEKLYLYYLQNGRDMYVDQELDINRLSDYDVDHIVPQSFLKDDSIDNKVLTRSDKARGKSDNVPSEEVVKKMKNYWRQLLNAKLITQRKFDNLTKAERGGLSELDKAGFIKRQLVETRQITKHVAQILDSRMNTKYDENDKLIREVKVITLKSKLVSDFRKDFQFYKVREINNYHHAHDAYLNAVVGTALIKKYPKLESEFVYGDYKVYDVRKMIAKSEQEIGKATAKYFFYSNIMNFFKTEITLANGEIRKRPLIETNGETGEIVWDKGRDFATVRKVLSMPQVNIVKKTEVQTGGFSKESILPKRNSDKLIARKKDWDPKKYGGFDSPTVAYSVLVVAKVEKGKSKKLKSVKELLGITIMERSSFEKNPIDFLEAKGYKEVKKDLIIKLPKYSLFELENGRKRMLASAGELQKGNELALPSKYVNFLYLASHYEKLKGSPEDNEQKQLFVEQHKHYLDEIIEQISEFSKRVILADANLDKVLSAYNKHRDKPIREQAENIIHLFTLTNLGAPAAFKYFDTTIDRKRYTSTKEVLDATLIHQSITGLYETRIDLSQLGGDGGGSAGSAAGSGEFGGTLNIEDEYRLHETSKEPDVPLGSTWLSDFPQAWAETGGMGLAVRQAPLIIPLKATSTPVSIKQYPMSQEARLGIKPHIQRLLDQGILVPCQSPWNTPLLPVKKPGTNDYRPVQDLREVNKRVEDIHPTVPNPYNLLSGLPPSHQWYTVLDLKDAFFCLRLHPTSQPLFAFEWRDPEMGISGQLTWTRLPQGFKNSPTLFNEALHRDLADFRIQHPDLILLQYVDDLLLAATSEQDCQRGTRALLQTLGNLGYRASAKKAQICQKQVKYLGYLLKEGQRWLTEARKETVMGQPTPKTPRQLREFLGKAGFCRLFIPGFAEMAAPLYPLTKPGTLFNWGPDQQKAYQEIKQALLTAPALGLPDLTKPFELFVDEKQGYAKGVLTQKLGPWRRPVAYLSKKLDPVAAGWPPCLRMVAAIAVLTKDAGKLTMGQPLVILAPHAVEALVKQPPDRWLSNARMTHYQAMLLDTDRVQFGPVVALNPATLLPLPEKEAPHDCLEILAETHGTRPDLTDQPIPDADYTWYTDGSSFLQEGQRRAGAAVTTETEVIWARALPAGTSAQRAELIALTQALKMAEGKKLNVYTDSRYAFATAHVHGEIYRRRGWLTSEGREIKNKNEILALLKALFLPKRLSIIHCPGHQKGNSAEARGNRMADQAAREAAMKAVLETSTLLAGKRTADGSEFEKRTADGSEFESPKKKAKVE

SEQ ID NO: 1073 - protein, 2094 aa, synthetic construct
MPAAKRVKLDGGDKKYSIGLDIGTNSVGWAVITDEYKVPSKKFKVLGNTDRHSIKKNLIGALLFDSGETAEATRLKRTARRRYTRRKNRICYLQEIFSNEMAKVDDSFFHRLEESFLVEEDKKHERHPIFGNIVDEVAYHEKYPTIYHLRKKLVDSTDKADLRLIYLALAHMIKFRGHFLIEGDLNPDNSDVDKLFIQLVQTYNQLFEENPINASGVDAKAILSARLSKSRRLENLIAQLPGEKKNGLFGNLIALSLGLTPNFKSNFDLAEDAKLQLSKDTYDDDLDNLLAQIGDQYADLFLAAKNLSDAILLSDILRVNTEITKAPLSASMIKRYDEHHQDLTLLKALVRQQLPEKYKEIFFDQSKNGYAGYIDGGASQEEFYKFIKPILEKMDGTEELLVKLNREDLLRKQRTFDNGSIPHQIHLGELHAILRRQEDFYPFLKDNREKIEKILTFRIPYYVGPLARGNSRFAWMTRKSEETITPWNFEEVVDKGASAQSFIERMTNFDKNLPNEKVLPKHSLLYEYFTVYNELTKVKYVTEGMRKPAFLSGEQKKAIVDLLFKTNRKVTVKQLKEDYFKKIECFDSVEISGVEDRFNASLGTYHDLLKIIKDKDFLDNEENEDILEDIVLTLTLFEDREMIEERLKTYAHLFDDKVMKQLKRRRYTGWGRLSRKLINGIRDKQSGKTILDFLKSDGFANRNFMQLIHDDSLTFKEDIQKAQVSGQGDSLHEHIANLAGSPAIKKGILQTVKVVDELVKVMGRHKPENIVIEMARENQTTQKGQKNSRERMKRIEEGIKELGSQILKEHPVENTQLQNEKLYLYYLQNGRDMYVDQELDINRLSDYDVDHIVPQSFLKDDSIDNKVLTRSDKARGKSDNVPSEEVVKKMKNYWRQLLNAKLITQRKFDNLTKAERGGLSELDKAGFIKRQLVETRQITKHVAQILDSRMNTKYDENDKLIREVKVITLKSKLVSDFRKDFQFYKVREINNYHHAHDAYLNAVVGTALIKKYPKLESEFVYGDYKVYDVRKMIAKSEQEIGKATAKYFFYSNIMNFFKTEITLANGEIRKRPLIETNGETGEIVWDKGRDFATVRKVLSMPQVNIVKKTEVQTGGFSKESILPKRNSDKLIARKKDWDPKKYGGFDSPTVAYSVLVVAKVEKGKSKKLKSVKELLGITIMERSSFEKNPIDFLEAKGYKEVKKDLIIKLPKYSLFELENGRKRMLASAGELQKGNELALPSKYVNFLYLASHYEKLKGSPEDNEQKQLFVEQHKHYLDEIIEQISEFSKRVILADANLDKVLSAYNKHRDKPIREQAENIIHLFTLTNLGAPAAFKYFDTTIDRKRYTSTKEVLDATLIHQSITGLYETRIDLSQLGGDGGGGGGSSPAPGGTLNIEDEYRLHETSKEPDVPLGSTWLSDFPQAWAETGGMGLAVRQAPLIIPLKATSTPVSIKQYPMSQEARLGIKPHIQRLLDQGILVPCQSPWNTPLLPVKKPGTNDYRPVQDLREVNKRVEDIHPTVPNPYNLLSGLPPSHQWYTVLDLKDAFFCLRLHPTSQPLFAFEWRDPEMGISGQLTWTRLPQGFKNSPTLFNEALHRDLADFRIQHPDLILLQYVDDLLLAATSEQDCQRGTRALLQTLGNLGYRASAKKAQICQKQVKYLGYLLKEGQRWLTEARKETVMGQPTPKTPRQLREFLGKAGFCRLFIPGFAEMAAPLYPLTKPGTLFNWGPDQQKAYQEIKQALLTAPALGLPDLTKPFELFVDEKQGYAKGVLTQKLGPWRRPVAYLSKKLDPVAAGWPPCLRMVAAIAVLTKDAGKLTMGQPLVILAPHAVEALVKQPPDRWLSNARMTHYQAMLLDTDRVQFGPVVALNPATLLPLPEKEAPHDCLEILAETHGTRPDLTDQPIPDADYTWYTDGSSFLQEGQRRAGAAVTTETEVIWARALPAGTSAQRAELIALTQALKMAEGKKLNVYTDSRYAFATAHVHGEIYRRRGWLTSEGREIKNKNEILALLKALFLPKRLSIIHCPGHQKGNSAEARGNRMADQAAREAAMKAVLETSTLLAGKRTADGSEFEKRTADGSEFESPKKKAKVE

SEQ ID NO: 1074 - protein, 2095 aa, synthetic construct
MPAAKRVKLDGGDKKYSIGLDIGTNSVGWAVITDEYKVPSKKFKVLGNTDRHSIKKNLIGALLFDSGETAEATRLKRTARRRYTRRKNRICYLQEIFSNEMAKVDDSFFHRLEESFLVEEDKKHERHPIFGNIVDEVAYHEKYPTIYHLRKKLVDSTDKADLRLIYLALAHMIKFRGHFLIEGDLNPDNSDVDKLFIQLVQTYNQLFEENPINASGVDAKAILSARLSKSRRLENLIAQLPGEKKNGLFGNLIALSLGLTPNFKSNFDLAEDAKLQLSKDTYDDDLDNLLAQIGDQYADLFLAAKNLSDAILLSDILRVNTEITKAPLSASMIKRYDEHHQDLTLLKALVRQQLPEKYKEIFFDQSKNGYAGYIDGGASQEEFYKFIKPILEKMDGTEELLVKLNREDLLRKQRTFDNGSIPHQIHLGELHAILRRQEDFYPFLKDNREKIEKILTFRIPYYVGPLARGNSRFAWMTRKSEETITPWNFEEVVDKGASAQSFIERMTNFDKNLPNEKVLPKHSLLYEYFTVYNELTKVKYVTEGMRKPAFLSGEQKKAIVDLLFKTNRKVTVKQLKEDYFKKIECFDSVEISGVEDRFNASLGTYHDLLKIIKDKDFLDNEENEDILEDIVLTLTLFEDREMIEERLKTYAHLFDDKVMKQLKRRRYTGWGRLSRKLINGIRDKQSGKTILDFLKSDGFANRNFMQLIHDDSLTFKEDIQKAQVSGQGDSLHEHIANLAGSPAIKKGILQTVKVVDELVKVMGRHKPENIVIEMARENQTTQKGQKNSRERMKRIEEGIKELGSQILKEHPVENTQLQNEKLYLYYLQNGRDMYVDQELDINRLSDYDVDHIVPQSFLKDDSIDNKVLTRSDKARGKSDNVPSEEVVKKMKNYWRQLLNAKLITQRKFDNLTKAERGGLSELDKAGFIKRQLVETRQITKHVAQILDSRMNTKYDENDKLIREVKVITLKSKLVSDFRKDFQFYKVREINNYHHAHDAYLNAVVGTALIKKYPKLESEFVYGDYKVYDVRKMIAKSEQEIGKATAKYFFYSNIMNFFKTEITLANGEIRKRPLIETNGETGEIVWDKGRDFATVRKVLSMPQVNIVKKTEVQTGGFSKESILPKRNSDKLIARKKDWDPKKYGGFDSPTVAYSVLVVAKVEKGKSKKLKSVKELLGITIMERSSFEKNPIDFLEAKGYKEVKKDLIIKLPKYSLFELENGRKRMLASAGELQKGNELALPSKYVNFLYLASHYEKLKGSPEDNEQKQLFVEQHKHYLDEIIEQISEFSKRVILADANLDKVLSAYNKHRDKPIREQAENIIHLFTLTNLGAPAAFKYFDTTIDRKRYTSTKEVLDATLIHQSITGLYETRIDLSQLGGDGGGGGGSGGGGSGGTLNIEDEYRLHETSKEPDVPLGSTWLSDFPQAWAETGGMGLAVRQAPLIIPLKATSTPVSIKQYPMSQEARLGIKPHIQRLLDQGILVPCQSPWNTPLLPVKKPGTNDYRPVQDLREVNKRVEDIHPTVPNPYNLLSGLPPSHQWYTVLDLKDAFFCLRLHPTSQPLFAFEWRDPEMGISGQLTWTRLPQGFKNSPTLFNEALHRDLADFRIQHPDLILLQYVDDLLLAATSEQDCQRGTRALLQTLGNLGYRASAKKAQICQKQVKYLGYLLKEGQRWLTEARKETVMGQPTPKTPRQLREFLGKAGFCRLFIPGFAEMAAPLYPLTKPGTLFNWGPDQQKAYQEIKQALLTAPALGLPDLTKPFELFVDEKQGYAKGVLTQKLGPWRRPVAYLSKKLDPVAAGWPPCLRMVAAIAVLTKDAGKLTMGQPLVILAPHAVEALVKQPPDRWLSNARMTHYQAMLLDTDRVQFGPVVALNPATLLPLPEKEAPHDCLEILAETHGTRPDLTDQPIPDADYTWYTDGSSFLQEGQRRAGAAVTTETEVIWARALPAGTSAQRAELIALTQALKMAEGKKLNVYTDSRYAFATAHVHGEIYRRRGWLTSEGREIKNKNEILALLKALFLPKRLSIIHCPGHQKGNSAEARGNRMADQAAREAAMKAVLETSTLLAGKRTADGSEFEKRTADGSEFESPKKKAKVE

SEQ ID NO: 1075 - protein, 2096 aa, synthetic construct
MPAAKRVKLDGGDKKYSIGLDIGTNSVGWAVITDEYKVPSKKFKVLGNTDRHSIKKNLIGALLFDSGETAEATRLKRTARRRYTRRKNRICYLQEIFSNEMAKVDDSFFHRLEESFLVEEDKKHERHPIFGNIVDEVAYHEKYPTIYHLRKKLVDSTDKADLRLIYLALAHMIKFRGHFLIEGDLNPDNSDVDKLFIQLVQTYNQLFEENPINASGVDAKAILSARLSKSRRLENLIAQLPGEKKNGLFGNLIALSLGLTPNFKSNFDLAEDAKLQLSKDTYDDDLDNLLAQIGDQYADLFLAAKNLSDAILLSDILRVNTEITKAPLSASMIKRYDEHHQDLTLLKALVRQQLPEKYKEIFFDQSKNGYAGYIDGGASQEEFYKFIKPILEKMDGTEELLVKLNREDLLRKQRTFDNGSIPHQIHLGELHAILRRQEDFYPFLKDNREKIEKILTFRIPYYVGPLARGNSRFAWMTRKSEETITPWNFEEVVDKGASAQSFIERMTNFDKNLPNEKVLPKHSLLYEYFTVYNELTKVKYVTEGMRKPAFLSGEQKKAIVDLLFKTNRKVTVKQLKEDYFKKIECFDSVEISGVEDRFNASLGTYHDLLKIIKDKDFLDNEENEDILEDIVLTLTLFEDREMIEERLKTYAHLFDDKVMKQLKRRRYTGWGRLSRKLINGIRDKQSGKTILDFLKSDGFANRNFMQLIHDDSLTFKEDIQKAQVSGQGDSLHEHIANLAGSPAIKKGILQTVKVVDELVKVMGRHKPENIVIEMARENQTTQKGQKNSRERMKRIEEGIKELGSQILKEHPVENTQLQNEKLYLYYLQNGRDMYVDQELDINRLSDYDVDHIVPQSFLKDDSIDNKVLTRSDKARGKSDNVPSEEVVKKMKNYWRQLLNAKLITQRKFDNLTKAERGGLSELDKAGFIKRQLVETRQITKHVAQILDSRMNTKYDENDKLIREVKVITLKSKLVSDFRKDFQFYKVREINNYHHAHDAYLNAVVGTALIKKYPKLESEFVYGDYKVYDVRKMIAKSEQEIGKATAKYFFYSNIMNFFKTEITLANGEIRKRPLIETNGETGEIVWDKGRDFATVRKVLSMPQVNIVKKTEVQTGGFSKESILPKRNSDKLIARKKDWDPKKYGGFDSPTVAYSVLVVAKVEKGKSKKLKSVKELLGITIMERSSFEKNPIDFLEAKGYKEVKKDLIIKLPKYSLFELENGRKRMLASAGELQKGNELALPSKYVNFLYLASHYEKLKGSPEDNEQKQLFVEQHKHYLDEIIEQISEFSKRVILADANLDKVLSAYNKHRDKPIREQAENIIHLFTLTNLGAPAAFKYFDTTIDRKRYTSTKEVLDATLIHQSITGLYETRIDLSQLGGDGGGSSEAAAKGGSGGTLNIEDEYRLHETSKEPDVPLGSTWLSDFPQAWAETGGMGLAVRQAPLIIPLKATSTPVSIKQYPMSQEARLGIKPHIQRLLDQGILVPCQSPWNTPLLPVKKPGTNDYRPVQDLREVNKRVEDIHPTVPNPYNLLSGLPPSHQWYTVLDLKDAFFCLRLHPTSQPLFAFEWRDPEMGISGQLTWTRLPQGFKNSPTLFNEALHRDLADFRIQHPDLILLQYVDDLLLAATSEQDCQRGTRALLQTLGNLGYRASAKKAQICQKQVKYLGYLLKEGQRWLTEARKETVMGQPTPKTPRQLREFLGKAGFCRLFIPGFAEMAAPLYPLTKPGTLFNWGPDQQKAYQEIKQALLTAPALGLPDLTKPFELFVDEKQGYAKGVLTQKLGPWRRPVAYLSKKLDPVAAGWPPCLRMVAAIAVLTKDAGKLTMGQPLVILAPHAVEALVKQPPDRWLSNARMTHYQAMLLDTDRVQFGPVVALNPATLLPLPEKEAPHDCLEILAETHGTRPDLTDQPIPDADYTWYTDGSSFLQEGQRRAGAAVTTETEVIWARALPAGTSAQRAELIALTQALKMAEGKKLNVYTDSRYAFATAHVHGEIYRRRGWLTSEGREIKNKNEILALLKALFLPKRLSIIHCPGHQKGNSAEARGNRMADQAAREAAMKAVLETSTLLAGKRTADGSEFEKRTADGSEFESPKKKAKVE

SEQ ID NO: 1076 - protein, 2096 aa, synthetic construct
MPAAKRVKLDGGDKKYSIGLDIGTNSVGWAVITDEYKVPSKKFKVLGNTDRHSIKKNLIGALLFDSGETAEATRLKRTARRRYTRRKNRICYLQEIFSNEMAKVDDSFFHRLEESFLVEEDKKHERHPIFGNIVDEVAYHEKYPTIYHLRKKLVDSTDKADLRLIYLALAHMIKFRGHFLIEGDLNPDNSDVDKLFIQLVQTYNQLFEENPINASGVDAKAILSARLSKSRRLENLIAQLPGEKKNGLFGNLIALSLGLTPNFKSNFDLAEDAKLQLSKDTYDDDLDNLLAQIGDQYADLFLAAKNLSDAILLSDILRVNTEITKAPLSASMIKRYDEHHQDLTLLKALVRQQLPEKYKEIFFDQSKNGYAGYIDGGASQEEFYKFIKPILEKMDGTEELLVKLNREDLLRKQRTFDNGSIPHQIHLGELHAILRRQEDFYPFLKDNREKIEKILTFRIPYYVGPLARGNSRFAWMTRKSEETITPWNFEEVVDKGASAQSFIERMTNFDKNLPNEKVLPKHSLLYEYFTVYNELTKVKYVTEGMRKPAFLSGEQKKAIVDLLFKTNRKVTVKQLKEDYFKKIECFDSVEISGVEDRFNASLGTYHDLLKIIKDKDFLDNEENEDILEDIVLTLTLFEDREMIEERLKTYAHLFDDKVMKQLKRRRYTGWGRLSRKLINGIRDKQSGKTILDFLKSDGFANRNFMQLIHDDSLTFKEDIQKAQVSGQGDSLHEHIANLAGSPAIKKGILQTVKVVDELVKVMGRHKPENIVIEMARENQTTQKGQKNSRERMKRIEEGIKELGSQILKEHPVENTQLQNEKLYLYYLQNGRDMYVDQELDINRLSDYDVDHIVPQSFLKDDSIDNKVLTRSDKARGKSDNVPSEEVVKKMKNYWRQLLNAKLITQRKFDNLTKAERGGLSELDKAGFIKRQLVETRQITKHVAQILDSRMNTKYDENDKLIREVKVITLKSKLVSDFRKDFQFYKVREINNYHHAHDAYLNAVVGTALIKKYPKLESEFVYGDYKVYDVRKMIAKSEQEIGKATAKYFFYSNIMNFFKTEITLANGEIRKRPLIETNGETGEIVWDKGRDFATVRKVLSMPQVNIVKKTEVQTGGFSKESILPKRNSDKLIARKKDWDPKKYGGFDSPTVAYSVLVVAKVEKGKSKKLKSVKELLGITIMERSSFEKNPIDFLEAKGYKEVKKDLIIKLPKYSLFELENGRKRMLASAGELQKGNELALPSKYVNFLYLASHYEKLKGSPEDNEQKQLFVEQHKHYLDEIIEQISEFSKRVILADANLDKVLSAYNKHRDKPIREQAENIIHLFTLTNLGAPAAFKYFDTTIDRKRYTSTKEVLDATLIHQSITGLYETRIDLSQLGGDGGGGGPAPEAAAKGGTLNIEDEYRLHETSKEPDVPLGSTWLSDFPQAWAETGGMGLAVRQAPLIIPLKATSTPVSIKQYPMSQEARLGIKPHIQRLLDQGILVPCQSPWNTPLLPVKKPGTNDYRPVQDLREVNKRVEDIHPTVPNPYNLLSGLPPSHQWYTVLDLKDAFFCLRLHPTSQPLFAFEWRDPEMGISGQLTWTRLPQGFKNSPTLFNEALHRDLADFRIQHPDLILLQYVDDLLLAATSEQDCQRGTRALLQTLGNLGYRASAKKAQICQKQVKYLGYLLKEGQRWLTEARKETVMGQPTPKTPRQLREFLGKAGFCRLFIPGFAEMAAPLYPLTKPGTLFNWGPDQQKAYQEIKQALLTAPALGLPDLTKPFELFVDEKQGYAKGVLTQKLGPWRRPVAYLSKKLDPVAAGWPPCLRMVAAIAVLTKDAGKLTMGQPLVILAPHAVEALVKQPPDRWLSNARMTHYQAMLLDTDRVQFGPVVALNPATLLPLPEKEAPHDCLEILAETHGTRPDLTDQPIPDADYTWYTDGSSFLQEGQRRAGAAVTTETEVIWARALPAGTSAQRAELIALTQALKMAEGKKLNVYTDSRYAFATAHVHGEIYRRRGWLTSEGREIKNKNEILALLKALFLPKRLSIIHCPGHQKGNSAEARGNRMADQAAREAAMKAVLETSTLLAGKRTADGSEFEKRTADGSEFESPKKKAKVE

SEQ ID NO: 1077 - protein, 2097 aa, synthetic construct
MPAAKRVKLDGGDKKYSIGLDIGTNSVGWAVITDEYKVPSKKFKVLGNTDRHSIKKNLIGALLFDSGETAEATRLKRTARRRYTRRKNRICYLQEIFSNEMAKVDDSFFHRLEESFLVEEDKKHERHPIFGNIVDEVAYHEKYPTIYHLRKKLVDSTDKADLRLIYLALAHMIKFRGHFLIEGDLNPDNSDVDKLFIQLVQTYNQLFEENPINASGVDAKAILSARLSKSRRLENLIAQLPGEKKNGLFGNLIALSLGLTPNFKSNFDLAEDAKLQLSKDTYDDDLDNLLAQIGDQYADLFLAAKNLSDAILLSDILRVNTEITKAPLSASMIKRYDEHHQDLTLLKALVRQQLPEKYKEIFFDQSKNGYAGYIDGGASQEEFYKFIKPILEKMDGTEELLVKLNREDLLRKQRTFDNGSIPHQIHLGELHAILRRQEDFYPFLKDNREKIEKILTFRIPYYVGPLARGNSRFAWMTRKSEETITPWNFEEVVDKGASAQSFIERMTNFDKNLPNEKVLPKHSLLYEYFTVYNELTKVKYVTEGMRKPAFLSGEQKKAIVDLLFKTNRKVTVKQLKEDYFKKIECFDSVEISGVEDRFNASLGTYHDLLKIIKDKDFLDNEENEDILEDIVLTLTLFEDREMIEERLKTYAHLFDDKVMKQLKRRRYTGWGRLSRKLINGIRDKQSGKTILDFLKSDGFANRNFMQLIHDDSLTFKEDIQKAQVSGQGDSLHEHIANLAGSPAIKKGILQTVKVVDELVKVMGRHKPENIVIEMARENQTTQKGQKNSRERMKRIEEGIKELGSQILKEHPVENTQLQNEKLYLYYLQNGRDMYVDQELDINRLSDYDVDHIVPQSFLKDDSIDNKVLTRSDKARGKSDNVPSEEVVKKMKNYWRQLLNAKLITQRKFDNLTKAERGGLSELDKAGFIKRQLVETRQITKHVAQILDSRMNTKYDENDKLIREVKVITLKSKLVSDFRKDFQFYKVREINNYHHAHDAYLNAVVGTALIKKYPKLESEFVYGDYKVYDVRKMIAKSEQEIGKATAKYFFYSNIMNFFKTEITLANGEIRKRPLIETNGETGEIVWDKGRDFATVRKVLSMPQVNIVKKTEVQTGGFSKESILPKRNSDKLIARKKDWDPKKYGGFDSPTVAYSVLVVAKVEKGKSKKLKSVKELLGITIMERSSFEKNPIDFLEAKGYKEVKKDLIIKLPKYSLFELENGRKRMLASAGELQKGNELALPSKYVNFLYLASHYEKLKGSPEDNEQKQLFVEQHKHYLDEIIEQISEFSKRVILADANLDKVLSAYNKHRDKPIREQAENIIHLFTLTNLGAPAAFKYFDTTIDRKRYTSTKEVLDATLIHQSITGLYETRIDLSQLGGDGGGSSGSSGSSGSSGGTLNIEDEYRLHETSKEPDVPLGSTWLSDFPQAWAETGGMGLAVRQAPLIIPLKATSTPVSIKQYPMSQEARLGIKPHIQRLLDQGILVPCQSPWNTPLLPVKKPGTNDYRPVQDLREVNKRVEDIHPTVPNPYNLLSGLPPSHQWYTVLDLKDAFFCLRLHPTSQPLFAFEWRDPEMGISGQLTWTRLPQGFKNSPTLFNEALHRDLADFRIQHPDLILLQYVDDLLLAATSEQDCQRGTRALLQTLGNLGYRASAKKAQICQKQVKYLGYLLKEGQRWLTEARKETVMGQPTPKTPRQLREFLGKAGFCRLFIPGFAEMAAPLYPLTKPGTLFNWGPDQQKAYQEIKQALLTAPALGLPDLTKPFELFVDEKQGYAKGVLTQKLGPWRRPVAYLSKKLDPVAAGWPPCLRMVAAIAVLTKDAGKLTMGQPLVILAPHAVEALVKQPPDRWLSNARMTHYQAMLLDTDRVQFGPVVALNPATLLPLPEKEAPHDCLEILAETHGTRPDLTDQPIPDADYTWYTDGSSFLQEGQRRAGAAVTTETEVIWARALPAGTSAQRAELIALTQALKMAEGKKLNVYTDSRYAFATAHVHGEIYRRRGWLTSEGREIKNKNEILALLKALFLPKRLSIIHCPGHQKGNSAEARGNRMADQAAREAAMKAVLETSTLLAGKRTADGSEFEKRTADGSEFESPKKKAKVE

SEQ ID NO: 1078 - protein, 2093 aa, synthetic construct
MPAAKRVKLDGGDKKYSIGLDIGTNSVGWAVITDEYKVPSKKFKVLGNTDRHSIKKNLIGALLFDSGETAEATRLKRTARRRYTRRKNRICYLQEIFSNEMAKVDDSFFHRLEESFLVEEDKKHERHPIFGNIVDEVAYHEKYPTIYHLRKKLVDSTDKADLRLIYLALAHMIKFRGHFLIEGDLNPDNSDVDKLFIQLVQTYNQLFEENPINASGVDAKAILSARLSKSRRLENLIAQLPGEKKNGLFGNLIALSLGLTPNFKSNFDLAEDAKLQLSKDTYDDDLDNLLAQIGDQYADLFLAAKNLSDAILLSDILRVNTEITKAPLSASMIKRYDEHHQDLTLLKALVRQQLPEKYKEIFFDQSKNGYAGYIDGGASQEEFYKFIKPILEKMDGTEELLVKLNREDLLRKQRTFDNGSIPHQIHLGELHAILRRQEDFYPFLKDNREKIEKILTFRIPYYVGPLARGNSRFAWMTRKSEETITPWNFEEVVDKGASAQSFIERMTNFDKNLPNEKVLPKHSLLYEYFTVYNELTKVKYVTEGMRKPAFLSGEQKKAIVDLLFKTNRKVTVKQLKEDYFKKIECFDSVEISGVEDRFNASLGTYHDLLKIIKDKDFLDNEENEDILEDIVLTLTLFEDREMIEERLKTYAHLFDDKVMKQLKRRRYTGWGRLSRKLINGIRDKQSGKTILDFLKSDGFANRNFMQLIHDDSLTFKEDIQKAQVSGQGDSLHEHIANLAGSPAIKKGILQTVKVVDELVKVMGRHKPENIVIEMARENQTTQKGQKNSRERMKRIEEGIKELGSQILKEHPVENTQLQNEKLYLYYLQNGRDMYVDQELDINRLSDYDVDHIVPQSFLKDDSIDNKVLTRSDKARGKSDNVPSEEVVKKMKNYWRQLLNAKLITQRKFDNLTKAERGGLSELDKAGFIKRQLVETRQITKHVAQILDSRMNTKYDENDKLIREVKVITLKSKLVSDFRKDFQFYKVREINNYHHAHDAYLNAVVGTALIKKYPKLESEFVYGDYKVYDVRKMIAKSEQEIGKATAKYFFYSNIMNFFKTEITLANGEIRKRPLIETNGETGEIVWDKGRDFATVRKVLSMPQVNIVKKTEVQTGGFSKESILPKRNSDKLIARKKDWDPKKYGGFDSPTVAYSVLVVAKVEKGKSKKLKSVKELLGITIMERSSFEKNPIDFLEAKGYKEVKKDLIIKLPKYSLFELENGRKRMLASAGELQKGNELALPSKYVNFLYLASHYEKLKGSPEDNEQKQLFVEQHKHYLDEIIEQISEFSKRVILADANLDKVLSAYNKHRDKPIREQAENIIHLFTLTNLGAPAAFKYFDTTIDRKRYTSTKEVLDATLIHQSITGLYETRIDLSQLGGDGGEAAAKGSSGGTLNIEDEYRLHETSKEPDVPLGSTWLSDFPQAWAETGGMGLAVRQAPLIIPLKATSTPVSIKQYPMSQEARLGIKPHIQRLLDQGILVPCQSPWNTPLLPVKKPGTNDYRPVQDLREVNKRVEDIHPTVPNPYNLLSGLPPSHQWYTVLDLKDAFFCLRLHPTSQPLFAFEWRDPEMGISGQLTWTRLPQGFKNSPTLFNEALHRDLADFRIQHPDLILLQYVDDLLLAATSEQDCQRGTRALLQTLGNLGYRASAKKAQICQKQVKYLGYLLKEGQRWLTEARKETVMGQPTPKTPRQLREFLGKAGFCRLFIPGFAEMAAPLYPLTKPGTLFNWGPDQQKAYQEIKQALLTAPALGLPDLTKPFELFVDEKQGYAKGVLTQKLGPWRRPVAYLSKKLDPVAAGWPPCLRMVAAIAVLTKDAGKLTMGQPLVILAPHAVEALVKQPPDRWLSNARMTHYQAMLLDTDRVQFGPVVALNPATLLPLPEKEAPHDCLEILAETHGTRPDLTDQPIPDADYTWYTDGSSFLQEGQRRAGAAVTTETEVIWARALPAGTSAQRAELIALTQALKMAEGKKLNVYTDSRYAFATAHVHGEIYRRRGWLTSEGREIKNKNEILALLKALFLPKRLSIIHCPGHQKGNSAEARGNRMADQAAREAAMKAVLETSTLLAGKRTADGSEFEKRTADGSEFESPKKKAKVE

SEQ ID NO: 1079 - protein, 2100 aa, synthetic construct
MPAAKRVKLDGGDKKYSIGLDIGTNSVGWAVITDEYKVPSKKFKVLGNTDRHSIKKNLIGALLFDSGETAEATRLKRTARRRYTRRKNRICYLQEIFSNEMAKVDDSFFHRLEESFLVEEDKKHERHPIFGNIVDEVAYHEKYPTIYHLRKKLVDSTDKADLRLIYLALAHMIKFRGHFLIEGDLNPDNSDVDKLFIQLVQTYNQLFEENPINASGVDAKAILSARLSKSRRLENLIAQLPGEKKNGLFGNLIALSLGLTPNFKSNFDLAEDAKLQLSKDTYDDDLDNLLAQIGDQYADLFLAAKNLSDAILLSDILRVNTEITKAPLSASMIKRYDEHHQDLTLLKALVRQQLPEKYKEIFFDQSKNGYAGYIDGGASQEEFYKFIKPILEKMDGTEELLVKLNREDLLRKQRTFDNGSIPHQIHLGELHAILRRQEDFYPFLKDNREKIEKILTFRIPYYVGPLARGNSRFAWMTRKSEETITPWNFEEVVDKGASAQSFIERMTNFDKNLPNEKVLPKHSLLYEYFTVYNELTKVKYVTEGMRKPAFLSGEQKKAIVDLLFKTNRKVTVKQLKEDYFKKIECFDSVEISGVEDRFNASLGTYHDLLKIIKDKDFLDNEENEDILEDIVLTLTLFEDREMIEERLKTYAHLFDDKVMKQLKRRRYTGWGRLSRKLINGIRDKQSGKTILDFLKSDGFANRNFMQLIHDDSLTFKEDIQKAQVSGQGDSLHEHIANLAGSPAIKKGILQTVKVVDELVKVMGRHKPENIVIEMARENQTTQKGQKNSRERMKRIEEGIKELGSQILKEHPVENTQLQNEKLYLYYLQNGRDMYVDQELDINRLSDYDVDHIVPQSFLKDDSIDNKVLTRSDKARGKSDNVPSEEVVKKMKNYWRQLLNAKLITQRKFDNLTKAERGGLSELDKAGFIKRQLVETRQITKHVAQILDSRMNTKYDENDKLIREVKVITLKSKLVSDFRKDFQFYKVREINNYHHAHDAYLNAVVGTALIKKYPKLESEFVYGDYKVYDVRKMIAKSEQEIGKATAKYFFYSNIMNFFKTEITLANGEIRKRPLIETNGETGEIVWDKGRDFATVRKVLSMPQVNIVKKTEVQTGGFSKESILPKRNSDKLIARKKDWDPKKYGGFDSPTVAYSVLVVAKVEKGKSKKLKSVKELLGITIMERSSFEKNPIDFLEAKGYKEVKKDLIIKLPKYSLFELENGRKRMLASAGELQKGNELALPSKYVNFLYLASHYEKLKGSPEDNEQKQLFVEQHKHYLDEIIEQISEFSKRVILADANLDKVLSAYNKHRDKPIREQAENIIHLFTLTNLGAPAAFKYFDTTIDRKRYTSTKEVLDATLIHQSITGLYETRIDLSQLGGDGGGGGGSEAAAKGGGGSGGTLNIEDEYRLHETSKEPDVPLGSTWLSDFPQAWAETGGMGLAVRQAPLIIPLKATSTPVSIKQYPMSQEARLGIKPHIQRLLDQGILVPCQSPWNTPLLPVKKPGTNDYRPVQDLREVNKRVEDIHPTVPNPYNLLSGLPPSHQWYTVLDLKDAFFCLRLHPTSQPLFAFEWRDPEMGISGQLTWTRLPQGFKNSPTLFNEALHRDLADFRIQHPDLILLQYVDDLLLAATSEQDCQRGTRALLQTLGNLGYRASAKKAQICQKQVKYLGYLLKEGQRWLTEARKETVMGQPTPKTPRQLREFLGKAGFCRLFIPGFAEMAAPLYPLTKPGTLFNWGPDQQKAYQEIKQALLTAPALGLPDLTKPFELFVDEKQGYAKGVLTQKLGPWRRPVAYLSKKLDPVAAGWPPCLRMVAAIAVLTKDAGKLTMGQPLVILAPHAVEALVKQPPDRWLSNARMTHYQAMLLDTDRVQFGPVVALNPATLLPLPEKEAPHDCLEILAETHGTRPDLTDQPIPDADYTWYTDGSSFLQEGQRRAGAAVTTETEVIWARALPAGTSAQRAELIALTQALKMAEGKKLNVYTDSRYAFATAHVHGEIYRRRGWLTSEGREIKNKNEILALLKALFLPKRLSIIHCPGHQKGNSAEARGNRMADQAAREAAMKAVLETSTLLAGKRTADGSEFEKRTADGSEFESPKKKAKVE

SEQ ID NO: 1080 - protein, 2088 aa, synthetic construct
MPAAKRVKLDGGDKKYSIGLDIGTNSVGWAVITDEYKVPSKKFKVLGNTDRHSIKKNLIGALLFDSGETAEATRLKRTARRRYTRRKNRICYLQEIFSNEMAKVDDSFFHRLEESFLVEEDKKHERHPIFGNIVDEVAYHEKYPTIYHLRKKLVDSTDKADLRLIYLALAHMIKFRGHFLIEGDLNPDNSDVDKLFIQLVQTYNQLFEENPINASGVDAKAILSARLSKSRRLENLIAQLPGEKKNGLFGNLIALSLGLTPNFKSNFDLAEDAKLQLSKDTYDDDLDNLLAQIGDQYADLFLAAKNLSDAILLSDILRVNTEITKAPLSASMIKRYDEHHQDLTLLKALVRQQLPEKYKEIFFDQSKNGYAGYIDGGASQEEFYKFIKPILEKMDGTEELLVKLNREDLLRKQRTFDNGSIPHQIHLGELHAILRRQEDFYPFLKDNREKIEKILTFRIPYYVGPLARGNSRFAWMTRKSEETITPWNFEEVVDKGASAQSFIERMTNFDKNLPNEKVLPKHSLLYEYFTVYNELTKVKYVTEGMRKPAFLSGEQKKAIVDLLFKTNRKVTVKQLKEDYFKKIECFDSVEISGVEDRFNASLGTYHDLLKIIKDKDFLDNEENEDILEDIVLTLTLFEDREMIEERLKTYAHLFDDKVMKQLKRRRYTGWGRLSRKLINGIRDKQSGKTILDFLKSDGFANRNFMQLIHDDSLTFKEDIQKAQVSGQGDSLHEHIANLAGSPAIKKGILQTVKVVDELVKVMGRHKPENIVIEMARENQTTQKGQKNSRERMKRIEEGIKELGSQILKEHPVENTQLQNEKLYLYYLQNGRDMYVDQELDINRLSDYDVDHIVPQSFLKDDSIDNKVLTRSDKARGKSDNVPSEEVVKKMKNYWRQLLNAKLITQRKFDNLTKAERGGLSELDKAGFIKRQLVETRQITKHVAQILDSRMNTKYDENDKLIREVKVITLKSKLVSDFRKDFQFYKVREINNYHHAHDAYLNAVVGTALIKKYPKLESEFVYGDYKVYDVRKMIAKSEQEIGKATAKYFFYSNIMNFFKTEITLANGEIRKRPLIETNGETGEIVWDKGRDFATVRKVLSMPQVNIVKKTEVQTGGFSKESILPKRNSDKLIARKKDWDPKKYGGFDSPTVAYSVLVVAKVEKGKSKKLKSVKELLGITIMERSSFEKNPIDFLEAKGYKEVKKDLIIKLPKYSLFELENGRKRMLASAGELQKGNELALPSKYVNFLYLASHYEKLKGSPEDNEQKQLFVEQHKHYLDEIIEQISEFSKRVILADANLDKVLSAYNKHRDKPIREQAENIIHLFTLTNLGAPAAFKYFDTTIDRKRYTSTKEVLDATLIHQSITGLYETRIDLSQLGGDGGGGGGGTLNIEDEYRLHETSKEPDVPLGSTWLSDFPQAWAETGGMGLAVRQAPLIIPLKATSTPVSIKQYPMSQEARLGIKPHIQRLLDQGILVPCQSPWNTPLLPVKKPGTNDYRPVQDLREVNKRVEDIHPTVPNPYNLLSGLPPSHQWYTVLDLKDAFFCLRLHPTSQPLFAFEWRDPEMGISGQLTWTRLPQGFKNSPTLFNEALHRDLADFRIQHPDLILLQYVDDLLLAATSEQDCQRGTRALLQTLGNLGYRASAKKAQICQKQVKYLGYLLKEGQRWLTEARKETVMGQPTPKTPRQLREFLGKAGFCRLFIPGFAEMAAPLYPLTKPGTLFNWGPDQQKAYQEIKQALLTAPALGLPDLTKPFELFVDEKQGYAKGVLTQKLGPWRRPVAYLSKKLDPVAAGWPPCLRMVAAIAVLTKDAGKLTMGQPLVILAPHAVEALVKQPPDRWLSNARMTHYQAMLLDTDRVQFGPVVALNPATLLPLPEKEAPHDCLEILAETHGTRPDLTDQPIPDADYTWYTDGSSFLQEGQRRAGAAVTTETEVIWARALPAGTSAQRAELIALTQALKMAEGKKLNVYTDSRYAFATAHVHGEIYRRRGWLTSEGREIKNKNEILALLKALFLPKRLSIIHCPGHQKGNSAEARGNRMADQAAREAAMKAVLETSTLLAGKRTADGSEFEKRTADGSEFESPKKKAKVE

SEQ ID NO: 1081 - protein, 2096 aa, synthetic construct
MPAAKRVKLDGGDKKYSIGLDIGTNSVGWAVITDEYKVPSKKFKVLGNTDRHSIKKNLIGALLFDSGETAEATRLKRTARRRYTRRKNRICYLQEIFSNEMAKVDDSFFHRLEESFLVEEDKKHERHPIFGNIVDEVAYHEKYPTIYHLRKKLVDSTDKADLRLIYLALAHMIKFRGHFLIEGDLNPDNSDVDKLFIQLVQTYNQLFEENPINASGVDAKAILSARLSKSRRLENLIAQLPGEKKNGLFGNLIALSLGLTPNFKSNFDLAEDAKLQLSKDTYDDDLDNLLAQIGDQYADLFLAAKNLSDAILLSDILRVNTEITKAPLSASMIKRYDEHHQDLTLLKALVRQQLPEKYKEIFFDQSKNGYAGYIDGGASQEEFYKFIKPILEKMDGTEELLVKLNREDLLRKQRTFDNGSIPHQIHLGELHAILRRQEDFYPFLKDNREKIEKILTFRIPYYVGPLARGNSRFAWMTRKSEETITPWNFEEVVDKGASAQSFIERMTNFDKNLPNEKVLPKHSLLYEYFTVYNELTKVKYVTEGMRKPAFLSGEQKKAIVDLLFKTNRKVTVKQLKEDYFKKIECFDSVEISGVEDRFNASLGTYHDLLKIIKDKDFLDNEENEDILEDIVLTLTLFEDREMIEERLKTYAHLFDDKVMKQLKRRRYTGWGRLSRKLINGIRDKQSGKTILDFLKSDGFANRNFMQLIHDDSLTFKEDIQKAQVSGQGDSLHEHIANLAGSPAIKKGILQTVKVVDELVKVMGRHKPENIVIEMARENQTTQKGQKNSRERMKRIEEGIKELGSQILKEHPVENTQLQNEKLYLYYLQNGRDMYVDQELDINRLSDYDVDHIVPQSFLKDDSIDNKVLTRSDKARGKSDNVPSEEVVKKMKNYWRQLLNAKLITQRKFDNLTKAERGGLSELDKAGFIKRQLVETRQITKHVAQILDSRMNTKYDENDKLIREVKVITLKSKLVSDFRKDFQFYKVREINNYHHAHDAYLNAVVGTALIKKYPKLESEFVYGDYKVYDVRKMIAKSEQEIGKATAKYFFYSNIMNFFKTEITLANGEIRKRPLIETNGETGEIVWDKGRDFATVRKVLSMPQVNIVKKTEVQTGGFSKESILPKRNSDKLIARKKDWDPKKYGGFDSPTVAYSVLVVAKVEKGKSKKLKSVKELLGITIMERSSFEKNPIDFLEAKGYKEVKKDLIIKLPKYSLFELENGRKRMLASAGELQKGNELALPSKYVNFLYLASHYEKLKGSPEDNEQKQLFVEQHKHYLDEIIEQISEFSKRVILADANLDKVLSAYNKHRDKPIREQAENIIHLFTLTNLGAPAAFKYFDTTIDRKRYTSTKEVLDATLIHQSITGLYETRIDLSQLGGDGGGGSEAAAKGGGGGTLNIEDEYRLHETSKEPDVPLGSTWLSDFPQAWAETGGMGLAVRQAPLIIPLKATSTPVSIKQYPMSQEARLGIKPHIQRLLDQGILVPCQSPWNTPLLPVKKPGTNDYRPVQDLREVNKRVEDIHPTVPNPYNLLSGLPPSHQWYTVLDLKDAFFCLRLHPTSQPLFAFEWRDPEMGISGQLTWTRLPQGFKNSPTLFNEALHRDLADFRIQHPDLILLQYVDDLLLAATSEQDCQRGTRALLQTLGNLGYRASAKKAQICQKQVKYLGYLLKEGQRWLTEARKETVMGQPTPKTPRQLREFLGKAGFCRLFIPGFAEMAAPLYPLTKPGTLFNWGPDQQKAYQEIKQALLTAPALGLPDLTKPFELFVDEKQGYAKGVLTQKLGPWRRPVAYLSKKLDPVAAGWPPCLRMVAAIAVLTKDAGKLTMGQPLVILAPHAVEALVKQPPDRWLSNARMTHYQAMLLDTDRVQFGPVVALNPATLLPLPEKEAPHDCLEILAETHGTRPDLTDQPIPDADYTWYTDGSSFLQEGQRRAGAAVTTETEVIWARALPAGTSAQRAELIALTQALKMAEGKKLNVYTDSRYAFATAHVHGEIYRRRGWLTSEGREIKNKNEILALLKALFLPKRLSIIHCPGHQKGNSAEARGNRMADQAAREAAMKAVLETSTLLAGKRTADGSEFEKRTADGSEFESPKKKAKVE

(The sequence listing continues in the following parts.)